United States Patent Application Publication US 2026/0240958 A1 - sequence listing, part 19

SEQ ID NO: 16301 - RNA, 9485 nt, synthetic construct
  source 1..9485: mol_type = other RNA
aggaaataagagagaaaagaagagtaagaagaaatataagagccaccatggcccctaagaagaagcgtaaagtgagccggatggaacgcctcgtctacgaggtgcggcagaagtgcagaaacatcgaggacatctgcatctcctgcggatctctgaacgtgaccctggagcacccactgttcatcggcggcatgtgccagaactgtaaaaactgttttctggagtgtgcctatcaatacgacgatgacggctaccagagctactgcaccatctgttgcggcggaagagaggtgctgatgtgtggaaataacaactgctgccggtgcttctgcgtggaatgcgtggacctgctggtgggccccggcgccgcccaggccgctattaaggaagatccttggaactgctacatgtgcggccacaagggcacatacggcctgctgagacggagagaggactggcctagcagactgcagatgttcttcgccaataaccacgaccaggagttcgacccccctaaggtgtaccctcccgtccccgccgagaagagaaagcccatccgggtcctgagcctgttcgatggcatcgccaccggtctgctggtgctgaaggacctgggcatccaggtggataggtacattgcctccgaggtgtgcgaggactccatcaccgtgggaatggtgcgtcatcagggcaagatcatgtacgtgggcgacgtgcggagcgtgacacagaagcatatccaggagtggggccctttcgacctggtgatcggcggcagcccttgcaatgacctgagcatcgtgaacccagcccggaagggcctgtacgagggaaccggcagactgttcttcgagttttacagactgctgcacgacgcccggcctaaggaaggcgacgaccggcccttcttttggctgttcgagaatgtggtggccatgggagtcagcgacaagcgggatattagccggttcctggagagcaaccccgtgatgatcgatgccaaggaagtgagcgccgcccaccgggccagatacttctggggcaatctgcctggcatgaacagacccctggccagcaccgtgaacgacaagctggagctgcaggagtgcctggagcacggccggatcgccaagttcagcaaggtgagaaccatcaccacccgaagcaacagcatcaaacaaggcaaggaccagcactttcctgtgttcatgaacgagaaggaggacatcctgtggtgtaccgagatggagagagtgttcgggttcccagtccactacacagatgtcagcaacatgtctagactggccagacagagactgctgggaagaagctggtccgtccctgtgatcagacacctgttcgcccctctgaaggagtacttcgcctgcgtgagcagcggcaacagcaacgccaacagccggggccccagcttctctagcggcctggtgccactgtccctgagagggagccacatgggccccatggagatctacaaaaccgtgagcgcctggaagcggcagcctgtgcgcgtgctgagcctgtttcggaatatcgataaagtcctgaaaagcctgggattcctggagagcggctctggctccggcggtggcaccctgaagtacgtggaggatgtgacaaacgtggtcagacgggatgtggagaagtggggccccttcgatctggtgtacggcagcacccaacccctgggcagctcttgtgaccggtgccctggctggtacatgtttcagttccaccggatcctgcagtacgccctgccgagacaggagtcccagcggccattcttttggattttcatggacaacttgctgctgaccgaggatgaccaggaaactaccactcggttcctgcagaccgaagccgtgaccctgcaggacgtgagaggccgggactaccagaacgccatgcgggtgtggtccaacatccctggactgaaaagcaagcacgcacctctgacccctaaagaagaggagtacctgcaggcccaggtgcggagcagaagcaagctggacgcccctaaggtggatctgctggtgaagaattgcctcctgcccctgagagagtacttcaagtatttcagccagaatagtctgcccctgggaggcagcggcggcggcgccctggtgacatttgaggacgtcgccgtgcggttcacccaggaggaatgggctctgctggatccttctcagaaaatcctgtaccgggacgtgatgagagagacataccggaatctgacctccgtgggcatcaactgggaatgttgggaccttgaagcctgcttcagaagcctgggaagaaacctgagagtgcaggtggtgaagagaaagtgcgagctgaccaacagcggcccctgcgccgagggcggcccaagcagcggcgcccctcctcccagcggcggcagcccagccggctccccaacctctaccgaggagggcacctctgagtccgccacccccgagagcggccctggcacctccaccgagcccagcgagggcagcgcacccggcagccctgccggcagccccacctccacagaggagggaaccagcaccgagcccagcgaaggcagcgccccaggcaccagcaccgagcctagtgagcaggagattaaacggatcaacaagatcagaagaagacttgtgaaagacagcaacaccaagaaggccggcaagacaggccccatgaaaaccctgctggttagagtgatgacacccgatctgagagagcggctggaaaacctgagaaagaagcctgaaaatatcccccagcccatcagcaatacatctagagccaacctgaataagctgctgaccgattacaccgaaatgaagaaggcgatcctgcatgtgtactgggaagagttccagaaggaccctgtgggcctgatgagccgggtggcccagcctgccagcaagaagatcgatcagaacaagctgaaacctgagatggacgagaagggcaacctgaccaccgccggctttgcctgctctcagtgtggccagcccctgttcgtgtacaagctggagcaggtgtctgagaagggcaaggcttacaccaactacttcggacggtgcaatgtggccgagcacgaaaagctgatcctgctggcccagctgaagcccgagaaggatagcgacgaagccgtgacatatagcctgggaaagtttgggcagagggccctggatttctacagcattcatgtgaccaaggagtccacccaccccgtgaagcccctggcccagatcgccggaaacagatacgcctccggacctgtgggaaaggccctgagcgacgcatgtatgggcacaatcgcctccttcctgtctaagtaccaggacatcatcatcgaacaccagaaggtggtgaagggcaaccagaagagactggagagcctgcgggagctggccggcaaggaaaacctggaataccctagcgtgaccctgccacctcagcctcacaccaaggagggcgttgatgcctacaacgaagtgatcgcccgggtgcgaatgtgggtgaacctgaacctgtggcagaagctgaagctaagcagagatgatgccaagcctctgctgagactgaagggattcccttcctttcctctggtcgagagacaggccaacgaagtggactggtgggacatggtgtgtaacgtgaagaagctgatcaacgagaaaaaggaggatggcaaggtgttttggcagaatctggctggctacaagagacaggaagccctgagaccatacctgagcagcgaggaagatcggaagaagggaaagaaattcgctcggtaccagctgggcgacctgctgctgcacctggaaaagaagcacggcgaggactggggaaaggtgtacgacgaggcctgggagcggattgacaagaaagtggaaggcctgagcaagcacatcaagctggaagaggaacggagaagcgaggacgcccagagcaaggccgccctgaccgactggctgcgggctaaggccagcttcgtgatcgagggcctgaaggaggccgacaaggacgagttctgcagatgcgagctgaagctgcagaagtggtacggggacctgcggggaaagcccttcgccatcgaagccgagaacagcatcctggacatcagcggcttcagcaagcagtacaactgtgccttcatctggcagaaggacggcgtgaagaagctgaacctgtacctgatcatcaactacttcaagggcggcaagctgcggttcaagaagatcaaacctgaagccttcgaagccaacagattctacaccgtgatcaacaaaaagagcggcgagatcgtgcccatggaggtgaacttcaacttcgacgaccccaacctgatcatcctgcctctggcctttggcaagagacagggcagagaattcatctggaacgacctgctgtccctggaaaccggcagcctgaagctggccaacggaagagtgatcgagaagacactgtacaacagaagaacccggcaggatgagcctgccctgttcgtggccctgaccttcgagcggcgggaggtcctggactcctccaatatcaaaccaatgaacctgatcggcgtggcaagaggcgaaaacatccccgccgtgatcgccctgaccgaccccgagggctgcccactgagccggtttaaggatagcctgggaaacccaacccacatcctgagaatcggcgagagctataaggagaagcagcggaccatccaggccaagaaggaggtggagcagcggagagccggcggctacagccggaagtacgccagcaaagccaagaatctggcagacgatatggtgagaaacaccgctagagatctgctgtactacgccgtgacccaggatgccatgctgatcttcgccaacctgagccggggcttcggccggcagggcaagcggaccttcatggccgagagacagtacacacggatggaggactggctgaccgccaagctggcctacgagggcctgagcaagacctacctgtccaagacactggcccagtacacctccaagacatgcagcaactgtgggtttaccatcaccagcgccgactacgacagggtgctggagaagctgaagaagacagcaacaggctggatgaccacaattaacggcaaggagctgaaggtggagggccagattacctactacaacagatacaagagacagaacgtagtcaaggacctgtccgtcgagctggatagactgagcgaagaatctgtgaacaacgacatctcctcctggacaaagggcagaagcggagaagctctgagcctcctgaagaaaagattctcccatagacccgtgcaggagaagttcgtgtgcctgaactgcggcttcgagacacacgcagccgagcaagccgccctgaacatcgccagatcctggctgttcctgcggagccaggagtacaagaaataccagacaaacaagacaaccggcaacaccgataagagagccttcgtcgagacctggcagtccttttaccggaagaagcttaaggaggtgtggaaacctgccgtgcggtctggcggatctggcggaggctccgcccacggcagcgtgatgttcagcgacgtgagcatcgacttcagccaggaggagtgggagtacctgaacctggagcagagggacctgtacaggaacgtgatgctggagaactacagcaacctggtgagcctgggctgcttcatcagcaagcccgacgtgatcagcctgctggagcagggcaaggagccctggaaggtggtgaggaagggcaggaggccctacagcggcctggagaccaagaagggcggcccaagcagcggcgcccctcctcccagcggcggcagcccagccggctccccaacctctaccgaggagggcacctctgagtccgccacccccgagagcggccctggcacctccaccgagcccagcgagggcagcgcacccggcagccctgccggcagccccacctccacagaggagggaaccagcaccgagcccagcgaaggcagcgccccaggcaccagcaccgagcctagtgagcaggagattaaacggatcaacaagatcagaagaagacttgtgaaagacagcaacaccaagaaggccggcaagacaggccccatgaaaaccctgctggttagagtgatgacacccgatctgagagagcggctggaaaacctgagaaagaagcctgaaaatatcccccagcccatcagcaatacatctagagccaacctgaataagctgctgaccgattacaccgaaatgaagaaggcgatcctgcatgtgtactgggaagagttccagaaggaccctgtgggcctgatgagccgggtggcccagcctgccagcaagaagatcgatcagaacaagctgaaacctgagatggacgagaagggcaacctgaccaccgccggctttgcctgctctcagtgtggccagcccctgttcgtgtacaagctggagcaggtgtctgagaagggcaaggcttacaccaactacttcggacggtgcaatgtggccgagcacgaaaagctgatcctgctggcccagctgaagcccgagaaggatagcgacgaagccgtgacatatagcctgggaaagtttgggcagagggccctggatttctacagcattcatgtgaccaaggagtccacccaccccgtgaagcccctggcccagatcgccggaaacagatacgcctccggacctgtgggaaaggccctgagcgacgcatgtatgggcacaatcgcctccttcctgtctaagtaccaggacatcatcatcgaacaccagaaggtggtgaagggcaaccagaagagactggagagcctgcgggagctggccggcaaggaaaacctggaataccctagcgtgaccctgccacctcagcctcacaccaaggagggcgttgatgcctacaacgaagtgatcgcccgggtgcgaatgtgggtgaacctgaacctgtggcagaagctgaagctaagcagagatgatgccaagcctctgctgagactgaagggattcccttcctttcctctggtcgagagacaggccaacgaagtggactggtgggacatggtgtgtaacgtgaagaagctgatcaacgagaaaaaggaggatggcaaggtgttttggcagaatctggctggctacaagagacaggaagccctgagaccatacctgagcagcgaggaagatcggaagaagggaaagaaattcgctcggtaccagctgggcgacctgctgctgcacctggaaaagaagcacggcgaggactggggaaaggtgtacgacgaggcctgggagcggattgacaagaaagtggaaggcctgagcaagcacatcaagctggaagaggaacggagaagcgaggacgcccagagcaaggccgccctgaccgactggctgcgggctaaggccagcttcgtgatcgagggcctgaaggaggccgacaaggacgagttctgcagatgcgagctgaagctgcagaagtggtacggggacctgcggggaaagcccttcgccatcgaagccgagaacagcatcctggacatcagcggcttcagcaagcagtacaactgtgccttcatctggcagaaggacggcgtgaagaagctgaacctgtacctgatcatcaactacttcaagggcggcaagctgcggttcaagaagatcaaacctgaagccttcgaagccaacagattctacaccgtgatcaacaaaaagagcggcgagatcgtgcccatggaggtgaacttcaacttcgacgaccccaacctgatcatcctgcctctggcctttggcaagagacagggcagagaattcatctggaacgacctgctgtccctggaaaccggcagcctgaagctggccaacggaagagtgatcgagaagacactgtacaacagaagaacccggcaggatgagcctgccctgttcgtggccctgaccttcgagcggcgggaggtcctggactcctccaatatcaaaccaatgaacctgatcggcgtggcaagaggcgaaaacatccccgccgtgatcgccctgaccgaccccgagggctgcccactgagccggtttaaggatagcctgggaaacccaacccacatcctgagaatcggcgagagctataaggagaagcagcggaccatccaggccaagaaggaggtggagcagcggagagccggcggctacagccggaagtacgccagcaaagccaagaatctggcagacgatatggtgagaaacaccgctagagatctgctgtactacgccgtgacccaggatgccatgctgatcttcgccaacctgagccggggcttcggccggcagggcaagcggaccttcatggccgagagacagtacacacggatggaggactggctgaccgccaagctggcctacgagggcctgagcaagacctacctgtccaagacactggcccagtacacctccaagacatgcagcaactgtgggtttaccatcaccagcgccgactacgacagggtgctggagaagctgaagaagacagcaacaggctggatgaccacaattaacggcaaggagctgaaggtggagggccagattacctactacaacagatacaagagacagaacgtagtcaaggacctgtccgtcgagctggatagactgagcgaagaatctgtgaacaacgacatctcctcctggacaaagggcagaagcggagaagctctgagcctcctgaagaaaagattctcccatagacccgtgcaggagaagttcgtgtgcctgaactgcggcttcgagacacacgcagccgagcaagccgccctgaacatcgccagatcctggctgttcctgcggagccaggagtacaagaaataccagacaaacaagacaaccggcaacaccgataagagagccttcgtcgagacctggcagtccttttaccggaagaagcttaaggaggtgtggaaacctgccgtgcggtctggcggatctggcggaggctcctgcccacggcagcgtgatgttcagcgacgtgagcatcgacttcagccaggaggagtgggagtacctgaacctggagcagagggacctgtacaggaacgtgatgctggagaactacagcaacctggtgagcctgggctgcttcatcagcaagcccgacgtgatcagcctgctggagcagggcaaggagccctggaaggtggtgaggaagggcaggaggccctacagcggcctggagaccaagaagggatctggctccggcagcggccccaagaaaaagagaaaagtctaagctgccttctgcggggcttgccttctggccatgcccttcttctctcccttgcacctgtacctcttggtctttgaataaagcctgagtaggaaggctagcaaaaaaaaaaaaaaaaaaaaaaaaaaaaaaaaaaaaaaaaaaaaaaaaaaaaaaaaaaaaaaaaaaaaaaaaaaaaaaaa

SEQ ID NO: 16302 - RNA, 9485 nt, synthetic construct
  source 1..9485: mol_type = other RNA
aggaaataagagagaaaagaagagtaagaagaaatataagagccaccatggcccctaagaagaagcgtaaagtgagccggatggaacgcctcgtctacgaggtgcggcagaagtgcagaaacatcgaggacatctgcatctcctgcggatctctgaacgtgaccctggagcacccactgttcatcggcggcatgtgccagaactgtaaaaactgttttctggagtgtgcctatcaatacgacgatgacggctaccagagctactgcaccatctgttgcggcggaagagaggtgctgatgtgtggaaataacaactgctgccggtgcttctgcgtggaatgcgtggacctgctggtgggccccggcgccgcccaggccgctattaaggaagatccttggaactgctacatgtgcggccacaagggcacatacggcctgctgagacggagagaggactggcctagcagactgcagatgttcttcgccaataaccacgaccaggagttcgacccccctaaggtgtaccctcccgtccccgccgagaagagaaagcccatccgggtcctgagcctgttcgatggcatcgccaccggtctgctggtgctgaaggacctgggcatccaggtggataggtacattgcctccgaggtgtgcgaggactccatcaccgtgggaatggtgcgtcatcagggcaagatcatgtacgtgggcgacgtgcggagcgtgacacagaagcatatccaggagtggggccctttcgacctggtgatcggcggcagcccttgcaatgacctgagcatcgtgaacccagcccggaagggcctgtacgagggaaccggcagactgttcttcgagttttacagactgctgcacgacgcccggcctaaggaaggcgacgaccggcccttcttttggctgttcgagaatgtggtggccatgggagtcagcgacaagcgggatattagccggttcctggagagcaaccccgtgatgatcgatgccaaggaagtgagcgccgcccaccgggccagatacttctggggcaatctgcctggcatgaacagacccctggccagcaccgtgaacgacaagctggagctgcaggagtgcctggagcacggccggatcgccaagttcagcaaggtgagaaccatcaccacccgaagcaacagcatcaaacaaggcaaggaccagcactttcctgtgttcatgaacgagaaggaggacatcctgtggtgtaccgagatggagagagtgttcgggttcccagtccactacacagatgtcagcaacatgtctagactggccagacagagactgctgggaagaagctggtccgtccctgtgatcagacacctgttcgcccctctgaaggagtacttcgcctgcgtgagcagcggcaacagcaacgccaacagccggggccccagcttctctagcggcctggtgccactgtccctgagagggagccacatgggccccatggagatctacaaaaccgtgagcgcctggaagcggcagcctgtgcgcgtgctgagcctgtttcggaatatcgataaagtcctgaaaagcctgggattcctggagagcggctctggctccggcggtggcaccctgaagtacgtggaggatgtgacaaacgtggtcagacgggatgtggagaagtggggccccttcgatctggtgtacggcagcacccaacccctgggcagctcttgtgaccggtgccctggctggtacatgtttcagttccaccggatcctgcagtacgccctgccgagacaggagtcccagcggccattcttttggattttcatggacaacttgctgctgaccgaggatgaccaggaaactaccactcggttcctgcagaccgaagccgtgaccctgcaggacgtgagaggccgggactaccagaacgccatgcgggtgtggtccaacatccctggactgaaaagcaagcacgcacctctgacccctaaagaagaggagtacctgcaggcccaggtgcggagcagaagcaagctggacgcccctaaggtggatctgctggtgaagaattgcctcctgcccctgagagagtacttcaagtatttcagccagaatagtctgcccctgggaggcagcggcggcggcgccctggtgacatttgaggacgtcgccgtgcggttcacccaggaggaatgggctctgctggatccttctcagaaaatcctgtaccgggacgtgatgagagagacataccggaatctgacctccgtgggcatcaactgggaatgttgggaccttgaagcctgcttcagaagcctgggaagaaacctgagagtgcaggtggtgaagagaaagtgcgagctgaccaacagcggcccctgcgccgagggcggcccaagcagcggcgcccctcctcccagcggcggcagcccagccggctccccaacctctaccgaggagggcacctctgagtccgccacccccgagagcggccctggcacctccaccgagcccagcgagggcagcgcacccggcagccctgccggcagccccacctccacagaggagggaaccagcaccgagcccagcgaaggcagcgccccaggcaccagcaccgagcctagtgagcaggagattaaacggatcaacaagatcagaagaagacttgtgaaagacagcaacaccaagaaggccggcaagacaggccccatgaaaaccctgctggttagagtgatgacacccgatctgagagagcggctggaaaacctgagaaagaagcctgaaaatatcccccagcccatcagcaatacatctagagccaacctgaataagctgctgaccgattacaccgaaatgaagaaggcgatcctgcatgtgtactgggaagagttccagaaggaccctgtgggcctgatgagccgggtggcccagcctgccagcaagaagatcgatcagaacaagctgaaacctgagatggacgagaagggcaacctgaccaccgccggctttgcctgctctcagtgtggccagcccctgttcgtgtacaagctggagcaggtgtctgagaagggcaaggcttacaccaactacttcggacggtgcaatgtggccgagcacgaaaagctgatcctgctggcccagctgaagcccgagaaggatagcgacgaagccgtgacatatagcctgggaaagtttgggcagagggccctggatttctacagcattcatgtgaccaaggagtccacccaccccgtgaagcccctggcccagatcgccggaaacagatacgcctccggacctgtgggaaaggccctgagcgacgcatgtatgggcacaatcgcctccttcctgtctaagtaccaggacatcatcatcgaacaccagaaggtggtgaagggcaaccagaagagactggagagcctgcgggagctggccggcaaggaaaacctggaataccctagcgtgaccctgccacctcagcctcacaccaaggagggcgttgatgcctacaacgaagtgatcgcccgggtgcgaatgtgggtgaacctgaacctgtggcagaagctgaagctaagcagagatgatgccaagcctctgctgagactgaagggattcccttcctttcctctggtcgagagacaggccaacgaagtggactggtgggacatggtgtgtaacgtgaagaagctgatcaacgagaaaaaggaggatggcaaggtgttttggcagaatctggctggctacaagagacaggaagccctgagaccatacctgagcagcgaggaagatcggaagaagggaaagaaattcgctcggtaccagctgggcgacctgctgctgcacctggaaaagaagcacggcgaggactggggaaaggtgtacgacgaggcctgggagcggattgacaagaaagtggaaggcctgagcaagcacatcaagctggaagaggaacggagaagcgaggacgcccagagcaaggccgccctgaccgactggctgcgggctaaggccagcttcgtgatcgagggcctgaaggaggccgacaaggacgagttctgcagatgcgagctgaagctgcagaagtggtacggggacctgcggggaaagcccttcgccatcgaagccgagaacagcatcctggacatcagcggcttcagcaagcagtacaactgtgccttcatctggcagaaggacggcgtgaagaagctgaacctgtacctgatcatcaactacttcaagggcggcaagctgcggttcaagaagatcaaacctgaagccttcgaagccaacagattctacaccgtgatcaacaaaaagagcggcgagatcgtgcccatggaggtgaacttcaacttcgacgaccccaacctgatcatcctgcctctggcctttggcaagagacagggcagagaattcatctggaacgacctgctgtccctggaaaccggcagcctgaagctggccaacggaagagtgatcgagaagacactgtacaacagaagaacccggcaggatgagcctgccctgttcgtggccctgaccttcgagcggcgggaggtcctggactcctccaatatcaaaccaatgaacctgatcggcgtggcaagaggcgaaaacatccccgccgtgatcgccctgaccgaccccgagggctgcccactgagccggtttaaggatagcctgggaaacccaacccacatcctgagaatcggcgagagctataaggagaagcagcggaccatccaggccaagaaggaggtggagcagcggagagccggcggctacagccggaagtacgccagcaaagccaagaatctggcagacgatatggtgagaaacaccgctagagatctgctgtactacgccgtgacccaggatgccatgctgatcttcgccaacctgagccggggcttcggccggcagggcaagcggaccttcatggccgagagacagtacacacggatggaggactggctgaccgccaagctggcctacgagggcctgagcaagacctacctgtccaagacactggcccagtacacctccaagacatgcagcaactgtgggtttaccatcaccagcgccgactacgacagggtgctggagaagctgaagaagacagcaacaggctggatgaccacaattaacggcaaggagctgaaggtggagggccagattacctactacaacagatacaagagacagaacgtagtcaaggacctgtccgtcgagctggatagactgagcgaagaatctgtgaacaacgacatctcctcctggacaaagggcagaagcggagaagctctgagcctcctgaagaaaagattctcccatagacccgtgcaggagaagttcgtgtgcctgaactgcggcttcgagacacacgcagccgagcaagccgccctgaacatcgccagatcctggctgttcctgcggagccaggagtacaagaaataccagacaaacaagacaaccggcaacaccgataagagagccttcgtcgagacctggcagtccttttaccggaagaagcttaaggaggtgtggaaacctgccgtgcggtctggcggatctggcggaggctccgaggagctgcccgtggtgttcgaggacgtggccgtgtacttcaccagggaggagtggggcatgctggacaagaggcagaaggagctgtacagggacgtgatgaggatgaactacgagctgctggccagcctgggccccgccgccgccaagcccgacctgatcagcaagctggagaggagggccgccccctggatcagggaccccaacggccccaagtggggcaagggcaggcccagcggcaacggcggcccaagcagcggcgcccctcctcccagcggcggcagcccagccggctccccaacctctaccgaggagggcacctctgagtccgccacccccgagagcggccctggcacctccaccgagcccagcgagggcagcgcacccggcagccctgccggcagccccacctccacagaggagggaaccagcaccgagcccagcgaaggcagcgccccaggcaccagcaccgagcctagtgagcaggagattaaacggatcaacaagatcagaagaagacttgtgaaagacagcaacaccaagaaggccggcaagacaggccccatgaaaaccctgctggttagagtgatgacacccgatctgagagagcggctggaaaacctgagaaagaagcctgaaaatatcccccagcccatcagcaatacatctagagccaacctgaataagctgctgaccgattacaccgaaatgaagaaggcgatcctgcatgtgtactgggaagagttccagaaggaccctgtgggcctgatgagccgggtggcccagcctgccagcaagaagatcgatcagaacaagctgaaacctgagatggacgagaagggcaacctgaccaccgccggctttgcctgctctcagtgtggccagcccctgttcgtgtacaagctggagcaggtgtctgagaagggcaaggcttacaccaactacttcggacggtgcaatgtggccgagcacgaaaagctgatcctgctggcccagctgaagcccgagaaggatagcgacgaagccgtgacatatagcctgggaaagtttgggcagagggccctggatttctacagcattcatgtgaccaaggagtccacccaccccgtgaagcccctggcccagatcgccggaaacagatacgcctccggacctgtgggaaaggccctgagcgacgcatgtatgggcacaatcgcctccttcctgtctaagtaccaggacatcatcatcgaacaccagaaggtggtgaagggcaaccagaagagactggagagcctgcgggagctggccggcaaggaaaacctggaataccctagcgtgaccctgccacctcagcctcacaccaaggagggcgttgatgcctacaacgaagtgatcgcccgggtgcgaatgtgggtgaacctgaacctgtggcagaagctgaagctaagcagagatgatgccaagcctctgctgagactgaagggattcccttcctttcctctggtcgagagacaggccaacgaagtggactggtgggacatggtgtgtaacgtgaagaagctgatcaacgagaaaaaggaggatggcaaggtgttttggcagaatctggctggctacaagagacaggaagccctgagaccatacctgagcagcgaggaagatcggaagaagggaaagaaattcgctcggtaccagctgggcgacctgctgctgcacctggaaaagaagcacggcgaggactggggaaaggtgtacgacgaggcctgggagcggattgacaagaaagtggaaggcctgagcaagcacatcaagctggaagaggaacggagaagcgaggacgcccagagcaaggccgccctgaccgactggctgcgggctaaggccagcttcgtgatcgagggcctgaaggaggccgacaaggacgagttctgcagatgcgagctgaagctgcagaagtggtacggggacctgcggggaaagcccttcgccatcgaagccgagaacagcatcctggacatcagcggcttcagcaagcagtacaactgtgccttcatctggcagaaggacggcgtgaagaagctgaacctgtacctgatcatcaactacttcaagggcggcaagctgcggttcaagaagatcaaacctgaagccttcgaagccaacagattctacaccgtgatcaacaaaaagagcggcgagatcgtgcccatggaggtgaacttcaacttcgacgaccccaacctgatcatcctgcctctggcctttggcaagagacagggcagagaattcatctggaacgacctgctgtccctggaaaccggcagcctgaagctggccaacggaagagtgatcgagaagacactgtacaacagaagaacccggcaggatgagcctgccctgttcgtggccctgaccttcgagcggcgggaggtcctggactcctccaatatcaaaccaatgaacctgatcggcgtggcaagaggcgaaaacatccccgccgtgatcgccctgaccgaccccgagggctgcccactgagccggtttaaggatagcctgggaaacccaacccacatcctgagaatcggcgagagctataaggagaagcagcggaccatccaggccaagaaggaggtggagcagcggagagccggcggctacagccggaagtacgccagcaaagccaagaatctggcagacgatatggtgagaaacaccgctagagatctgctgtactacgccgtgacccaggatgccatgctgatcttcgccaacctgagccggggcttcggccggcagggcaagcggaccttcatggccgagagacagtacacacggatggaggactggctgaccgccaagctggcctacgagggcctgagcaagacctacctgtccaagacactggcccagtacacctccaagacatgcagcaactgtgggtttaccatcaccagcgccgactacgacagggtgctggagaagctgaagaagacagcaacaggctggatgaccacaattaacggcaaggagctgaaggtggagggccagattacctactacaacagatacaagagacagaacgtagtcaaggacctgtccgtcgagctggatagactgagcgaagaatctgtgaacaacgacatctcctcctggacaaagggcagaagcggagaagctctgagcctcctgaagaaaagattctcccatagacccgtgcaggagaagttcgtgtgcctgaactgcggcttcgagacacacgcagccgagcaagccgccctgaacatcgccagatcctggctgttcctgcggagccaggagtacaagaaataccagacaaacaagacaaccggcaacaccgataagagagccttcgtcgagacctggcagtccttttaccggaagaagcttaaggaggtgtggaaacctgccgtgcggtctggcggatctggcggaggctcctgaggagctgcccgtggtgttcgaggacgtggccgtgtacttcaccagggaggagtggggcatgctggacaagaggcagaaggagctgtacagggacgtgatgaggatgaactacgagctgctggccagcctgggccccgccgccgccaagcccgacctgatcagcaagctggagaggagggccgccccctggatcagggaccccaacggccccaagtggggcaagggcaggcccagcggcaacggatctggctccggcagcggccccaagaaaaagagaaaagtctaagctgccttctgcggggcttgccttctggccatgcccttcttctctcccttgcacctgtacctcttggtctttgaataaagcctgagtaggaaggctagcaaaaaaaaaaaaaaaaaaaaaaaaaaaaaaaaaaaaaaaaaaaaaaaaaaaaaaaaaaaaaaaaaaaaaaaaaaaaaaaa

SEQ ID NO: 16303 - RNA, 9485 nt, synthetic construct
  source 1..9485: mol_type = other RNA
aggaaataagagagaaaagaagagtaagaagaaatataagagccaccatggcccctaagaagaagcgtaaagtgagccggatggaacgcctcgtctacgaggtgcggcagaagtgcagaaacatcgaggacatctgcatctcctgcggatctctgaacgtgaccctggagcacccactgttcatcggcggcatgtgccagaactgtaaaaactgttttctggagtgtgcctatcaatacgacgatgacggctaccagagctactgcaccatctgttgcggcggaagagaggtgctgatgtgtggaaataacaactgctgccggtgcttctgcgtggaatgcgtggacctgctggtgggccccggcgccgcccaggccgctattaaggaagatccttggaactgctacatgtgcggccacaagggcacatacggcctgctgagacggagagaggactggcctagcagactgcagatgttcttcgccaataaccacgaccaggagttcgacccccctaaggtgtaccctcccgtccccgccgagaagagaaagcccatccgggtcctgagcctgttcgatggcatcgccaccggtctgctggtgctgaaggacctgggcatccaggtggataggtacattgcctccgaggtgtgcgaggactccatcaccgtgggaatggtgcgtcatcagggcaagatcatgtacgtgggcgacgtgcggagcgtgacacagaagcatatccaggagtggggccctttcgacctggtgatcggcggcagcccttgcaatgacctgagcatcgtgaacccagcccggaagggcctgtacgagggaaccggcagactgttcttcgagttttacagactgctgcacgacgcccggcctaaggaaggcgacgaccggcccttcttttggctgttcgagaatgtggtggccatgggagtcagcgacaagcgggatattagccggttcctggagagcaaccccgtgatgatcgatgccaaggaagtgagcgccgcccaccgggccagatacttctggggcaatctgcctggcatgaacagacccctggccagcaccgtgaacgacaagctggagctgcaggagtgcctggagcacggccggatcgccaagttcagcaaggtgagaaccatcaccacccgaagcaacagcatcaaacaaggcaaggaccagcactttcctgtgttcatgaacgagaaggaggacatcctgtggtgtaccgagatggagagagtgttcgggttcccagtccactacacagatgtcagcaacatgtctagactggccagacagagactgctgggaagaagctggtccgtccctgtgatcagacacctgttcgcccctctgaaggagtacttcgcctgcgtgagcagcggcaacagcaacgccaacagccggggccccagcttctctagcggcctggtgccactgtccctgagagggagccacatgggccccatggagatctacaaaaccgtgagcgcctggaagcggcagcctgtgcgcgtgctgagcctgtttcggaatatcgataaagtcctgaaaagcctgggattcctggagagcggctctggctccggcggtggcaccctgaagtacgtggaggatgtgacaaacgtggtcagacgggatgtggagaagtggggccccttcgatctggtgtacggcagcacccaacccctgggcagctcttgtgaccggtgccctggctggtacatgtttcagttccaccggatcctgcagtacgccctgccgagacaggagtcccagcggccattcttttggattttcatggacaacttgctgctgaccgaggatgaccaggaaactaccactcggttcctgcagaccgaagccgtgaccctgcaggacgtgagaggccgggactaccagaacgccatgcgggtgtggtccaacatccctggactgaaaagcaagcacgcacctctgacccctaaagaagaggagtacctgcaggcccaggtgcggagcagaagcaagctggacgcccctaaggtggatctgctggtgaagaattgcctcctgcccctgagagagtacttcaagtatttcagccagaatagtctgcccctgggaggcagcggcggcggcgccctggtgacatttgaggacgtcgccgtgcggttcacccaggaggaatgggctctgctggatccttctcagaaaatcctgtaccgggacgtgatgagagagacataccggaatctgacctccgtgggcatcaactgggaatgttgggaccttgaagcctgcttcagaagcctgggaagaaacctgagagtgcaggtggtgaagagaaagtgcgagctgaccaacagcggcccctgcgccgagggcggcccaagcagcggcgcccctcctcccagcggcggcagcccagccggctccccaacctctaccgaggagggcacctctgagtccgccacccccgagagcggccctggcacctccaccgagcccagcgagggcagcgcacccggcagccctgccggcagccccacctccacagaggagggaaccagcaccgagcccagcgaaggcagcgccccaggcaccagcaccgagcctagtgagcaggagattaaacggatcaacaagatcagaagaagacttgtgaaagacagcaacaccaagaaggccggcaagacaggccccatgaaaaccctgctggttagagtgatgacacccgatctgagagagcggctggaaaacctgagaaagaagcctgaaaatatcccccagcccatcagcaatacatctagagccaacctgaataagctgctgaccgattacaccgaaatgaagaaggcgatcctgcatgtgtactgggaagagttccagaaggaccctgtgggcctgatgagccgggtggcccagcctgccagcaagaagatcgatcagaacaagctgaaacctgagatggacgagaagggcaacctgaccaccgccggctttgcctgctctcagtgtggccagcccctgttcgtgtacaagctggagcaggtgtctgagaagggcaaggcttacaccaactacttcggacggtgcaatgtggccgagcacgaaaagctgatcctgctggcccagctgaagcccgagaaggatagcgacgaagccgtgacatatagcctgggaaagtttgggcagagggccctggatttctacagcattcatgtgaccaaggagtccacccaccccgtgaagcccctggcccagatcgccggaaacagatacgcctccggacctgtgggaaaggccctgagcgacgcatgtatgggcacaatcgcctccttcctgtctaagtaccaggacatcatcatcgaacaccagaaggtggtgaagggcaaccagaagagactggagagcctgcgggagctggccggcaaggaaaacctggaataccctagcgtgaccctgccacctcagcctcacaccaaggagggcgttgatgcctacaacgaagtgatcgcccgggtgcgaatgtgggtgaacctgaacctgtggcagaagctgaagctaagcagagatgatgccaagcctctgctgagactgaagggattcccttcctttcctctggtcgagagacaggccaacgaagtggactggtgggacatggtgtgtaacgtgaagaagctgatcaacgagaaaaaggaggatggcaaggtgttttggcagaatctggctggctacaagagacaggaagccctgagaccatacctgagcagcgaggaagatcggaagaagggaaagaaattcgctcggtaccagctgggcgacctgctgctgcacctggaaaagaagcacggcgaggactggggaaaggtgtacgacgaggcctgggagcggattgacaagaaagtggaaggcctgagcaagcacatcaagctggaagaggaacggagaagcgaggacgcccagagcaaggccgccctgaccgactggctgcgggctaaggccagcttcgtgatcgagggcctgaaggaggccgacaaggacgagttctgcagatgcgagctgaagctgcagaagtggtacggggacctgcggggaaagcccttcgccatcgaagccgagaacagcatcctggacatcagcggcttcagcaagcagtacaactgtgccttcatctggcagaaggacggcgtgaagaagctgaacctgtacctgatcatcaactacttcaagggcggcaagctgcggttcaagaagatcaaacctgaagccttcgaagccaacagattctacaccgtgatcaacaaaaagagcggcgagatcgtgcccatggaggtgaacttcaacttcgacgaccccaacctgatcatcctgcctctggcctttggcaagagacagggcagagaattcatctggaacgacctgctgtccctggaaaccggcagcctgaagctggccaacggaagagtgatcgagaagacactgtacaacagaagaacccggcaggatgagcctgccctgttcgtggccctgaccttcgagcggcgggaggtcctggactcctccaatatcaaaccaatgaacctgatcggcgtggcaagaggcgaaaacatccccgccgtgatcgccctgaccgaccccgagggctgcccactgagccggtttaaggatagcctgggaaacccaacccacatcctgagaatcggcgagagctataaggagaagcagcggaccatccaggccaagaaggaggtggagcagcggagagccggcggctacagccggaagtacgccagcaaagccaagaatctggcagacgatatggtgagaaacaccgctagagatctgctgtactacgccgtgacccaggatgccatgctgatcttcgccaacctgagccggggcttcggccggcagggcaagcggaccttcatggccgagagacagtacacacggatggaggactggctgaccgccaagctggcctacgagggcctgagcaagacctacctgtccaagacactggcccagtacacctccaagacatgcagcaactgtgggtttaccatcaccagcgccgactacgacagggtgctggagaagctgaagaagacagcaacaggctggatgaccacaattaacggcaaggagctgaaggtggagggccagattacctactacaacagatacaagagacagaacgtagtcaaggacctgtccgtcgagctggatagactgagcgaagaatctgtgaacaacgacatctcctcctggacaaagggcagaagcggagaagctctgagcctcctgaagaaaagattctcccatagacccgtgcaggagaagttcgtgtgcctgaactgcggcttcgagacacacgcagccgagcaagccgccctgaacatcgccagatcctggctgttcctgcggagccaggagtacaagaaataccagacaaacaagacaaccggcaacaccgataagagagccttcgtcgagacctggcagtccttttaccggaagaagcttaaggaggtgtggaaacctgccgtgcggtctggcggatctggcggaggctccaaggtgaagcagttcagcttccagagcctgctgaccttcaaggacctggccatcaacttcagcaaggaggagtgggagtacctgaacaccagccagaaggacctgtacaaggacgtgatgctggagaactacagcaacctggtgagcgtgggcctgagcgagagcaagcccgagctggtgacctgcctggagcagaacaaggagccctggatggtgcacatcgtggaggccgagggcctggagggcggcccaagcagcggcgcccctcctcccagcggcggcagcccagccggctccccaacctctaccgaggagggcacctctgagtccgccacccccgagagcggccctggcacctccaccgagcccagcgagggcagcgcacccggcagccctgccggcagccccacctccacagaggagggaaccagcaccgagcccagcgaaggcagcgccccaggcaccagcaccgagcctagtgagcaggagattaaacggatcaacaagatcagaagaagacttgtgaaagacagcaacaccaagaaggccggcaagacaggccccatgaaaaccctgctggttagagtgatgacacccgatctgagagagcggctggaaaacctgagaaagaagcctgaaaatatcccccagcccatcagcaatacatctagagccaacctgaataagctgctgaccgattacaccgaaatgaagaaggcgatcctgcatgtgtactgggaagagttccagaaggaccctgtgggcctgatgagccgggtggcccagcctgccagcaagaagatcgatcagaacaagctgaaacctgagatggacgagaagggcaacctgaccaccgccggctttgcctgctctcagtgtggccagcccctgttcgtgtacaagctggagcaggtgtctgagaagggcaaggcttacaccaactacttcggacggtgcaatgtggccgagcacgaaaagctgatcctgctggcccagctgaagcccgagaaggatagcgacgaagccgtgacatatagcctgggaaagtttgggcagagggccctggatttctacagcattcatgtgaccaaggagtccacccaccccgtgaagcccctggcccagatcgccggaaacagatacgcctccggacctgtgggaaaggccctgagcgacgcatgtatgggcacaatcgcctccttcctgtctaagtaccaggacatcatcatcgaacaccagaaggtggtgaagggcaaccagaagagactggagagcctgcgggagctggccggcaaggaaaacctggaataccctagcgtgaccctgccacctcagcctcacaccaaggagggcgttgatgcctacaacgaagtgatcgcccgggtgcgaatgtgggtgaacctgaacctgtggcagaagctgaagctaagcagagatgatgccaagcctctgctgagactgaagggattcccttcctttcctctggtcgagagacaggccaacgaagtggactggtgggacatggtgtgtaacgtgaagaagctgatcaacgagaaaaaggaggatggcaaggtgttttggcagaatctggctggctacaagagacaggaagccctgagaccatacctgagcagcgaggaagatcggaagaagggaaagaaattcgctcggtaccagctgggcgacctgctgctgcacctggaaaagaagcacggcgaggactggggaaaggtgtacgacgaggcctgggagcggattgacaagaaagtggaaggcctgagcaagcacatcaagctggaagaggaacggagaagcgaggacgcccagagcaaggccgccctgaccgactggctgcgggctaaggccagcttcgtgatcgagggcctgaaggaggccgacaaggacgagttctgcagatgcgagctgaagctgcagaagtggtacggggacctgcggggaaagcccttcgccatcgaagccgagaacagcatcctggacatcagcggcttcagcaagcagtacaactgtgccttcatctggcagaaggacggcgtgaagaagctgaacctgtacctgatcatcaactacttcaagggcggcaagctgcggttcaagaagatcaaacctgaagccttcgaagccaacagattctacaccgtgatcaacaaaaagagcggcgagatcgtgcccatggaggtgaacttcaacttcgacgaccccaacctgatcatcctgcctctggcctttggcaagagacagggcagagaattcatctggaacgacctgctgtccctggaaaccggcagcctgaagctggccaacggaagagtgatcgagaagacactgtacaacagaagaacccggcaggatgagcctgccctgttcgtggccctgaccttcgagcggcgggaggtcctggactcctccaatatcaaaccaatgaacctgatcggcgtggcaagaggcgaaaacatccccgccgtgatcgccctgaccgaccccgagggctgcccactgagccggtttaaggatagcctgggaaacccaacccacatcctgagaatcggcgagagctataaggagaagcagcggaccatccaggccaagaaggaggtggagcagcggagagccggcggctacagccggaagtacgccagcaaagccaagaatctggcagacgatatggtgagaaacaccgctagagatctgctgtactacgccgtgacccaggatgccatgctgatcttcgccaacctgagccggggcttcggccggcagggcaagcggaccttcatggccgagagacagtacacacggatggaggactggctgaccgccaagctggcctacgagggcctgagcaagacctacctgtccaagacactggcccagtacacctccaagacatgcagcaactgtgggtttaccatcaccagcgccgactacgacagggtgctggagaagctgaagaagacagcaacaggctggatgaccacaattaacggcaaggagctgaaggtggagggccagattacctactacaacagatacaagagacagaacgtagtcaaggacctgtccgtcgagctggatagactgagcgaagaatctgtgaacaacgacatctcctcctggacaaagggcagaagcggagaagctctgagcctcctgaagaaaagattctcccatagacccgtgcaggagaagttcgtgtgcctgaactgcggcttcgagacacacgcagccgagcaagccgccctgaacatcgccagatcctggctgttcctgcggagccaggagtacaagaaataccagacaaacaagacaaccggcaacaccgataagagagccttcgtcgagacctggcagtccttttaccggaagaagcttaaggaggtgtggaaacctgccgtgcggtctggcggatctggcggaggctcctaaggtgaagcagttcagcttccagagcctgctgaccttcaaggacctggccatcaacttcagcaaggaggagtgggagtacctgaacaccagccagaaggacctgtacaaggacgtgatgctggagaactacagcaacctggtgagcgtgggcctgagcgagagcaagcccgagctggtgacctgcctggagcagaacaaggagccctggatggtgcacatcgtggaggccgagggcctggagggatctggctccggcagcggccccaagaaaaagagaaaagtctaagctgccttctgcggggcttgccttctggccatgcccttcttctctcccttgcacctgtacctcttggtctttgaataaagcctgagtaggaaggctagcaaaaaaaaaaaaaaaaaaaaaaaaaaaaaaaaaaaaaaaaaaaaaaaaaaaaaaaaaaaaaaaaaaaaaaaaaaaaaaaa

SEQ ID NO: 16304 - RNA, 9485 nt, synthetic construct
  source 1..9485: mol_type = other RNA
aggaaataagagagaaaagaagagtaagaagaaatataagagccaccatggcccctaagaagaagcgtaaagtgagccggatggaacgcctcgtctacgaggtgcggcagaagtgcagaaacatcgaggacatctgcatctcctgcggatctctgaacgtgaccctggagcacccactgttcatcggcggcatgtgccagaactgtaaaaactgttttctggagtgtgcctatcaatacgacgatgacggctaccagagctactgcaccatctgttgcggcggaagagaggtgctgatgtgtggaaataacaactgctgccggtgcttctgcgtggaatgcgtggacctgctggtgggccccggcgccgcccaggccgctattaaggaagatccttggaactgctacatgtgcggccacaagggcacatacggcctgctgagacggagagaggactggcctagcagactgcagatgttcttcgccaataaccacgaccaggagttcgacccccctaaggtgtaccctcccgtccccgccgagaagagaaagcccatccgggtcctgagcctgttcgatggcatcgccaccggtctgctggtgctgaaggacctgggcatccaggtggataggtacattgcctccgaggtgtgcgaggactccatcaccgtgggaatggtgcgtcatcagggcaagatcatgtacgtgggcgacgtgcggagcgtgacacagaagcatatccaggagtggggccctttcgacctggtgatcggcggcagcccttgcaatgacctgagcatcgtgaacccagcccggaagggcctgtacgagggaaccggcagactgttcttcgagttttacagactgctgcacgacgcccggcctaaggaaggcgacgaccggcccttcttttggctgttcgagaatgtggtggccatgggagtcagcgacaagcgggatattagccggttcctggagagcaaccccgtgatgatcgatgccaaggaagtgagcgccgcccaccgggccagatacttctggggcaatctgcctggcatgaacagacccctggccagcaccgtgaacgacaagctggagctgcaggagtgcctggagcacggccggatcgccaagttcagcaaggtgagaaccatcaccacccgaagcaacagcatcaaacaaggcaaggaccagcactttcctgtgttcatgaacgagaaggaggacatcctgtggtgtaccgagatggagagagtgttcgggttcccagtccactacacagatgtcagcaacatgtctagactggccagacagagactgctgggaagaagctggtccgtccctgtgatcagacacctgttcgcccctctgaaggagtacttcgcctgcgtgagcagcggcaacagcaacgccaacagccggggccccagcttctctagcggcctggtgccactgtccctgagagggagccacatgggccccatggagatctacaaaaccgtgagcgcctggaagcggcagcctgtgcgcgtgctgagcctgtttcggaatatcgataaagtcctgaaaagcctgggattcctggagagcggctctggctccggcggtggcaccctgaagtacgtggaggatgtgacaaacgtggtcagacgggatgtggagaagtggggccccttcgatctggtgtacggcagcacccaacccctgggcagctcttgtgaccggtgccctggctggtacatgtttcagttccaccggatcctgcagtacgccctgccgagacaggagtcccagcggccattcttttggattttcatggacaacttgctgctgaccgaggatgaccaggaaactaccactcggttcctgcagaccgaagccgtgaccctgcaggacgtgagaggccgggactaccagaacgccatgcgggtgtggtccaacatccctggactgaaaagcaagcacgcacctctgacccctaaagaagaggagtacctgcaggcccaggtgcggagcagaagcaagctggacgcccctaaggtggatctgctggtgaagaattgcctcctgcccctgagagagtacttcaagtatttcagccagaatagtctgcccctgggaggcagcggcggcggcgccctggtgacatttgaggacgtcgccgtgcggttcacccaggaggaatgggctctgctggatccttctcagaaaatcctgtaccgggacgtgatgagagagacataccggaatctgacctccgtgggcatcaactgggaatgttgggaccttgaagcctgcttcagaagcctgggaagaaacctgagagtgcaggtggtgaagagaaagtgcgagctgaccaacagcggcccctgcgccgagggcggcccaagcagcggcgcccctcctcccagcggcggcagcccagccggctccccaacctctaccgaggagggcacctctgagtccgccacccccgagagcggccctggcacctccaccgagcccagcgagggcagcgcacccggcagccctgccggcagccccacctccacagaggagggaaccagcaccgagcccagcgaaggcagcgccccaggcaccagcaccgagcctagtgagcaggagattaaacggatcaacaagatcagaagaagacttgtgaaagacagcaacaccaagaaggccggcaagacaggccccatgaaaaccctgctggttagagtgatgacacccgatctgagagagcggctggaaaacctgagaaagaagcctgaaaatatcccccagcccatcagcaatacatctagagccaacctgaataagctgctgaccgattacaccgaaatgaagaaggcgatcctgcatgtgtactgggaagagttccagaaggaccctgtgggcctgatgagccgggtggcccagcctgccagcaagaagatcgatcagaacaagctgaaacctgagatggacgagaagggcaacctgaccaccgccggctttgcctgctctcagtgtggccagcccctgttcgtgtacaagctggagcaggtgtctgagaagggcaaggcttacaccaactacttcggacggtgcaatgtggccgagcacgaaaagctgatcctgctggcccagctgaagcccgagaaggatagcgacgaagccgtgacatatagcctgggaaagtttgggcagagggccctggatttctacagcattcatgtgaccaaggagtccacccaccccgtgaagcccctggcccagatcgccggaaacagatacgcctccggacctgtgggaaaggccctgagcgacgcatgtatgggcacaatcgcctccttcctgtctaagtaccaggacatcatcatcgaacaccagaaggtggtgaagggcaaccagaagagactggagagcctgcgggagctggccggcaaggaaaacctggaataccctagcgtgaccctgccacctcagcctcacaccaaggagggcgttgatgcctacaacgaagtgatcgcccgggtgcgaatgtgggtgaacctgaacctgtggcagaagctgaagctaagcagagatgatgccaagcctctgctgagactgaagggattcccttcctttcctctggtcgagagacaggccaacgaagtggactggtgggacatggtgtgtaacgtgaagaagctgatcaacgagaaaaaggaggatggcaaggtgttttggcagaatctggctggctacaagagacaggaagccctgagaccatacctgagcagcgaggaagatcggaagaagggaaagaaattcgctcggtaccagctgggcgacctgctgctgcacctggaaaagaagcacggcgaggactggggaaaggtgtacgacgaggcctgggagcggattgacaagaaagtggaaggcctgagcaagcacatcaagctggaagaggaacggagaagcgaggacgcccagagcaaggccgccctgaccgactggctgcgggctaaggccagcttcgtgatcgagggcctgaaggaggccgacaaggacgagttctgcagatgcgagctgaagctgcagaagtggtacggggacctgcggggaaagcccttcgccatcgaagccgagaacagcatcctggacatcagcggcttcagcaagcagtacaactgtgccttcatctggcagaaggacggcgtgaagaagctgaacctgtacctgatcatcaactacttcaagggcggcaagctgcggttcaagaagatcaaacctgaagccttcgaagccaacagattctacaccgtgatcaacaaaaagagcggcgagatcgtgcccatggaggtgaacttcaacttcgacgaccccaacctgatcatcctgcctctggcctttggcaagagacagggcagagaattcatctggaacgacctgctgtccctggaaaccggcagcctgaagctggccaacggaagagtgatcgagaagacactgtacaacagaagaacccggcaggatgagcctgccctgttcgtggccctgaccttcgagcggcgggaggtcctggactcctccaatatcaaaccaatgaacctgatcggcgtggcaagaggcgaaaacatccccgccgtgatcgccctgaccgaccccgagggctgcccactgagccggtttaaggatagcctgggaaacccaacccacatcctgagaatcggcgagagctataaggagaagcagcggaccatccaggccaagaaggaggtggagcagcggagagccggcggctacagccggaagtacgccagcaaagccaagaatctggcagacgatatggtgagaaacaccgctagagatctgctgtactacgccgtgacccaggatgccatgctgatcttcgccaacctgagccggggcttcggccggcagggcaagcggaccttcatggccgagagacagtacacacggatggaggactggctgaccgccaagctggcctacgagggcctgagcaagacctacctgtccaagacactggcccagtacacctccaagacatgcagcaactgtgggtttaccatcaccagcgccgactacgacagggtgctggagaagctgaagaagacagcaacaggctggatgaccacaattaacggcaaggagctgaaggtggagggccagattacctactacaacagatacaagagacagaacgtagtcaaggacctgtccgtcgagctggatagactgagcgaagaatctgtgaacaacgacatctcctcctggacaaagggcagaagcggagaagctctgagcctcctgaagaaaagattctcccatagacccgtgcaggagaagttcgtgtgcctgaactgcggcttcgagacacacgcagccgagcaagccgccctgaacatcgccagatcctggctgttcctgcggagccaggagtacaagaaataccagacaaacaagacaaccggcaacaccgataagagagccttcgtcgagacctggcagtccttttaccggaagaagcttaaggaggtgtggaaacctgccgtgcggtctggcggatctggcggaggctccttccaggacagcgtgaccttcgaggacgtggccgtgaggttcagcagcggcgagtggcagtgcctgaccagggcccagaggcacctgtacgccgacgtgatgctggagaactactggaacgtgatcagcgtgggcttcgccgtgcccaagccccccctgatcagccacctggagcagggcgccgagccctgcgtgcaggacctgcaggacggcggcttcctgagctgcagcttccccgtgagcggcggcccaagcagcggcgcccctcctcccagcggcggcagcccagccggctccccaacctctaccgaggagggcacctctgagtccgccacccccgagagcggccctggcacctccaccgagcccagcgagggcagcgcacccggcagccctgccggcagccccacctccacagaggagggaaccagcaccgagcccagcgaaggcagcgccccaggcaccagcaccgagcctagtgagcaggagattaaacggatcaacaagatcagaagaagacttgtgaaagacagcaacaccaagaaggccggcaagacaggccccatgaaaaccctgctggttagagtgatgacacccgatctgagagagcggctggaaaacctgagaaagaagcctgaaaatatcccccagcccatcagcaatacatctagagccaacctgaataagctgctgaccgattacaccgaaatgaagaaggcgatcctgcatgtgtactgggaagagttccagaaggaccctgtgggcctgatgagccgggtggcccagcctgccagcaagaagatcgatcagaacaagctgaaacctgagatggacgagaagggcaacctgaccaccgccggctttgcctgctctcagtgtggccagcccctgttcgtgtacaagctggagcaggtgtctgagaagggcaaggcttacaccaactacttcggacggtgcaatgtggccgagcacgaaaagctgatcctgctggcccagctgaagcccgagaaggatagcgacgaagccgtgacatatagcctgggaaagtttgggcagagggccctggatttctacagcattcatgtgaccaaggagtccacccaccccgtgaagcccctggcccagatcgccggaaacagatacgcctccggacctgtgggaaaggccctgagcgacgcatgtatgggcacaatcgcctccttcctgtctaagtaccaggacatcatcatcgaacaccagaaggtggtgaagggcaaccagaagagactggagagcctgcgggagctggccggcaaggaaaacctggaataccctagcgtgaccctgccacctcagcctcacaccaaggagggcgttgatgcctacaacgaagtgatcgcccgggtgcgaatgtgggtgaacctgaacctgtggcagaagctgaagctaagcagagatgatgccaagcctctgctgagactgaagggattcccttcctttcctctggtcgagagacaggccaacgaagtggactggtgggacatggtgtgtaacgtgaagaagctgatcaacgagaaaaaggaggatggcaaggtgttttggcagaatctggctggctacaagagacaggaagccctgagaccatacctgagcagcgaggaagatcggaagaagggaaagaaattcgctcggtaccagctgggcgacctgctgctgcacctggaaaagaagcacggcgaggactggggaaaggtgtacgacgaggcctgggagcggattgacaagaaagtggaaggcctgagcaagcacatcaagctggaagaggaacggagaagcgaggacgcccagagcaaggccgccctgaccgactggctgcgggctaaggccagcttcgtgatcgagggcctgaaggaggccgacaaggacgagttctgcagatgcgagctgaagctgcagaagtggtacggggacctgcggggaaagcccttcgccatcgaagccgagaacagcatcctggacatcagcggcttcagcaagcagtacaactgtgccttcatctggcagaaggacggcgtgaagaagctgaacctgtacctgatcatcaactacttcaagggcggcaagctgcggttcaagaagatcaaacctgaagccttcgaagccaacagattctacaccgtgatcaacaaaaagagcggcgagatcgtgcccatggaggtgaacttcaacttcgacgaccccaacctgatcatcctgcctctggcctttggcaagagacagggcagagaattcatctggaacgacctgctgtccctggaaaccggcagcctgaagctggccaacggaagagtgatcgagaagacactgtacaacagaagaacccggcaggatgagcctgccctgttcgtggccctgaccttcgagcggcgggaggtcctggactcctccaatatcaaaccaatgaacctgatcggcgtggcaagaggcgaaaacatccccgccgtgatcgccctgaccgaccccgagggctgcccactgagccggtttaaggatagcctgggaaacccaacccacatcctgagaatcggcgagagctataaggagaagcagcggaccatccaggccaagaaggaggtggagcagcggagagccggcggctacagccggaagtacgccagcaaagccaagaatctggcagacgatatggtgagaaacaccgctagagatctgctgtactacgccgtgacccaggatgccatgctgatcttcgccaacctgagccggggcttcggccggcagggcaagcggaccttcatggccgagagacagtacacacggatggaggactggctgaccgccaagctggcctacgagggcctgagcaagacctacctgtccaagacactggcccagtacacctccaagacatgcagcaactgtgggtttaccatcaccagcgccgactacgacagggtgctggagaagctgaagaagacagcaacaggctggatgaccacaattaacggcaaggagctgaaggtggagggccagattacctactacaacagatacaagagacagaacgtagtcaaggacctgtccgtcgagctggatagactgagcgaagaatctgtgaacaacgacatctcctcctggacaaagggcagaagcggagaagctctgagcctcctgaagaaaagattctcccatagacccgtgcaggagaagttcgtgtgcctgaactgcggcttcgagacacacgcagccgagcaagccgccctgaacatcgccagatcctggctgttcctgcggagccaggagtacaagaaataccagacaaacaagacaaccggcaacaccgataagagagccttcgtcgagacctggcagtccttttaccggaagaagcttaaggaggtgtggaaacctgccgtgcggtctggcggatctggcggaggctcctttccaggacagcgtgaccttcgaggacgtggccgtgaggttcagcagcggcgagtggcagtgcctgaccagggcccagaggcacctgtacgccgacgtgatgctggagaactactggaacgtgatcagcgtgggcttcgccgtgcccaagccccccctgatcagccacctggagcagggcgccgagccctgcgtgcaggacctgcaggacggcggcttcctgagctgcagcttccccgtgagcggatctggctccggcagcggccccaagaaaaagagaaaagtctaagctgccttctgcggggcttgccttctggccatgcccttcttctctcccttgcacctgtacctcttggtctttgaataaagcctgagtaggaaggctagcaaaaaaaaaaaaaaaaaaaaaaaaaaaaaaaaaaaaaaaaaaaaaaaaaaaaaaaaaaaaaaaaaaaaaaaaaaaaaaaa

SEQ ID NO: 16305 - RNA, 9485 nt, synthetic construct
  source 1..9485: mol_type = other RNA
aggaaataagagagaaaagaagagtaagaagaaatataagagccaccatggcccctaagaagaagcgtaaagtgagccggatggaacgcctcgtctacgaggtgcggcagaagtgcagaaacatcgaggacatctgcatctcctgcggatctctgaacgtgaccctggagcacccactgttcatcggcggcatgtgccagaactgtaaaaactgttttctggagtgtgcctatcaatacgacgatgacggctaccagagctactgcaccatctgttgcggcggaagagaggtgctgatgtgtggaaataacaactgctgccggtgcttctgcgtggaatgcgtggacctgctggtgggccccggcgccgcccaggccgctattaaggaagatccttggaactgctacatgtgcggccacaagggcacatacggcctgctgagacggagagaggactggcctagcagactgcagatgttcttcgccaataaccacgaccaggagttcgacccccctaaggtgtaccctcccgtccccgccgagaagagaaagcccatccgggtcctgagcctgttcgatggcatcgccaccggtctgctggtgctgaaggacctgggcatccaggtggataggtacattgcctccgaggtgtgcgaggactccatcaccgtgggaatggtgcgtcatcagggcaagatcatgtacgtgggcgacgtgcggagcgtgacacagaagcatatccaggagtggggccctttcgacctggtgatcggcggcagcccttgcaatgacctgagcatcgtgaacccagcccggaagggcctgtacgagggaaccggcagactgttcttcgagttttacagactgctgcacgacgcccggcctaaggaaggcgacgaccggcccttcttttggctgttcgagaatgtggtggccatgggagtcagcgacaagcgggatattagccggttcctggagagcaaccccgtgatgatcgatgccaaggaagtgagcgccgcccaccgggccagatacttctggggcaatctgcctggcatgaacagacccctggccagcaccgtgaacgacaagctggagctgcaggagtgcctggagcacggccggatcgccaagttcagcaaggtgagaaccatcaccacccgaagcaacagcatcaaacaaggcaaggaccagcactttcctgtgttcatgaacgagaaggaggacatcctgtggtgtaccgagatggagagagtgttcgggttcccagtccactacacagatgtcagcaacatgtctagactggccagacagagactgctgggaagaagctggtccgtccctgtgatcagacacctgttcgcccctctgaaggagtacttcgcctgcgtgagcagcggcaacagcaacgccaacagccggggccccagcttctctagcggcctggtgccactgtccctgagagggagccacatgggccccatggagatctacaaaaccgtgagcgcctggaagcggcagcctgtgcgcgtgctgagcctgtttcggaatatcgataaagtcctgaaaagcctgggattcctggagagcggctctggctccggcggtggcaccctgaagtacgtggaggatgtgacaaacgtggtcagacgggatgtggagaagtggggccccttcgatctggtgtacggcagcacccaacccctgggcagctcttgtgaccggtgccctggctggtacatgtttcagttccaccggatcctgcagtacgccctgccgagacaggagtcccagcggccattcttttggattttcatggacaacttgctgctgaccgaggatgaccaggaaactaccactcggttcctgcagaccgaagccgtgaccctgcaggacgtgagaggccgggactaccagaacgccatgcgggtgtggtccaacatccctggactgaaaagcaagcacgcacctctgacccctaaagaagaggagtacctgcaggcccaggtgcggagcagaagcaagctggacgcccctaaggtggatctgctggtgaagaattgcctcctgcccctgagagagtacttcaagtatttcagccagaatagtctgcccctgggaggcagcggcggcggcgccctggtgacatttgaggacgtcgccgtgcggttcacccaggaggaatgggctctgctggatccttctcagaaaatcctgtaccgggacgtgatgagagagacataccggaatctgacctccgtgggcatcaactgggaatgttgggaccttgaagcctgcttcagaagcctgggaagaaacctgagagtgcaggtggtgaagagaaagtgcgagctgaccaacagcggcccctgcgccgagggcggcccaagcagcggcgcccctcctcccagcggcggcagcccagccggctccccaacctctaccgaggagggcacctctgagtccgccacccccgagagcggccctggcacctccaccgagcccagcgagggcagcgcacccggcagccctgccggcagccccacctccacagaggagggaaccagcaccgagcccagcgaaggcagcgccccaggcaccagcaccgagcctagtgagcaggagattaaacggatcaacaagatcagaagaagacttgtgaaagacagcaacaccaagaaggccggcaagacaggccccatgaaaaccctgctggttagagtgatgacacccgatctgagagagcggctggaaaacctgagaaagaagcctgaaaatatcccccagcccatcagcaatacatctagagccaacctgaataagctgctgaccgattacaccgaaatgaagaaggcgatcctgcatgtgtactgggaagagttccagaaggaccctgtgggcctgatgagccgggtggcccagcctgccagcaagaagatcgatcagaacaagctgaaacctgagatggacgagaagggcaacctgaccaccgccggctttgcctgctctcagtgtggccagcccctgttcgtgtacaagctggagcaggtgtctgagaagggcaaggcttacaccaactacttcggacggtgcaatgtggccgagcacgaaaagctgatcctgctggcccagctgaagcccgagaaggatagcgacgaagccgtgacatatagcctgggaaagtttgggcagagggccctggatttctacagcattcatgtgaccaaggagtccacccaccccgtgaagcccctggcccagatcgccggaaacagatacgcctccggacctgtgggaaaggccctgagcgacgcatgtatgggcacaatcgcctccttcctgtctaagtaccaggacatcatcatcgaacaccagaaggtggtgaagggcaaccagaagagactggagagcctgcgggagctggccggcaaggaaaacctggaataccctagcgtgaccctgccacctcagcctcacaccaaggagggcgttgatgcctacaacgaagtgatcgcccgggtgcgaatgtgggtgaacctgaacctgtggcagaagctgaagctaagcagagatgatgccaagcctctgctgagactgaagggattcccttcctttcctctggtcgagagacaggccaacgaagtggactggtgggacatggtgtgtaacgtgaagaagctgatcaacgagaaaaaggaggatggcaaggtgttttggcagaatctggctggctacaagagacaggaagccctgagaccatacctgagcagcgaggaagatcggaagaagggaaagaaattcgctcggtaccagctgggcgacctgctgctgcacctggaaaagaagcacggcgaggactggggaaaggtgtacgacgaggcctgggagcggattgacaagaaagtggaaggcctgagcaagcacatcaagctggaagaggaacggagaagcgaggacgcccagagcaaggccgccctgaccgactggctgcgggctaaggccagcttcgtgatcgagggcctgaaggaggccgacaaggacgagttctgcagatgcgagctgaagctgcagaagtggtacggggacctgcggggaaagcccttcgccatcgaagccgagaacagcatcctggacatcagcggcttcagcaagcagtacaactgtgccttcatctggcagaaggacggcgtgaagaagctgaacctgtacctgatcatcaactacttcaagggcggcaagctgcggttcaagaagatcaaacctgaagccttcgaagccaacagattctacaccgtgatcaacaaaaagagcggcgagatcgtgcccatggaggtgaacttcaacttcgacgaccccaacctgatcatcctgcctctggcctttggcaagagacagggcagagaattcatctggaacgacctgctgtccctggaaaccggcagcctgaagctggccaacggaagagtgatcgagaagacactgtacaacagaagaacccggcaggatgagcctgccctgttcgtggccctgaccttcgagcggcgggaggtcctggactcctccaatatcaaaccaatgaacctgatcggcgtggcaagaggcgaaaacatccccgccgtgatcgccctgaccgaccccgagggctgcccactgagccggtttaaggatagcctgggaaacccaacccacatcctgagaatcggcgagagctataaggagaagcagcggaccatccaggccaagaaggaggtggagcagcggagagccggcggctacagccggaagtacgccagcaaagccaagaatctggcagacgatatggtgagaaacaccgctagagatctgctgtactacgccgtgacccaggatgccatgctgatcttcgccaacctgagccggggcttcggccggcagggcaagcggaccttcatggccgagagacagtacacacggatggaggactggctgaccgccaagctggcctacgagggcctgagcaagacctacctgtccaagacactggcccagtacacctccaagacatgcagcaactgtgggtttaccatcaccagcgccgactacgacagggtgctggagaagctgaagaagacagcaacaggctggatgaccacaattaacggcaaggagctgaaggtggagggccagattacctactacaacagatacaagagacagaacgtagtcaaggacctgtccgtcgagctggatagactgagcgaagaatctgtgaacaacgacatctcctcctggacaaagggcagaagcggagaagctctgagcctcctgaagaaaagattctcccatagacccgtgcaggagaagttcgtgtgcctgaactgcggcttcgagacacacgcagccgagcaagccgccctgaacatcgccagatcctggctgttcctgcggagccaggagtacaagaaataccagacaaacaagacaaccggcaacaccgataagagagccttcgtcgagacctggcagtccttttaccggaagaagcttaaggaggtgtggaaacctgccgtgcggtctggcggatctggcggaggctccgcccaggcccccctgagcttcgaggacgtggccgtgggcttcagccccgaggagtggcagctgctggcccccgcccagaaggacctgtacagggacgtgatgctggagaactacaggaacctggtgagcctgggctaccaggccagcaagcccgacagcctgttccagctggagcacggcggccccccctgggccgtgggcggcgccgcccccaggcccccctgcgccgaggagatctgggagggcggcccaagcagcggcgcccctcctcccagcggcggcagcccagccggctccccaacctctaccgaggagggcacctctgagtccgccacccccgagagcggccctggcacctccaccgagcccagcgagggcagcgcacccggcagccctgccggcagccccacctccacagaggagggaaccagcaccgagcccagcgaaggcagcgccccaggcaccagcaccgagcctagtgagcaggagattaaacggatcaacaagatcagaagaagacttgtgaaagacagcaacaccaagaaggccggcaagacaggccccatgaaaaccctgctggttagagtgatgacacccgatctgagagagcggctggaaaacctgagaaagaagcctgaaaatatcccccagcccatcagcaatacatctagagccaacctgaataagctgctgaccgattacaccgaaatgaagaaggcgatcctgcatgtgtactgggaagagttccagaaggaccctgtgggcctgatgagccgggtggcccagcctgccagcaagaagatcgatcagaacaagctgaaacctgagatggacgagaagggcaacctgaccaccgccggctttgcctgctctcagtgtggccagcccctgttcgtgtacaagctggagcaggtgtctgagaagggcaaggcttacaccaactacttcggacggtgcaatgtggccgagcacgaaaagctgatcctgctggcccagctgaagcccgagaaggatagcgacgaagccgtgacatatagcctgggaaagtttgggcagagggccctggatttctacagcattcatgtgaccaaggagtccacccaccccgtgaagcccctggcccagatcgccggaaacagatacgcctccggacctgtgggaaaggccctgagcgacgcatgtatgggcacaatcgcctccttcctgtctaagtaccaggacatcatcatcgaacaccagaaggtggtgaagggcaaccagaagagactggagagcctgcgggagctggccggcaaggaaaacctggaataccctagcgtgaccctgccacctcagcctcacaccaaggagggcgttgatgcctacaacgaagtgatcgcccgggtgcgaatgtgggtgaacctgaacctgtggcagaagctgaagctaagcagagatgatgccaagcctctgctgagactgaagggattcccttcctttcctctggtcgagagacaggccaacgaagtggactggtgggacatggtgtgtaacgtgaagaagctgatcaacgagaaaaaggaggatggcaaggtgttttggcagaatctggctggctacaagagacaggaagccctgagaccatacctgagcagcgaggaagatcggaagaagggaaagaaattcgctcggtaccagctgggcgacctgctgctgcacctggaaaagaagcacggcgaggactggggaaaggtgtacgacgaggcctgggagcggattgacaagaaagtggaaggcctgagcaagcacatcaagctggaagaggaacggagaagcgaggacgcccagagcaaggccgccctgaccgactggctgcgggctaaggccagcttcgtgatcgagggcctgaaggaggccgacaaggacgagttctgcagatgcgagctgaagctgcagaagtggtacggggacctgcggggaaagcccttcgccatcgaagccgagaacagcatcctggacatcagcggcttcagcaagcagtacaactgtgccttcatctggcagaaggacggcgtgaagaagctgaacctgtacctgatcatcaactacttcaagggcggcaagctgcggttcaagaagatcaaacctgaagccttcgaagccaacagattctacaccgtgatcaacaaaaagagcggcgagatcgtgcccatggaggtgaacttcaacttcgacgaccccaacctgatcatcctgcctctggcctttggcaagagacagggcagagaattcatctggaacgacctgctgtccctggaaaccggcagcctgaagctggccaacggaagagtgatcgagaagacactgtacaacagaagaacccggcaggatgagcctgccctgttcgtggccctgaccttcgagcggcgggaggtcctggactcctccaatatcaaaccaatgaacctgatcggcgtggcaagaggcgaaaacatccccgccgtgatcgccctgaccgaccccgagggctgcccactgagccggtttaaggatagcctgggaaacccaacccacatcctgagaatcggcgagagctataaggagaagcagcggaccatccaggccaagaaggaggtggagcagcggagagccggcggctacagccggaagtacgccagcaaagccaagaatctggcagacgatatggtgagaaacaccgctagagatctgctgtactacgccgtgacccaggatgccatgctgatcttcgccaacctgagccggggcttcggccggcagggcaagcggaccttcatggccgagagacagtacacacggatggaggactggctgaccgccaagctggcctacgagggcctgagcaagacctacctgtccaagacactggcccagtacacctccaagacatgcagcaactgtgggtttaccatcaccagcgccgactacgacagggtgctggagaagctgaagaagacagcaacaggctggatgaccacaattaacggcaaggagctgaaggtggagggccagattacctactacaacagatacaagagacagaacgtagtcaaggacctgtccgtcgagctggatagactgagcgaagaatctgtgaacaacgacatctcctcctggacaaagggcagaagcggagaagctctgagcctcctgaagaaaagattctcccatagacccgtgcaggagaagttcgtgtgcctgaactgcggcttcgagacacacgcagccgagcaagccgccctgaacatcgccagatcctggctgttcctgcggagccaggagtacaagaaataccagacaaacaagacaaccggcaacaccgataagagagccttcgtcgagacctggcagtccttttaccggaagaagcttaaggaggtgtggaaacctgccgtgcggtctggcggatctggcggaggctcctgcccaggcccccctgagcttcgaggacgtggccgtgggcttcagccccgaggagtggcagctgctggcccccgcccagaaggacctgtacagggacgtgatgctggagaactacaggaacctggtgagcctgggctaccaggccagcaagcccgacagcctgttccagctggagcacggcggccccccctgggccgtgggcggcgccgcccccaggcccccctgcgccgaggagatctgggagggatctggctccggcagcggccccaagaaaaagagaaaagtctaagctgccttctgcggggcttgccttctggccatgcccttcttctctcccttgcacctgtacctcttggtctttgaataaagcctgagtaggaaggctagcaaaaaaaaaaaaaaaaaaaaaaaaaaaaaaaaaaaaaaaaaaaaaaaaaaaaaaaaaaaaaaaaaaaaaaaaaaaaaaaa

SEQ ID NO: 16306 - RNA, 9485 nt, synthetic construct
  source 1..9485: mol_type = other RNA
aggaaataagagagaaaagaagagtaagaagaaatataagagccaccatggcccctaagaagaagcgtaaagtgagccggatggaacgcctcgtctacgaggtgcggcagaagtgcagaaacatcgaggacatctgcatctcctgcggatctctgaacgtgaccctggagcacccactgttcatcggcggcatgtgccagaactgtaaaaactgttttctggagtgtgcctatcaatacgacgatgacggctaccagagctactgcaccatctgttgcggcggaagagaggtgctgatgtgtggaaataacaactgctgccggtgcttctgcgtggaatgcgtggacctgctggtgggccccggcgccgcccaggccgctattaaggaagatccttggaactgctacatgtgcggccacaagggcacatacggcctgctgagacggagagaggactggcctagcagactgcagatgttcttcgccaataaccacgaccaggagttcgacccccctaaggtgtaccctcccgtccccgccgagaagagaaagcccatccgggtcctgagcctgttcgatggcatcgccaccggtctgctggtgctgaaggacctgggcatccaggtggataggtacattgcctccgaggtgtgcgaggactccatcaccgtgggaatggtgcgtcatcagggcaagatcatgtacgtgggcgacgtgcggagcgtgacacagaagcatatccaggagtggggccctttcgacctggtgatcggcggcagcccttgcaatgacctgagcatcgtgaacccagcccggaagggcctgtacgagggaaccggcagactgttcttcgagttttacagactgctgcacgacgcccggcctaaggaaggcgacgaccggcccttcttttggctgttcgagaatgtggtggccatgggagtcagcgacaagcgggatattagccggttcctggagagcaaccccgtgatgatcgatgccaaggaagtgagcgccgcccaccgggccagatacttctggggcaatctgcctggcatgaacagacccctggccagcaccgtgaacgacaagctggagctgcaggagtgcctggagcacggccggatcgccaagttcagcaaggtgagaaccatcaccacccgaagcaacagcatcaaacaaggcaaggaccagcactttcctgtgttcatgaacgagaaggaggacatcctgtggtgtaccgagatggagagagtgttcgggttcccagtccactacacagatgtcagcaacatgtctagactggccagacagagactgctgggaagaagctggtccgtccctgtgatcagacacctgttcgcccctctgaaggagtacttcgcctgcgtgagcagcggcaacagcaacgccaacagccggggccccagcttctctagcggcctggtgccactgtccctgagagggagccacatgggccccatggagatctacaaaaccgtgagcgcctggaagcggcagcctgtgcgcgtgctgagcctgtttcggaatatcgataaagtcctgaaaagcctgggattcctggagagcggctctggctccggcggtggcaccctgaagtacgtggaggatgtgacaaacgtggtcagacgggatgtggagaagtggggccccttcgatctggtgtacggcagcacccaacccctgggcagctcttgtgaccggtgccctggctggtacatgtttcagttccaccggatcctgcagtacgccctgccgagacaggagtcccagcggccattcttttggattttcatggacaacttgctgctgaccgaggatgaccaggaaactaccactcggttcctgcagaccgaagccgtgaccctgcaggacgtgagaggccgggactaccagaacgccatgcgggtgtggtccaacatccctggactgaaaagcaagcacgcacctctgacccctaaagaagaggagtacctgcaggcccaggtgcggagcagaagcaagctggacgcccctaaggtggatctgctggtgaagaattgcctcctgcccctgagagagtacttcaagtatttcagccagaatagtctgcccctgggaggcagcggcggcggcgccctggtgacatttgaggacgtcgccgtgcggttcacccaggaggaatgggctctgctggatccttctcagaaaatcctgtaccgggacgtgatgagagagacataccggaatctgacctccgtgggcatcaactgggaatgttgggaccttgaagcctgcttcagaagcctgggaagaaacctgagagtgcaggtggtgaagagaaagtgcgagctgaccaacagcggcccctgcgccgagggcggcccaagcagcggcgcccctcctcccagcggcggcagcccagccggctccccaacctctaccgaggagggcacctctgagtccgccacccccgagagcggccctggcacctccaccgagcccagcgagggcagcgcacccggcagccctgccggcagccccacctccacagaggagggaaccagcaccgagcccagcgaaggcagcgccccaggcaccagcaccgagcctagtgagcaggagattaaacggatcaacaagatcagaagaagacttgtgaaagacagcaacaccaagaaggccggcaagacaggccccatgaaaaccctgctggttagagtgatgacacccgatctgagagagcggctggaaaacctgagaaagaagcctgaaaatatcccccagcccatcagcaatacatctagagccaacctgaataagctgctgaccgattacaccgaaatgaagaaggcgatcctgcatgtgtactgggaagagttccagaaggaccctgtgggcctgatgagccgggtggcccagcctgccagcaagaagatcgatcagaacaagctgaaacctgagatggacgagaagggcaacctgaccaccgccggctttgcctgctctcagtgtggccagcccctgttcgtgtacaagctggagcaggtgtctgagaagggcaaggcttacaccaactacttcggacggtgcaatgtggccgagcacgaaaagctgatcctgctggcccagctgaagcccgagaaggatagcgacgaagccgtgacatatagcctgggaaagtttgggcagagggccctggatttctacagcattcatgtgaccaaggagtccacccaccccgtgaagcccctggcccagatcgccggaaacagatacgcctccggacctgtgggaaaggccctgagcgacgcatgtatgggcacaatcgcctccttcctgtctaagtaccaggacatcatcatcgaacaccagaaggtggtgaagggcaaccagaagagactggagagcctgcgggagctggccggcaaggaaaacctggaataccctagcgtgaccctgccacctcagcctcacaccaaggagggcgttgatgcctacaacgaagtgatcgcccgggtgcgaatgtgggtgaacctgaacctgtggcagaagctgaagctaagcagagatgatgccaagcctctgctgagactgaagggattcccttcctttcctctggtcgagagacaggccaacgaagtggactggtgggacatggtgtgtaacgtgaagaagctgatcaacgagaaaaaggaggatggcaaggtgttttggcagaatctggctggctacaagagacaggaagccctgagaccatacctgagcagcgaggaagatcggaagaagggaaagaaattcgctcggtaccagctgggcgacctgctgctgcacctggaaaagaagcacggcgaggactggggaaaggtgtacgacgaggcctgggagcggattgacaagaaagtggaaggcctgagcaagcacatcaagctggaagaggaacggagaagcgaggacgcccagagcaaggccgccctgaccgactggctgcgggctaaggccagcttcgtgatcgagggcctgaaggaggccgacaaggacgagttctgcagatgcgagctgaagctgcagaagtggtacggggacctgcggggaaagcccttcgccatcgaagccgagaacagcatcctggacatcagcggcttcagcaagcagtacaactgtgccttcatctggcagaaggacggcgtgaagaagctgaacctgtacctgatcatcaactacttcaagggcggcaagctgcggttcaagaagatcaaacctgaagccttcgaagccaacagattctacaccgtgatcaacaaaaagagcggcgagatcgtgcccatggaggtgaacttcaacttcgacgaccccaacctgatcatcctgcctctggcctttggcaagagacagggcagagaattcatctggaacgacctgctgtccctggaaaccggcagcctgaagctggccaacggaagagtgatcgagaagacactgtacaacagaagaacccggcaggatgagcctgccctgttcgtggccctgaccttcgagcggcgggaggtcctggactcctccaatatcaaaccaatgaacctgatcggcgtggcaagaggcgaaaacatccccgccgtgatcgccctgaccgaccccgagggctgcccactgagccggtttaaggatagcctgggaaacccaacccacatcctgagaatcggcgagagctataaggagaagcagcggaccatccaggccaagaaggaggtggagcagcggagagccggcggctacagccggaagtacgccagcaaagccaagaatctggcagacgatatggtgagaaacaccgctagagatctgctgtactacgccgtgacccaggatgccatgctgatcttcgccaacctgagccggggcttcggccggcagggcaagcggaccttcatggccgagagacagtacacacggatggaggactggctgaccgccaagctggcctacgagggcctgagcaagacctacctgtccaagacactggcccagtacacctccaagacatgcagcaactgtgggtttaccatcaccagcgccgactacgacagggtgctggagaagctgaagaagacagcaacaggctggatgaccacaattaacggcaaggagctgaaggtggagggccagattacctactacaacagatacaagagacagaacgtagtcaaggacctgtccgtcgagctggatagactgagcgaagaatctgtgaacaacgacatctcctcctggacaaagggcagaagcggagaagctctgagcctcctgaagaaaagattctcccatagacccgtgcaggagaagttcgtgtgcctgaactgcggcttcgagacacacgcagccgagcaagccgccctgaacatcgccagatcctggctgttcctgcggagccaggagtacaagaaataccagacaaacaagacaaccggcaacaccgataagagagccttcgtcgagacctggcagtccttttaccggaagaagcttaaggaggtgtggaaacctgccgtgcggtctggcggatctggcggaggctccgcccacaggagcctgatgttcagcgacgtgagcatcgtgttcagccaggaggagtgggagtacctggacctggagcagagggacctgtacagggacgtgatgctggagaactacagcaacctggtgagcctgggctgcttcatcagcaagcccgacgtgatcagcctgctggagcagggcaaggagccctggaaggtggtgagaaagggcaggaggaggtacgccgcccccatgagcatcgccggcggcccaagcagcggcgcccctcctcccagcggcggcagcccagccggctccccaacctctaccgaggagggcacctctgagtccgccacccccgagagcggccctggcacctccaccgagcccagcgagggcagcgcacccggcagccctgccggcagccccacctccacagaggagggaaccagcaccgagcccagcgaaggcagcgccccaggcaccagcaccgagcctagtgagcaggagattaaacggatcaacaagatcagaagaagacttgtgaaagacagcaacaccaagaaggccggcaagacaggccccatgaaaaccctgctggttagagtgatgacacccgatctgagagagcggctggaaaacctgagaaagaagcctgaaaatatcccccagcccatcagcaatacatctagagccaacctgaataagctgctgaccgattacaccgaaatgaagaaggcgatcctgcatgtgtactgggaagagttccagaaggaccctgtgggcctgatgagccgggtggcccagcctgccagcaagaagatcgatcagaacaagctgaaacctgagatggacgagaagggcaacctgaccaccgccggctttgcctgctctcagtgtggccagcccctgttcgtgtacaagctggagcaggtgtctgagaagggcaaggcttacaccaactacttcggacggtgcaatgtggccgagcacgaaaagctgatcctgctggcccagctgaagcccgagaaggatagcgacgaagccgtgacatatagcctgggaaagtttgggcagagggccctggatttctacagcattcatgtgaccaaggagtccacccaccccgtgaagcccctggcccagatcgccggaaacagatacgcctccggacctgtgggaaaggccctgagcgacgcatgtatgggcacaatcgcctccttcctgtctaagtaccaggacatcatcatcgaacaccagaaggtggtgaagggcaaccagaagagactggagagcctgcgggagctggccggcaaggaaaacctggaataccctagcgtgaccctgccacctcagcctcacaccaaggagggcgttgatgcctacaacgaagtgatcgcccgggtgcgaatgtgggtgaacctgaacctgtggcagaagctgaagctaagcagagatgatgccaagcctctgctgagactgaagggattcccttcctttcctctggtcgagagacaggccaacgaagtggactggtgggacatggtgtgtaacgtgaagaagctgatcaacgagaaaaaggaggatggcaaggtgttttggcagaatctggctggctacaagagacaggaagccctgagaccatacctgagcagcgaggaagatcggaagaagggaaagaaattcgctcggtaccagctgggcgacctgctgctgcacctggaaaagaagcacggcgaggactggggaaaggtgtacgacgaggcctgggagcggattgacaagaaagtggaaggcctgagcaagcacatcaagctggaagaggaacggagaagcgaggacgcccagagcaaggccgccctgaccgactggctgcgggctaaggccagcttcgtgatcgagggcctgaaggaggccgacaaggacgagttctgcagatgcgagctgaagctgcagaagtggtacggggacctgcggggaaagcccttcgccatcgaagccgagaacagcatcctggacatcagcggcttcagcaagcagtacaactgtgccttcatctggcagaaggacggcgtgaagaagctgaacctgtacctgatcatcaactacttcaagggcggcaagctgcggttcaagaagatcaaacctgaagccttcgaagccaacagattctacaccgtgatcaacaaaaagagcggcgagatcgtgcccatggaggtgaacttcaacttcgacgaccccaacctgatcatcctgcctctggcctttggcaagagacagggcagagaattcatctggaacgacctgctgtccctggaaaccggcagcctgaagctggccaacggaagagtgatcgagaagacactgtacaacagaagaacccggcaggatgagcctgccctgttcgtggccctgaccttcgagcggcgggaggtcctggactcctccaatatcaaaccaatgaacctgatcggcgtggcaagaggcgaaaacatccccgccgtgatcgccctgaccgaccccgagggctgcccactgagccggtttaaggatagcctgggaaacccaacccacatcctgagaatcggcgagagctataaggagaagcagcggaccatccaggccaagaaggaggtggagcagcggagagccggcggctacagccggaagtacgccagcaaagccaagaatctggcagacgatatggtgagaaacaccgctagagatctgctgtactacgccgtgacccaggatgccatgctgatcttcgccaacctgagccggggcttcggccggcagggcaagcggaccttcatggccgagagacagtacacacggatggaggactggctgaccgccaagctggcctacgagggcctgagcaagacctacctgtccaagacactggcccagtacacctccaagacatgcagcaactgtgggtttaccatcaccagcgccgactacgacagggtgctggagaagctgaagaagacagcaacaggctggatgaccacaattaacggcaaggagctgaaggtggagggccagattacctactacaacagatacaagagacagaacgtagtcaaggacctgtccgtcgagctggatagactgagcgaagaatctgtgaacaacgacatctcctcctggacaaagggcagaagcggagaagctctgagcctcctgaagaaaagattctcccatagacccgtgcaggagaagttcgtgtgcctgaactgcggcttcgagacacacgcagccgagcaagccgccctgaacatcgccagatcctggctgttcctgcggagccaggagtacaagaaataccagacaaacaagacaaccggcaacaccgataagagagccttcgtcgagacctggcagtccttttaccggaagaagcttaaggaggtgtggaaacctgccgtgcggtctggcggatctggcggaggctcctgcccacaggagcctgatgttcagcgacgtgagcatcgtgttcagccaggaggagtgggagtacctggacctggagcagagggacctgtacagggacgtgatgctggagaactacagcaacctggtgagcctgggctgcttcatcagcaagcccgacgtgatcagcctgctggagcagggcaaggagccctggaaggtggtgagaaagggcaggaggaggtacgccgcccccatgagcatcgccggatctggctccggcagcggccccaagaaaaagagaaaagtctaagctgccttctgcggggcttgccttctggccatgcccttcttctctcccttgcacctgtacctcttggtctttgaataaagcctgagtaggaaggctagcaaaaaaaaaaaaaaaaaaaaaaaaaaaaaaaaaaaaaaaaaaaaaaaaaaaaaaaaaaaaaaaaaaaaaaaaaaaaaaaa

SEQ ID NO: 16307 - RNA, 9485 nt, synthetic construct
  source 1..9485: mol_type = other RNA
aggaaataagagagaaaagaagagtaagaagaaatataagagccaccatggcccctaagaagaagcgtaaagtgagccggatggaacgcctcgtctacgaggtgcggcagaagtgcagaaacatcgaggacatctgcatctcctgcggatctctgaacgtgaccctggagcacccactgttcatcggcggcatgtgccagaactgtaaaaactgttttctggagtgtgcctatcaatacgacgatgacggctaccagagctactgcaccatctgttgcggcggaagagaggtgctgatgtgtggaaataacaactgctgccggtgcttctgcgtggaatgcgtggacctgctggtgggccccggcgccgcccaggccgctattaaggaagatccttggaactgctacatgtgcggccacaagggcacatacggcctgctgagacggagagaggactggcctagcagactgcagatgttcttcgccaataaccacgaccaggagttcgacccccctaaggtgtaccctcccgtccccgccgagaagagaaagcccatccgggtcctgagcctgttcgatggcatcgccaccggtctgctggtgctgaaggacctgggcatccaggtggataggtacattgcctccgaggtgtgcgaggactccatcaccgtgggaatggtgcgtcatcagggcaagatcatgtacgtgggcgacgtgcggagcgtgacacagaagcatatccaggagtggggccctttcgacctggtgatcggcggcagcccttgcaatgacctgagcatcgtgaacccagcccggaagggcctgtacgagggaaccggcagactgttcttcgagttttacagactgctgcacgacgcccggcctaaggaaggcgacgaccggcccttcttttggctgttcgagaatgtggtggccatgggagtcagcgacaagcgggatattagccggttcctggagagcaaccccgtgatgatcgatgccaaggaagtgagcgccgcccaccgggccagatacttctggggcaatctgcctggcatgaacagacccctggccagcaccgtgaacgacaagctggagctgcaggagtgcctggagcacggccggatcgccaagttcagcaaggtgagaaccatcaccacccgaagcaacagcatcaaacaaggcaaggaccagcactttcctgtgttcatgaacgagaaggaggacatcctgtggtgtaccgagatggagagagtgttcgggttcccagtccactacacagatgtcagcaacatgtctagactggccagacagagactgctgggaagaagctggtccgtccctgtgatcagacacctgttcgcccctctgaaggagtacttcgcctgcgtgagcagcggcaacagcaacgccaacagccggggccccagcttctctagcggcctggtgccactgtccctgagagggagccacatgggccccatggagatctacaaaaccgtgagcgcctggaagcggcagcctgtgcgcgtgctgagcctgtttcggaatatcgataaagtcctgaaaagcctgggattcctggagagcggctctggctccggcggtggcaccctgaagtacgtggaggatgtgacaaacgtggtcagacgggatgtggagaagtggggccccttcgatctggtgtacggcagcacccaacccctgggcagctcttgtgaccggtgccctggctggtacatgtttcagttccaccggatcctgcagtacgccctgccgagacaggagtcccagcggccattcttttggattttcatggacaacttgctgctgaccgaggatgaccaggaaactaccactcggttcctgcagaccgaagccgtgaccctgcaggacgtgagaggccgggactaccagaacgccatgcgggtgtggtccaacatccctggactgaaaagcaagcacgcacctctgacccctaaagaagaggagtacctgcaggcccaggtgcggagcagaagcaagctggacgcccctaaggtggatctgctggtgaagaattgcctcctgcccctgagagagtacttcaagtatttcagccagaatagtctgcccctgggaggcagcggcggcggcgccctggtgacatttgaggacgtcgccgtgcggttcacccaggaggaatgggctctgctggatccttctcagaaaatcctgtaccgggacgtgatgagagagacataccggaatctgacctccgtgggcatcaactgggaatgttgggaccttgaagcctgcttcagaagcctgggaagaaacctgagagtgcaggtggtgaagagaaagtgcgagctgaccaacagcggcccctgcgccgagggcggcccaagcagcggcgcccctcctcccagcggcggcagcccagccggctccccaacctctaccgaggagggcacctctgagtccgccacccccgagagcggccctggcacctccaccgagcccagcgagggcagcgcacccggcagccctgccggcagccccacctccacagaggagggaaccagcaccgagcccagcgaaggcagcgccccaggcaccagcaccgagcctagtgagcaggagattaaacggatcaacaagatcagaagaagacttgtgaaagacagcaacaccaagaaggccggcaagacaggccccatgaaaaccctgctggttagagtgatgacacccgatctgagagagcggctggaaaacctgagaaagaagcctgaaaatatcccccagcccatcagcaatacatctagagccaacctgaataagctgctgaccgattacaccgaaatgaagaaggcgatcctgcatgtgtactgggaagagttccagaaggaccctgtgggcctgatgagccgggtggcccagcctgccagcaagaagatcgatcagaacaagctgaaacctgagatggacgagaagggcaacctgaccaccgccggctttgcctgctctcagtgtggccagcccctgttcgtgtacaagctggagcaggtgtctgagaagggcaaggcttacaccaactacttcggacggtgcaatgtggccgagcacgaaaagctgatcctgctggcccagctgaagcccgagaaggatagcgacgaagccgtgacatatagcctgggaaagtttgggcagagggccctggatttctacagcattcatgtgaccaaggagtccacccaccccgtgaagcccctggcccagatcgccggaaacagatacgcctccggacctgtgggaaaggccctgagcgacgcatgtatgggcacaatcgcctccttcctgtctaagtaccaggacatcatcatcgaacaccagaaggtggtgaagggcaaccagaagagactggagagcctgcgggagctggccggcaaggaaaacctggaataccctagcgtgaccctgccacctcagcctcacaccaaggagggcgttgatgcctacaacgaagtgatcgcccgggtgcgaatgtgggtgaacctgaacctgtggcagaagctgaagctaagcagagatgatgccaagcctctgctgagactgaagggattcccttcctttcctctggtcgagagacaggccaacgaagtggactggtgggacatggtgtgtaacgtgaagaagctgatcaacgagaaaaaggaggatggcaaggtgttttggcagaatctggctggctacaagagacaggaagccctgagaccatacctgagcagcgaggaagatcggaagaagggaaagaaattcgctcggtaccagctgggcgacctgctgctgcacctggaaaagaagcacggcgaggactggggaaaggtgtacgacgaggcctgggagcggattgacaagaaagtggaaggcctgagcaagcacatcaagctggaagaggaacggagaagcgaggacgcccagagcaaggccgccctgaccgactggctgcgggctaaggccagcttcgtgatcgagggcctgaaggaggccgacaaggacgagttctgcagatgcgagctgaagctgcagaagtggtacggggacctgcggggaaagcccttcgccatcgaagccgagaacagcatcctggacatcagcggcttcagcaagcagtacaactgtgccttcatctggcagaaggacggcgtgaagaagctgaacctgtacctgatcatcaactacttcaagggcggcaagctgcggttcaagaagatcaaacctgaagccttcgaagccaacagattctacaccgtgatcaacaaaaagagcggcgagatcgtgcccatggaggtgaacttcaacttcgacgaccccaacctgatcatcctgcctctggcctttggcaagagacagggcagagaattcatctggaacgacctgctgtccctggaaaccggcagcctgaagctggccaacggaagagtgatcgagaagacactgtacaacagaagaacccggcaggatgagcctgccctgttcgtggccctgaccttcgagcggcgggaggtcctggactcctccaatatcaaaccaatgaacctgatcggcgtggcaagaggcgaaaacatccccgccgtgatcgccctgaccgaccccgagggctgcccactgagccggtttaaggatagcctgggaaacccaacccacatcctgagaatcggcgagagctataaggagaagcagcggaccatccaggccaagaaggaggtggagcagcggagagccggcggctacagccggaagtacgccagcaaagccaagaatctggcagacgatatggtgagaaacaccgctagagatctgctgtactacgccgtgacccaggatgccatgctgatcttcgccaacctgagccggggcttcggccggcagggcaagcggaccttcatggccgagagacagtacacacggatggaggactggctgaccgccaagctggcctacgagggcctgagcaagacctacctgtccaagacactggcccagtacacctccaagacatgcagcaactgtgggtttaccatcaccagcgccgactacgacagggtgctggagaagctgaagaagacagcaacaggctggatgaccacaattaacggcaaggagctgaaggtggagggccagattacctactacaacagatacaagagacagaacgtagtcaaggacctgtccgtcgagctggatagactgagcgaagaatctgtgaacaacgacatctcctcctggacaaagggcagaagcggagaagctctgagcctcctgaagaaaagattctcccatagacccgtgcaggagaagttcgtgtgcctgaactgcggcttcgagacacacgcagccgagcaagccgccctgaacatcgccagatcctggctgttcctgcggagccaggagtacaagaaataccagacaaacaagacaaccggcaacaccgataagagagccttcgtcgagacctggcagtccttttaccggaagaagcttaaggaggtgtggaaacctgccgtgcggtctggcggatctggcggaggctccagcctgggccccctgagcttcaaggacgtggccgtggccttcagccaggaggagtggcagcagctggaccccgaggagaggaccacctacagggacgtgatgctggagacctacagcaacctggtgagcgtgggctacgacatcatcaagcccgacgtgatcatcaagctggagcagggcgaggagccctggatcgtggagggcgccttcagcccccagagctaccccgacgagatcaggcacggcggcccaagcagcggcgcccctcctcccagcggcggcagcccagccggctccccaacctctaccgaggagggcacctctgagtccgccacccccgagagcggccctggcacctccaccgagcccagcgagggcagcgcacccggcagccctgccggcagccccacctccacagaggagggaaccagcaccgagcccagcgaaggcagcgccccaggcaccagcaccgagcctagtgagcaggagattaaacggatcaacaagatcagaagaagacttgtgaaagacagcaacaccaagaaggccggcaagacaggccccatgaaaaccctgctggttagagtgatgacacccgatctgagagagcggctggaaaacctgagaaagaagcctgaaaatatcccccagcccatcagcaatacatctagagccaacctgaataagctgctgaccgattacaccgaaatgaagaaggcgatcctgcatgtgtactgggaagagttccagaaggaccctgtgggcctgatgagccgggtggcccagcctgccagcaagaagatcgatcagaacaagctgaaacctgagatggacgagaagggcaacctgaccaccgccggctttgcctgctctcagtgtggccagcccctgttcgtgtacaagctggagcaggtgtctgagaagggcaaggcttacaccaactacttcggacggtgcaatgtggccgagcacgaaaagctgatcctgctggcccagctgaagcccgagaaggatagcgacgaagccgtgacatatagcctgggaaagtttgggcagagggccctggatttctacagcattcatgtgaccaaggagtccacccaccccgtgaagcccctggcccagatcgccggaaacagatacgcctccggacctgtgggaaaggccctgagcgacgcatgtatgggcacaatcgcctccttcctgtctaagtaccaggacatcatcatcgaacaccagaaggtggtgaagggcaaccagaagagactggagagcctgcgggagctggccggcaaggaaaacctggaataccctagcgtgaccctgccacctcagcctcacaccaaggagggcgttgatgcctacaacgaagtgatcgcccgggtgcgaatgtgggtgaacctgaacctgtggcagaagctgaagctaagcagagatgatgccaagcctctgctgagactgaagggattcccttcctttcctctggtcgagagacaggccaacgaagtggactggtgggacatggtgtgtaacgtgaagaagctgatcaacgagaaaaaggaggatggcaaggtgttttggcagaatctggctggctacaagagacaggaagccctgagaccatacctgagcagcgaggaagatcggaagaagggaaagaaattcgctcggtaccagctgggcgacctgctgctgcacctggaaaagaagcacggcgaggactggggaaaggtgtacgacgaggcctgggagcggattgacaagaaagtggaaggcctgagcaagcacatcaagctggaagaggaacggagaagcgaggacgcccagagcaaggccgccctgaccgactggctgcgggctaaggccagcttcgtgatcgagggcctgaaggaggccgacaaggacgagttctgcagatgcgagctgaagctgcagaagtggtacggggacctgcggggaaagcccttcgccatcgaagccgagaacagcatcctggacatcagcggcttcagcaagcagtacaactgtgccttcatctggcagaaggacggcgtgaagaagctgaacctgtacctgatcatcaactacttcaagggcggcaagctgcggttcaagaagatcaaacctgaagccttcgaagccaacagattctacaccgtgatcaacaaaaagagcggcgagatcgtgcccatggaggtgaacttcaacttcgacgaccccaacctgatcatcctgcctctggcctttggcaagagacagggcagagaattcatctggaacgacctgctgtccctggaaaccggcagcctgaagctggccaacggaagagtgatcgagaagacactgtacaacagaagaacccggcaggatgagcctgccctgttcgtggccctgaccttcgagcggcgggaggtcctggactcctccaatatcaaaccaatgaacctgatcggcgtggcaagaggcgaaaacatccccgccgtgatcgccctgaccgaccccgagggctgcccactgagccggtttaaggatagcctgggaaacccaacccacatcctgagaatcggcgagagctataaggagaagcagcggaccatccaggccaagaaggaggtggagcagcggagagccggcggctacagccggaagtacgccagcaaagccaagaatctggcagacgatatggtgagaaacaccgctagagatctgctgtactacgccgtgacccaggatgccatgctgatcttcgccaacctgagccggggcttcggccggcagggcaagcggaccttcatggccgagagacagtacacacggatggaggactggctgaccgccaagctggcctacgagggcctgagcaagacctacctgtccaagacactggcccagtacacctccaagacatgcagcaactgtgggtttaccatcaccagcgccgactacgacagggtgctggagaagctgaagaagacagcaacaggctggatgaccacaattaacggcaaggagctgaaggtggagggccagattacctactacaacagatacaagagacagaacgtagtcaaggacctgtccgtcgagctggatagactgagcgaagaatctgtgaacaacgacatctcctcctggacaaagggcagaagcggagaagctctgagcctcctgaagaaaagattctcccatagacccgtgcaggagaagttcgtgtgcctgaactgcggcttcgagacacacgcagccgagcaagccgccctgaacatcgccagatcctggctgttcctgcggagccaggagtacaagaaataccagacaaacaagacaaccggcaacaccgataagagagccttcgtcgagacctggcagtccttttaccggaagaagcttaaggaggtgtggaaacctgccgtgcggtctggcggatctggcggaggctcctagcctgggccccctgagcttcaaggacgtggccgtggccttcagccaggaggagtggcagcagctggaccccgaggagaggaccacctacagggacgtgatgctggagacctacagcaacctggtgagcgtgggctacgacatcatcaagcccgacgtgatcatcaagctggagcagggcgaggagccctggatcgtggagggcgccttcagcccccagagctaccccgacgagatcaggcacggatctggctccggcagcggccccaagaaaaagagaaaagtctaagctgccttctgcggggcttgccttctggccatgcccttcttctctcccttgcacctgtacctcttggtctttgaataaagcctgagtaggaaggctagcaaaaaaaaaaaaaaaaaaaaaaaaaaaaaaaaaaaaaaaaaaaaaaaaaaaaaaaaaaaaaaaaaaaaaaaaaaaaaaaa

SEQ ID NO: 16308 - RNA, 9485 nt, synthetic construct
  source 1..9485: mol_type = other RNA
aggaaataagagagaaaagaagagtaagaagaaatataagagccaccatggcccctaagaagaagcgtaaagtgagccggatggaacgcctcgtctacgaggtgcggcagaagtgcagaaacatcgaggacatctgcatctcctgcggatctctgaacgtgaccctggagcacccactgttcatcggcggcatgtgccagaactgtaaaaactgttttctggagtgtgcctatcaatacgacgatgacggctaccagagctactgcaccatctgttgcggcggaagagaggtgctgatgtgtggaaataacaactgctgccggtgcttctgcgtggaatgcgtggacctgctggtgggccccggcgccgcccaggccgctattaaggaagatccttggaactgctacatgtgcggccacaagggcacatacggcctgctgagacggagagaggactggcctagcagactgcagatgttcttcgccaataaccacgaccaggagttcgacccccctaaggtgtaccctcccgtccccgccgagaagagaaagcccatccgggtcctgagcctgttcgatggcatcgccaccggtctgctggtgctgaaggacctgggcatccaggtggataggtacattgcctccgaggtgtgcgaggactccatcaccgtgggaatggtgcgtcatcagggcaagatcatgtacgtgggcgacgtgcggagcgtgacacagaagcatatccaggagtggggccctttcgacctggtgatcggcggcagcccttgcaatgacctgagcatcgtgaacccagcccggaagggcctgtacgagggaaccggcagactgttcttcgagttttacagactgctgcacgacgcccggcctaaggaaggcgacgaccggcccttcttttggctgttcgagaatgtggtggccatgggagtcagcgacaagcgggatattagccggttcctggagagcaaccccgtgatgatcgatgccaaggaagtgagcgccgcccaccgggccagatacttctggggcaatctgcctggcatgaacagacccctggccagcaccgtgaacgacaagctggagctgcaggagtgcctggagcacggccggatcgccaagttcagcaaggtgagaaccatcaccacccgaagcaacagcatcaaacaaggcaaggaccagcactttcctgtgttcatgaacgagaaggaggacatcctgtggtgtaccgagatggagagagtgttcgggttcccagtccactacacagatgtcagcaacatgtctagactggccagacagagactgctgggaagaagctggtccgtccctgtgatcagacacctgttcgcccctctgaaggagtacttcgcctgcgtgagcagcggcaacagcaacgccaacagccggggccccagcttctctagcggcctggtgccactgtccctgagagggagccacatgggccccatggagatctacaaaaccgtgagcgcctggaagcggcagcctgtgcgcgtgctgagcctgtttcggaatatcgataaagtcctgaaaagcctgggattcctggagagcggctctggctccggcggtggcaccctgaagtacgtggaggatgtgacaaacgtggtcagacgggatgtggagaagtggggccccttcgatctggtgtacggcagcacccaacccctgggcagctcttgtgaccggtgccctggctggtacatgtttcagttccaccggatcctgcagtacgccctgccgagacaggagtcccagcggccattcttttggattttcatggacaacttgctgctgaccgaggatgaccaggaaactaccactcggttcctgcagaccgaagccgtgaccctgcaggacgtgagaggccgggactaccagaacgccatgcgggtgtggtccaacatccctggactgaaaagcaagcacgcacctctgacccctaaagaagaggagtacctgcaggcccaggtgcggagcagaagcaagctggacgcccctaaggtggatctgctggtgaagaattgcctcctgcccctgagagagtacttcaagtatttcagccagaatagtctgcccctgggaggcagcggcggcggcgccctggtgacatttgaggacgtcgccgtgcggttcacccaggaggaatgggctctgctggatccttctcagaaaatcctgtaccgggacgtgatgagagagacataccggaatctgacctccgtgggcatcaactgggaatgttgggaccttgaagcctgcttcagaagcctgggaagaaacctgagagtgcaggtggtgaagagaaagtgcgagctgaccaacagcggcccctgcgccgagggcggcccaagcagcggcgcccctcctcccagcggcggcagcccagccggctccccaacctctaccgaggagggcacctctgagtccgccacccccgagagcggccctggcacctccaccgagcccagcgagggcagcgcacccggcagccctgccggcagccccacctccacagaggagggaaccagcaccgagcccagcgaaggcagcgccccaggcaccagcaccgagcctagtgagcaggagattaaacggatcaacaagatcagaagaagacttgtgaaagacagcaacaccaagaaggccggcaagacaggccccatgaaaaccctgctggttagagtgatgacacccgatctgagagagcggctggaaaacctgagaaagaagcctgaaaatatcccccagcccatcagcaatacatctagagccaacctgaataagctgctgaccgattacaccgaaatgaagaaggcgatcctgcatgtgtactgggaagagttccagaaggaccctgtgggcctgatgagccgggtggcccagcctgccagcaagaagatcgatcagaacaagctgaaacctgagatggacgagaagggcaacctgaccaccgccggctttgcctgctctcagtgtggccagcccctgttcgtgtacaagctggagcaggtgtctgagaagggcaaggcttacaccaactacttcggacggtgcaatgtggccgagcacgaaaagctgatcctgctggcccagctgaagcccgagaaggatagcgacgaagccgtgacatatagcctgggaaagtttgggcagagggccctggatttctacagcattcatgtgaccaaggagtccacccaccccgtgaagcccctggcccagatcgccggaaacagatacgcctccggacctgtgggaaaggccctgagcgacgcatgtatgggcacaatcgcctccttcctgtctaagtaccaggacatcatcatcgaacaccagaaggtggtgaagggcaaccagaagagactggagagcctgcgggagctggccggcaaggaaaacctggaataccctagcgtgaccctgccacctcagcctcacaccaaggagggcgttgatgcctacaacgaagtgatcgcccgggtgcgaatgtgggtgaacctgaacctgtggcagaagctgaagctaagcagagatgatgccaagcctctgctgagactgaagggattcccttcctttcctctggtcgagagacaggccaacgaagtggactggtgggacatggtgtgtaacgtgaagaagctgatcaacgagaaaaaggaggatggcaaggtgttttggcagaatctggctggctacaagagacaggaagccctgagaccatacctgagcagcgaggaagatcggaagaagggaaagaaattcgctcggtaccagctgggcgacctgctgctgcacctggaaaagaagcacggcgaggactggggaaaggtgtacgacgaggcctgggagcggattgacaagaaagtggaaggcctgagcaagcacatcaagctggaagaggaacggagaagcgaggacgcccagagcaaggccgccctgaccgactggctgcgggctaaggccagcttcgtgatcgagggcctgaaggaggccgacaaggacgagttctgcagatgcgagctgaagctgcagaagtggtacggggacctgcggggaaagcccttcgccatcgaagccgagaacagcatcctggacatcagcggcttcagcaagcagtacaactgtgccttcatctggcagaaggacggcgtgaagaagctgaacctgtacctgatcatcaactacttcaagggcggcaagctgcggttcaagaagatcaaacctgaagccttcgaagccaacagattctacaccgtgatcaacaaaaagagcggcgagatcgtgcccatggaggtgaacttcaacttcgacgaccccaacctgatcatcctgcctctggcctttggcaagagacagggcagagaattcatctggaacgacctgctgtccctggaaaccggcagcctgaagctggccaacggaagagtgatcgagaagacactgtacaacagaagaacccggcaggatgagcctgccctgttcgtggccctgaccttcgagcggcgggaggtcctggactcctccaatatcaaaccaatgaacctgatcggcgtggcaagaggcgaaaacatccccgccgtgatcgccctgaccgaccccgagggctgcccactgagccggtttaaggatagcctgggaaacccaacccacatcctgagaatcggcgagagctataaggagaagcagcggaccatccaggccaagaaggaggtggagcagcggagagccggcggctacagccggaagtacgccagcaaagccaagaatctggcagacgatatggtgagaaacaccgctagagatctgctgtactacgccgtgacccaggatgccatgctgatcttcgccaacctgagccggggcttcggccggcagggcaagcggaccttcatggccgagagacagtacacacggatggaggactggctgaccgccaagctggcctacgagggcctgagcaagacctacctgtccaagacactggcccagtacacctccaagacatgcagcaactgtgggtttaccatcaccagcgccgactacgacagggtgctggagaagctgaagaagacagcaacaggctggatgaccacaattaacggcaaggagctgaaggtggagggccagattacctactacaacagatacaagagacagaacgtagtcaaggacctgtccgtcgagctggatagactgagcgaagaatctgtgaacaacgacatctcctcctggacaaagggcagaagcggagaagctctgagcctcctgaagaaaagattctcccatagacccgtgcaggagaagttcgtgtgcctgaactgcggcttcgagacacacgcagccgagcaagccgccctgaacatcgccagatcctggctgttcctgcggagccaggagtacaagaaataccagacaaacaagacaaccggcaacaccgataagagagccttcgtcgagacctggcagtccttttaccggaagaagcttaaggaggtgtggaaacctgccgtgcggtctggcggatctggcggaggctccttccaggccagcgtggtgttcgaggacgtggccgtgaacttcacccccgaggagtgggccctgctgaacaggggccagaggaagctgtacagggacgtgatgctggagacctgcaggaacctgagcgccgtggagaagcagaagttccacagcagcggcgacctgaccaggatgcaggagggcctgctgaggagccccctggtggagagcgtgtgcgagaggatcgagggcgacccctgcggcggcggcccaagcagcggcgcccctcctcccagcggcggcagcccagccggctccccaacctctaccgaggagggcacctctgagtccgccacccccgagagcggccctggcacctccaccgagcccagcgagggcagcgcacccggcagccctgccggcagccccacctccacagaggagggaaccagcaccgagcccagcgaaggcagcgccccaggcaccagcaccgagcctagtgagcaggagattaaacggatcaacaagatcagaagaagacttgtgaaagacagcaacaccaagaaggccggcaagacaggccccatgaaaaccctgctggttagagtgatgacacccgatctgagagagcggctggaaaacctgagaaagaagcctgaaaatatcccccagcccatcagcaatacatctagagccaacctgaataagctgctgaccgattacaccgaaatgaagaaggcgatcctgcatgtgtactgggaagagttccagaaggaccctgtgggcctgatgagccgggtggcccagcctgccagcaagaagatcgatcagaacaagctgaaacctgagatggacgagaagggcaacctgaccaccgccggctttgcctgctctcagtgtggccagcccctgttcgtgtacaagctggagcaggtgtctgagaagggcaaggcttacaccaactacttcggacggtgcaatgtggccgagcacgaaaagctgatcctgctggcccagctgaagcccgagaaggatagcgacgaagccgtgacatatagcctgggaaagtttgggcagagggccctggatttctacagcattcatgtgaccaaggagtccacccaccccgtgaagcccctggcccagatcgccggaaacagatacgcctccggacctgtgggaaaggccctgagcgacgcatgtatgggcacaatcgcctccttcctgtctaagtaccaggacatcatcatcgaacaccagaaggtggtgaagggcaaccagaagagactggagagcctgcgggagctggccggcaaggaaaacctggaataccctagcgtgaccctgccacctcagcctcacaccaaggagggcgttgatgcctacaacgaagtgatcgcccgggtgcgaatgtgggtgaacctgaacctgtggcagaagctgaagctaagcagagatgatgccaagcctctgctgagactgaagggattcccttcctttcctctggtcgagagacaggccaacgaagtggactggtgggacatggtgtgtaacgtgaagaagctgatcaacgagaaaaaggaggatggcaaggtgttttggcagaatctggctggctacaagagacaggaagccctgagaccatacctgagcagcgaggaagatcggaagaagggaaagaaattcgctcggtaccagctgggcgacctgctgctgcacctggaaaagaagcacggcgaggactggggaaaggtgtacgacgaggcctgggagcggattgacaagaaagtggaaggcctgagcaagcacatcaagctggaagaggaacggagaagcgaggacgcccagagcaaggccgccctgaccgactggctgcgggctaaggccagcttcgtgatcgagggcctgaaggaggccgacaaggacgagttctgcagatgcgagctgaagctgcagaagtggtacggggacctgcggggaaagcccttcgccatcgaagccgagaacagcatcctggacatcagcggcttcagcaagcagtacaactgtgccttcatctggcagaaggacggcgtgaagaagctgaacctgtacctgatcatcaactacttcaagggcggcaagctgcggttcaagaagatcaaacctgaagccttcgaagccaacagattctacaccgtgatcaacaaaaagagcggcgagatcgtgcccatggaggtgaacttcaacttcgacgaccccaacctgatcatcctgcctctggcctttggcaagagacagggcagagaattcatctggaacgacctgctgtccctggaaaccggcagcctgaagctggccaacggaagagtgatcgagaagacactgtacaacagaagaacccggcaggatgagcctgccctgttcgtggccctgaccttcgagcggcgggaggtcctggactcctccaatatcaaaccaatgaacctgatcggcgtggcaagaggcgaaaacatccccgccgtgatcgccctgaccgaccccgagggctgcccactgagccggtttaaggatagcctgggaaacccaacccacatcctgagaatcggcgagagctataaggagaagcagcggaccatccaggccaagaaggaggtggagcagcggagagccggcggctacagccggaagtacgccagcaaagccaagaatctggcagacgatatggtgagaaacaccgctagagatctgctgtactacgccgtgacccaggatgccatgctgatcttcgccaacctgagccggggcttcggccggcagggcaagcggaccttcatggccgagagacagtacacacggatggaggactggctgaccgccaagctggcctacgagggcctgagcaagacctacctgtccaagacactggcccagtacacctccaagacatgcagcaactgtgggtttaccatcaccagcgccgactacgacagggtgctggagaagctgaagaagacagcaacaggctggatgaccacaattaacggcaaggagctgaaggtggagggccagattacctactacaacagatacaagagacagaacgtagtcaaggacctgtccgtcgagctggatagactgagcgaagaatctgtgaacaacgacatctcctcctggacaaagggcagaagcggagaagctctgagcctcctgaagaaaagattctcccatagacccgtgcaggagaagttcgtgtgcctgaactgcggcttcgagacacacgcagccgagcaagccgccctgaacatcgccagatcctggctgttcctgcggagccaggagtacaagaaataccagacaaacaagacaaccggcaacaccgataagagagccttcgtcgagacctggcagtccttttaccggaagaagcttaaggaggtgtggaaacctgccgtgcggtctggcggatctggcggaggctcctttccaggccagcgtggtgttcgaggacgtggccgtgaacttcacccccgaggagtgggccctgctgaacaggggccagaggaagctgtacagggacgtgatgctggagacctgcaggaacctgagcgccgtggagaagcagaagttccacagcagcggcgacctgaccaggatgcaggagggcctgctgaggagccccctggtggagagcgtgtgcgagaggatcgagggcgacccctgcggcggatctggctccggcagcggccccaagaaaaagagaaaagtctaagctgccttctgcggggcttgccttctggccatgcccttcttctctcccttgcacctgtacctcttggtctttgaataaagcctgagtaggaaggctagcaaaaaaaaaaaaaaaaaaaaaaaaaaaaaaaaaaaaaaaaaaaaaaaaaaaaaaaaaaaaaaaaaaaaaaaaaaaaaaaa

SEQ ID NO: 16309 - RNA, 9485 nt, synthetic construct
  source 1..9485: mol_type = other RNA
aggaaataagagagaaaagaagagtaagaagaaatataagagccaccatggcccctaagaagaagcgtaaagtgagccggatggaacgcctcgtctacgaggtgcggcagaagtgcagaaacatcgaggacatctgcatctcctgcggatctctgaacgtgaccctggagcacccactgttcatcggcggcatgtgccagaactgtaaaaactgttttctggagtgtgcctatcaatacgacgatgacggctaccagagctactgcaccatctgttgcggcggaagagaggtgctgatgtgtggaaataacaactgctgccggtgcttctgcgtggaatgcgtggacctgctggtgggccccggcgccgcccaggccgctattaaggaagatccttggaactgctacatgtgcggccacaagggcacatacggcctgctgagacggagagaggactggcctagcagactgcagatgttcttcgccaataaccacgaccaggagttcgacccccctaaggtgtaccctcccgtccccgccgagaagagaaagcccatccgggtcctgagcctgttcgatggcatcgccaccggtctgctggtgctgaaggacctgggcatccaggtggataggtacattgcctccgaggtgtgcgaggactccatcaccgtgggaatggtgcgtcatcagggcaagatcatgtacgtgggcgacgtgcggagcgtgacacagaagcatatccaggagtggggccctttcgacctggtgatcggcggcagcccttgcaatgacctgagcatcgtgaacccagcccggaagggcctgtacgagggaaccggcagactgttcttcgagttttacagactgctgcacgacgcccggcctaaggaaggcgacgaccggcccttcttttggctgttcgagaatgtggtggccatgggagtcagcgacaagcgggatattagccggttcctggagagcaaccccgtgatgatcgatgccaaggaagtgagcgccgcccaccgggccagatacttctggggcaatctgcctggcatgaacagacccctggccagcaccgtgaacgacaagctggagctgcaggagtgcctggagcacggccggatcgccaagttcagcaaggtgagaaccatcaccacccgaagcaacagcatcaaacaaggcaaggaccagcactttcctgtgttcatgaacgagaaggaggacatcctgtggtgtaccgagatggagagagtgttcgggttcccagtccactacacagatgtcagcaacatgtctagactggccagacagagactgctgggaagaagctggtccgtccctgtgatcagacacctgttcgcccctctgaaggagtacttcgcctgcgtgagcagcggcaacagcaacgccaacagccggggccccagcttctctagcggcctggtgccactgtccctgagagggagccacatgggccccatggagatctacaaaaccgtgagcgcctggaagcggcagcctgtgcgcgtgctgagcctgtttcggaatatcgataaagtcctgaaaagcctgggattcctggagagcggctctggctccggcggtggcaccctgaagtacgtggaggatgtgacaaacgtggtcagacgggatgtggagaagtggggccccttcgatctggtgtacggcagcacccaacccctgggcagctcttgtgaccggtgccctggctggtacatgtttcagttccaccggatcctgcagtacgccctgccgagacaggagtcccagcggccattcttttggattttcatggacaacttgctgctgaccgaggatgaccaggaaactaccactcggttcctgcagaccgaagccgtgaccctgcaggacgtgagaggccgggactaccagaacgccatgcgggtgtggtccaacatccctggactgaaaagcaagcacgcacctctgacccctaaagaagaggagtacctgcaggcccaggtgcggagcagaagcaagctggacgcccctaaggtggatctgctggtgaagaattgcctcctgcccctgagagagtacttcaagtatttcagccagaatagtctgcccctgggaggcagcggcggcggcgccctggtgacatttgaggacgtcgccgtgcggttcacccaggaggaatgggctctgctggatccttctcagaaaatcctgtaccgggacgtgatgagagagacataccggaatctgacctccgtgggcatcaactgggaatgttgggaccttgaagcctgcttcagaagcctgggaagaaacctgagagtgcaggtggtgaagagaaagtgcgagctgaccaacagcggcccctgcgccgagggcggcccaagcagcggcgcccctcctcccagcggcggcagcccagccggctccccaacctctaccgaggagggcacctctgagtccgccacccccgagagcggccctggcacctccaccgagcccagcgagggcagcgcacccggcagccctgccggcagccccacctccacagaggagggaaccagcaccgagcccagcgaaggcagcgccccaggcaccagcaccgagcctagtgagcaggagattaaacggatcaacaagatcagaagaagacttgtgaaagacagcaacaccaagaaggccggcaagacaggccccatgaaaaccctgctggttagagtgatgacacccgatctgagagagcggctggaaaacctgagaaagaagcctgaaaatatcccccagcccatcagcaatacatctagagccaacctgaataagctgctgaccgattacaccgaaatgaagaaggcgatcctgcatgtgtactgggaagagttccagaaggaccctgtgggcctgatgagccgggtggcccagcctgccagcaagaagatcgatcagaacaagctgaaacctgagatggacgagaagggcaacctgaccaccgccggctttgcctgctctcagtgtggccagcccctgttcgtgtacaagctggagcaggtgtctgagaagggcaaggcttacaccaactacttcggacggtgcaatgtggccgagcacgaaaagctgatcctgctggcccagctgaagcccgagaaggatagcgacgaagccgtgacatatagcctgggaaagtttgggcagagggccctggatttctacagcattcatgtgaccaaggagtccacccaccccgtgaagcccctggcccagatcgccggaaacagatacgcctccggacctgtgggaaaggccctgagcgacgcatgtatgggcacaatcgcctccttcctgtctaagtaccaggacatcatcatcgaacaccagaaggtggtgaagggcaaccagaagagactggagagcctgcgggagctggccggcaaggaaaacctggaataccctagcgtgaccctgccacctcagcctcacaccaaggagggcgttgatgcctacaacgaagtgatcgcccgggtgcgaatgtgggtgaacctgaacctgtggcagaagctgaagctaagcagagatgatgccaagcctctgctgagactgaagggattcccttcctttcctctggtcgagagacaggccaacgaagtggactggtgggacatggtgtgtaacgtgaagaagctgatcaacgagaaaaaggaggatggcaaggtgttttggcagaatctggctggctacaagagacaggaagccctgagaccatacctgagcagcgaggaagatcggaagaagggaaagaaattcgctcggtaccagctgggcgacctgctgctgcacctggaaaagaagcacggcgaggactggggaaaggtgtacgacgaggcctgggagcggattgacaagaaagtggaaggcctgagcaagcacatcaagctggaagaggaacggagaagcgaggacgcccagagcaaggccgccctgaccgactggctgcgggctaaggccagcttcgtgatcgagggcctgaaggaggccgacaaggacgagttctgcagatgcgagctgaagctgcagaagtggtacggggacctgcggggaaagcccttcgccatcgaagccgagaacagcatcctggacatcagcggcttcagcaagcagtacaactgtgccttcatctggcagaaggacggcgtgaagaagctgaacctgtacctgatcatcaactacttcaagggcggcaagctgcggttcaagaagatcaaacctgaagccttcgaagccaacagattctacaccgtgatcaacaaaaagagcggcgagatcgtgcccatggaggtgaacttcaacttcgacgaccccaacctgatcatcctgcctctggcctttggcaagagacagggcagagaattcatctggaacgacctgctgtccctggaaaccggcagcctgaagctggccaacggaagagtgatcgagaagacactgtacaacagaagaacccggcaggatgagcctgccctgttcgtggccctgaccttcgagcggcgggaggtcctggactcctccaatatcaaaccaatgaacctgatcggcgtggcaagaggcgaaaacatccccgccgtgatcgccctgaccgaccccgagggctgcccactgagccggtttaaggatagcctgggaaacccaacccacatcctgagaatcggcgagagctataaggagaagcagcggaccatccaggccaagaaggaggtggagcagcggagagccggcggctacagccggaagtacgccagcaaagccaagaatctggcagacgatatggtgagaaacaccgctagagatctgctgtactacgccgtgacccaggatgccatgctgatcttcgccaacctgagccggggcttcggccggcagggcaagcggaccttcatggccgagagacagtacacacggatggaggactggctgaccgccaagctggcctacgagggcctgagcaagacctacctgtccaagacactggcccagtacacctccaagacatgcagcaactgtgggtttaccatcaccagcgccgactacgacagggtgctggagaagctgaagaagacagcaacaggctggatgaccacaattaacggcaaggagctgaaggtggagggccagattacctactacaacagatacaagagacagaacgtagtcaaggacctgtccgtcgagctggatagactgagcgaagaatctgtgaacaacgacatctcctcctggacaaagggcagaagcggagaagctctgagcctcctgaagaaaagattctcccatagacccgtgcaggagaagttcgtgtgcctgaactgcggcttcgagacacacgcagccgagcaagccgccctgaacatcgccagatcctggctgttcctgcggagccaggagtacaagaaataccagacaaacaagacaaccggcaacaccgataagagagccttcgtcgagacctggcagtccttttaccggaagaagcttaaggaggtgtggaaacctgccgtgcggtctggcggatctggcggaggctcccaggccgaggtgaccttcgaggacgtggccgtgctgctgagcagggaggagtggggcaggctgggccccgtgcagaagggcctgtacagggacgtgatgctggagacctacaggaacctggtgagcctgggcgccggccccgccggccccaagcccgaggtgatcacccagctggagaggggcgacgagccctgggtgcccgacgtgcagggcagggagaggcccaccatcgacggcagcgccggcggcccaagcagcggcgcccctcctcccagcggcggcagcccagccggctccccaacctctaccgaggagggcacctctgagtccgccacccccgagagcggccctggcacctccaccgagcccagcgagggcagcgcacccggcagccctgccggcagccccacctccacagaggagggaaccagcaccgagcccagcgaaggcagcgccccaggcaccagcaccgagcctagtgagcaggagattaaacggatcaacaagatcagaagaagacttgtgaaagacagcaacaccaagaaggccggcaagacaggccccatgaaaaccctgctggttagagtgatgacacccgatctgagagagcggctggaaaacctgagaaagaagcctgaaaatatcccccagcccatcagcaatacatctagagccaacctgaataagctgctgaccgattacaccgaaatgaagaaggcgatcctgcatgtgtactgggaagagttccagaaggaccctgtgggcctgatgagccgggtggcccagcctgccagcaagaagatcgatcagaacaagctgaaacctgagatggacgagaagggcaacctgaccaccgccggctttgcctgctctcagtgtggccagcccctgttcgtgtacaagctggagcaggtgtctgagaagggcaaggcttacaccaactacttcggacggtgcaatgtggccgagcacgaaaagctgatcctgctggcccagctgaagcccgagaaggatagcgacgaagccgtgacatatagcctgggaaagtttgggcagagggccctggatttctacagcattcatgtgaccaaggagtccacccaccccgtgaagcccctggcccagatcgccggaaacagatacgcctccggacctgtgggaaaggccctgagcgacgcatgtatgggcacaatcgcctccttcctgtctaagtaccaggacatcatcatcgaacaccagaaggtggtgaagggcaaccagaagagactggagagcctgcgggagctggccggcaaggaaaacctggaataccctagcgtgaccctgccacctcagcctcacaccaaggagggcgttgatgcctacaacgaagtgatcgcccgggtgcgaatgtgggtgaacctgaacctgtggcagaagctgaagctaagcagagatgatgccaagcctctgctgagactgaagggattcccttcctttcctctggtcgagagacaggccaacgaagtggactggtgggacatggtgtgtaacgtgaagaagctgatcaacgagaaaaaggaggatggcaaggtgttttggcagaatctggctggctacaagagacaggaagccctgagaccatacctgagcagcgaggaagatcggaagaagggaaagaaattcgctcggtaccagctgggcgacctgctgctgcacctggaaaagaagcacggcgaggactggggaaaggtgtacgacgaggcctgggagcggattgacaagaaagtggaaggcctgagcaagcacatcaagctggaagaggaacggagaagcgaggacgcccagagcaaggccgccctgaccgactggctgcgggctaaggccagcttcgtgatcgagggcctgaaggaggccgacaaggacgagttctgcagatgcgagctgaagctgcagaagtggtacggggacctgcggggaaagcccttcgccatcgaagccgagaacagcatcctggacatcagcggcttcagcaagcagtacaactgtgccttcatctggcagaaggacggcgtgaagaagctgaacctgtacctgatcatcaactacttcaagggcggcaagctgcggttcaagaagatcaaacctgaagccttcgaagccaacagattctacaccgtgatcaacaaaaagagcggcgagatcgtgcccatggaggtgaacttcaacttcgacgaccccaacctgatcatcctgcctctggcctttggcaagagacagggcagagaattcatctggaacgacctgctgtccctggaaaccggcagcctgaagctggccaacggaagagtgatcgagaagacactgtacaacagaagaacccggcaggatgagcctgccctgttcgtggccctgaccttcgagcggcgggaggtcctggactcctccaatatcaaaccaatgaacctgatcggcgtggcaagaggcgaaaacatccccgccgtgatcgccctgaccgaccccgagggctgcccactgagccggtttaaggatagcctgggaaacccaacccacatcctgagaatcggcgagagctataaggagaagcagcggaccatccaggccaagaaggaggtggagcagcggagagccggcggctacagccggaagtacgccagcaaagccaagaatctggcagacgatatggtgagaaacaccgctagagatctgctgtactacgccgtgacccaggatgccatgctgatcttcgccaacctgagccggggcttcggccggcagggcaagcggaccttcatggccgagagacagtacacacggatggaggactggctgaccgccaagctggcctacgagggcctgagcaagacctacctgtccaagacactggcccagtacacctccaagacatgcagcaactgtgggtttaccatcaccagcgccgactacgacagggtgctggagaagctgaagaagacagcaacaggctggatgaccacaattaacggcaaggagctgaaggtggagggccagattacctactacaacagatacaagagacagaacgtagtcaaggacctgtccgtcgagctggatagactgagcgaagaatctgtgaacaacgacatctcctcctggacaaagggcagaagcggagaagctctgagcctcctgaagaaaagattctcccatagacccgtgcaggagaagttcgtgtgcctgaactgcggcttcgagacacacgcagccgagcaagccgccctgaacatcgccagatcctggctgttcctgcggagccaggagtacaagaaataccagacaaacaagacaaccggcaacaccgataagagagccttcgtcgagacctggcagtccttttaccggaagaagcttaaggaggtgtggaaacctgccgtgcggtctggcggatctggcggaggctcctcaggccgaggtgaccttcgaggacgtggccgtgctgctgagcagggaggagtggggcaggctgggccccgtgcagaagggcctgtacagggacgtgatgctggagacctacaggaacctggtgagcctgggcgccggccccgccggccccaagcccgaggtgatcacccagctggagaggggcgacgagccctgggtgcccgacgtgcagggcagggagaggcccaccatcgacggcagcgccggatctggctccggcagcggccccaagaaaaagagaaaagtctaagctgccttctgcggggcttgccttctggccatgcccttcttctctcccttgcacctgtacctcttggtctttgaataaagcctgagtaggaaggctagcaaaaaaaaaaaaaaaaaaaaaaaaaaaaaaaaaaaaaaaaaaaaaaaaaaaaaaaaaaaaaaaaaaaaaaaaaaaaaaaa

SEQ ID NO: 16310 - RNA, 9485 nt, synthetic construct
  source 1..9485: mol_type = other RNA
aggaaataagagagaaaagaagagtaagaagaaatataagagccaccatggcccctaagaagaagcgtaaagtgagccggatggaacgcctcgtctacgaggtgcggcagaagtgcagaaacatcgaggacatctgcatctcctgcggatctctgaacgtgaccctggagcacccactgttcatcggcggcatgtgccagaactgtaaaaactgttttctggagtgtgcctatcaatacgacgatgacggctaccagagctactgcaccatctgttgcggcggaagagaggtgctgatgtgtggaaataacaactgctgccggtgcttctgcgtggaatgcgtggacctgctggtgggccccggcgccgcccaggccgctattaaggaagatccttggaactgctacatgtgcggccacaagggcacatacggcctgctgagacggagagaggactggcctagcagactgcagatgttcttcgccaataaccacgaccaggagttcgacccccctaaggtgtaccctcccgtccccgccgagaagagaaagcccatccgggtcctgagcctgttcgatggcatcgccaccggtctgctggtgctgaaggacctgggcatccaggtggataggtacattgcctccgaggtgtgcgaggactccatcaccgtgggaatggtgcgtcatcagggcaagatcatgtacgtgggcgacgtgcggagcgtgacacagaagcatatccaggagtggggccctttcgacctggtgatcggcggcagcccttgcaatgacctgagcatcgtgaacccagcccggaagggcctgtacgagggaaccggcagactgttcttcgagttttacagactgctgcacgacgcccggcctaaggaaggcgacgaccggcccttcttttggctgttcgagaatgtggtggccatgggagtcagcgacaagcgggatattagccggttcctggagagcaaccccgtgatgatcgatgccaaggaagtgagcgccgcccaccgggccagatacttctggggcaatctgcctggcatgaacagacccctggccagcaccgtgaacgacaagctggagctgcaggagtgcctggagcacggccggatcgccaagttcagcaaggtgagaaccatcaccacccgaagcaacagcatcaaacaaggcaaggaccagcactttcctgtgttcatgaacgagaaggaggacatcctgtggtgtaccgagatggagagagtgttcgggttcccagtccactacacagatgtcagcaacatgtctagactggccagacagagactgctgggaagaagctggtccgtccctgtgatcagacacctgttcgcccctctgaaggagtacttcgcctgcgtgagcagcggcaacagcaacgccaacagccggggccccagcttctctagcggcctggtgccactgtccctgagagggagccacatgggccccatggagatctacaaaaccgtgagcgcctggaagcggcagcctgtgcgcgtgctgagcctgtttcggaatatcgataaagtcctgaaaagcctgggattcctggagagcggctctggctccggcggtggcaccctgaagtacgtggaggatgtgacaaacgtggtcagacgggatgtggagaagtggggccccttcgatctggtgtacggcagcacccaacccctgggcagctcttgtgaccggtgccctggctggtacatgtttcagttccaccggatcctgcagtacgccctgccgagacaggagtcccagcggccattcttttggattttcatggacaacttgctgctgaccgaggatgaccaggaaactaccactcggttcctgcagaccgaagccgtgaccctgcaggacgtgagaggccgggactaccagaacgccatgcgggtgtggtccaacatccctggactgaaaagcaagcacgcacctctgacccctaaagaagaggagtacctgcaggcccaggtgcggagcagaagcaagctggacgcccctaaggtggatctgctggtgaagaattgcctcctgcccctgagagagtacttcaagtatttcagccagaatagtctgcccctgggaggcagcggcggcggcgccctggtgacatttgaggacgtcgccgtgcggttcacccaggaggaatgggctctgctggatccttctcagaaaatcctgtaccgggacgtgatgagagagacataccggaatctgacctccgtgggcatcaactgggaatgttgggaccttgaagcctgcttcagaagcctgggaagaaacctgagagtgcaggtggtgaagagaaagtgcgagctgaccaacagcggcccctgcgccgagggcggcccaagcagcggcgcccctcctcccagcggcggcagcccagccggctccccaacctctaccgaggagggcacctctgagtccgccacccccgagagcggccctggcacctccaccgagcccagcgagggcagcgcacccggcagccctgccggcagccccacctccacagaggagggaaccagcaccgagcccagcgaaggcagcgccccaggcaccagcaccgagcctagtgagcaggagattaaacggatcaacaagatcagaagaagacttgtgaaagacagcaacaccaagaaggccggcaagacaggccccatgaaaaccctgctggttagagtgatgacacccgatctgagagagcggctggaaaacctgagaaagaagcctgaaaatatcccccagcccatcagcaatacatctagagccaacctgaataagctgctgaccgattacaccgaaatgaagaaggcgatcctgcatgtgtactgggaagagttccagaaggaccctgtgggcctgatgagccgggtggcccagcctgccagcaagaagatcgatcagaacaagctgaaacctgagatggacgagaagggcaacctgaccaccgccggctttgcctgctctcagtgtggccagcccctgttcgtgtacaagctggagcaggtgtctgagaagggcaaggcttacaccaactacttcggacggtgcaatgtggccgagcacgaaaagctgatcctgctggcccagctgaagcccgagaaggatagcgacgaagccgtgacatatagcctgggaaagtttgggcagagggccctggatttctacagcattcatgtgaccaaggagtccacccaccccgtgaagcccctggcccagatcgccggaaacagatacgcctccggacctgtgggaaaggccctgagcgacgcatgtatgggcacaatcgcctccttcctgtctaagtaccaggacatcatcatcgaacaccagaaggtggtgaagggcaaccagaagagactggagagcctgcgggagctggccggcaaggaaaacctggaataccctagcgtgaccctgccacctcagcctcacaccaaggagggcgttgatgcctacaacgaagtgatcgcccgggtgcgaatgtgggtgaacctgaacctgtggcagaagctgaagctaagcagagatgatgccaagcctctgctgagactgaagggattcccttcctttcctctggtcgagagacaggccaacgaagtggactggtgggacatggtgtgtaacgtgaagaagctgatcaacgagaaaaaggaggatggcaaggtgttttggcagaatctggctggctacaagagacaggaagccctgagaccatacctgagcagcgaggaagatcggaagaagggaaagaaattcgctcggtaccagctgggcgacctgctgctgcacctggaaaagaagcacggcgaggactggggaaaggtgtacgacgaggcctgggagcggattgacaagaaagtggaaggcctgagcaagcacatcaagctggaagaggaacggagaagcgaggacgcccagagcaaggccgccctgaccgactggctgcgggctaaggccagcttcgtgatcgagggcctgaaggaggccgacaaggacgagttctgcagatgcgagctgaagctgcagaagtggtacggggacctgcggggaaagcccttcgccatcgaagccgagaacagcatcctggacatcagcggcttcagcaagcagtacaactgtgccttcatctggcagaaggacggcgtgaagaagctgaacctgtacctgatcatcaactacttcaagggcggcaagctgcggttcaagaagatcaaacctgaagccttcgaagccaacagattctacaccgtgatcaacaaaaagagcggcgagatcgtgcccatggaggtgaacttcaacttcgacgaccccaacctgatcatcctgcctctggcctttggcaagagacagggcagagaattcatctggaacgacctgctgtccctggaaaccggcagcctgaagctggccaacggaagagtgatcgagaagacactgtacaacagaagaacccggcaggatgagcctgccctgttcgtggccctgaccttcgagcggcgggaggtcctggactcctccaatatcaaaccaatgaacctgatcggcgtggcaagaggcgaaaacatccccgccgtgatcgccctgaccgaccccgagggctgcccactgagccggtttaaggatagcctgggaaacccaacccacatcctgagaatcggcgagagctataaggagaagcagcggaccatccaggccaagaaggaggtggagcagcggagagccggcggctacagccggaagtacgccagcaaagccaagaatctggcagacgatatggtgagaaacaccgctagagatctgctgtactacgccgtgacccaggatgccatgctgatcttcgccaacctgagccggggcttcggccggcagggcaagcggaccttcatggccgagagacagtacacacggatggaggactggctgaccgccaagctggcctacgagggcctgagcaagacctacctgtccaagacactggcccagtacacctccaagacatgcagcaactgtgggtttaccatcaccagcgccgactacgacagggtgctggagaagctgaagaagacagcaacaggctggatgaccacaattaacggcaaggagctgaaggtggagggccagattacctactacaacagatacaagagacagaacgtagtcaaggacctgtccgtcgagctggatagactgagcgaagaatctgtgaacaacgacatctcctcctggacaaagggcagaagcggagaagctctgagcctcctgaagaaaagattctcccatagacccgtgcaggagaagttcgtgtgcctgaactgcggcttcgagacacacgcagccgagcaagccgccctgaacatcgccagatcctggctgttcctgcggagccaggagtacaagaaataccagacaaacaagacaaccggcaacaccgataagagagccttcgtcgagacctggcagtccttttaccggaagaagcttaaggaggtgtggaaacctgccgtgcggtctggcggatctggcggaggctccccccaggtgctggtgagcttcgaggaggtggccgtgctgctgagccaggaggagtggggcaggctgagccccgcccagaagggcctgtacagggacgtgatgatggagacctacggcaacctggtgagcctgggcctgcagggcagcaagcccgacgtgatcagcaagctggagcagggcaaggagccctgggccccccacagccccaggatcgagggcagctggatctggaggaggaggaggggcggcccaagcagcggcgcccctcctcccagcggcggcagcccagccggctccccaacctctaccgaggagggcacctctgagtccgccacccccgagagcggccctggcacctccaccgagcccagcgagggcagcgcacccggcagccctgccggcagccccacctccacagaggagggaaccagcaccgagcccagcgaaggcagcgccccaggcaccagcaccgagcctagtgagcaggagattaaacggatcaacaagatcagaagaagacttgtgaaagacagcaacaccaagaaggccggcaagacaggccccatgaaaaccctgctggttagagtgatgacacccgatctgagagagcggctggaaaacctgagaaagaagcctgaaaatatcccccagcccatcagcaatacatctagagccaacctgaataagctgctgaccgattacaccgaaatgaagaaggcgatcctgcatgtgtactgggaagagttccagaaggaccctgtgggcctgatgagccgggtggcccagcctgccagcaagaagatcgatcagaacaagctgaaacctgagatggacgagaagggcaacctgaccaccgccggctttgcctgctctcagtgtggccagcccctgttcgtgtacaagctggagcaggtgtctgagaagggcaaggcttacaccaactacttcggacggtgcaatgtggccgagcacgaaaagctgatcctgctggcccagctgaagcccgagaaggatagcgacgaagccgtgacatatagcctgggaaagtttgggcagagggccctggatttctacagcattcatgtgaccaaggagtccacccaccccgtgaagcccctggcccagatcgccggaaacagatacgcctccggacctgtgggaaaggccctgagcgacgcatgtatgggcacaatcgcctccttcctgtctaagtaccaggacatcatcatcgaacaccagaaggtggtgaagggcaaccagaagagactggagagcctgcgggagctggccggcaaggaaaacctggaataccctagcgtgaccctgccacctcagcctcacaccaaggagggcgttgatgcctacaacgaagtgatcgcccgggtgcgaatgtgggtgaacctgaacctgtggcagaagctgaagctaagcagagatgatgccaagcctctgctgagactgaagggattcccttcctttcctctggtcgagagacaggccaacgaagtggactggtgggacatggtgtgtaacgtgaagaagctgatcaacgagaaaaaggaggatggcaaggtgttttggcagaatctggctggctacaagagacaggaagccctgagaccatacctgagcagcgaggaagatcggaagaagggaaagaaattcgctcggtaccagctgggcgacctgctgctgcacctggaaaagaagcacggcgaggactggggaaaggtgtacgacgaggcctgggagcggattgacaagaaagtggaaggcctgagcaagcacatcaagctggaagaggaacggagaagcgaggacgcccagagcaaggccgccctgaccgactggctgcgggctaaggccagcttcgtgatcgagggcctgaaggaggccgacaaggacgagttctgcagatgcgagctgaagctgcagaagtggtacggggacctgcggggaaagcccttcgccatcgaagccgagaacagcatcctggacatcagcggcttcagcaagcagtacaactgtgccttcatctggcagaaggacggcgtgaagaagctgaacctgtacctgatcatcaactacttcaagggcggcaagctgcggttcaagaagatcaaacctgaagccttcgaagccaacagattctacaccgtgatcaacaaaaagagcggcgagatcgtgcccatggaggtgaacttcaacttcgacgaccccaacctgatcatcctgcctctggcctttggcaagagacagggcagagaattcatctggaacgacctgctgtccctggaaaccggcagcctgaagctggccaacggaagagtgatcgagaagacactgtacaacagaagaacccggcaggatgagcctgccctgttcgtggccctgaccttcgagcggcgggaggtcctggactcctccaatatcaaaccaatgaacctgatcggcgtggcaagaggcgaaaacatccccgccgtgatcgccctgaccgaccccgagggctgcccactgagccggtttaaggatagcctgggaaacccaacccacatcctgagaatcggcgagagctataaggagaagcagcggaccatccaggccaagaaggaggtggagcagcggagagccggcggctacagccggaagtacgccagcaaagccaagaatctggcagacgatatggtgagaaacaccgctagagatctgctgtactacgccgtgacccaggatgccatgctgatcttcgccaacctgagccggggcttcggccggcagggcaagcggaccttcatggccgagagacagtacacacggatggaggactggctgaccgccaagctggcctacgagggcctgagcaagacctacctgtccaagacactggcccagtacacctccaagacatgcagcaactgtgggtttaccatcaccagcgccgactacgacagggtgctggagaagctgaagaagacagcaacaggctggatgaccacaattaacggcaaggagctgaaggtggagggccagattacctactacaacagatacaagagacagaacgtagtcaaggacctgtccgtcgagctggatagactgagcgaagaatctgtgaacaacgacatctcctcctggacaaagggcagaagcggagaagctctgagcctcctgaagaaaagattctcccatagacccgtgcaggagaagttcgtgtgcctgaactgcggcttcgagacacacgcagccgagcaagccgccctgaacatcgccagatcctggctgttcctgcggagccaggagtacaagaaataccagacaaacaagacaaccggcaacaccgataagagagccttcgtcgagacctggcagtccttttaccggaagaagcttaaggaggtgtggaaacctgccgtgcggtctggcggatctggcggaggctcctccccaggtgctggtgagcttcgaggaggtggccgtgctgctgagccaggaggagtggggcaggctgagccccgcccagaagggcctgtacagggacgtgatgatggagacctacggcaacctggtgagcctgggcctgcagggcagcaagcccgacgtgatcagcaagctggagcagggcaaggagccctgggccccccacagccccaggatcgagggcagctggatctggaggaggaggaggggatctggctccggcagcggccccaagaaaaagagaaaagtctaagctgccttctgcggggcttgccttctggccatgcccttcttctctcccttgcacctgtacctcttggtctttgaataaagcctgagtaggaaggctagcaaaaaaaaaaaaaaaaaaaaaaaaaaaaaaaaaaaaaaaaaaaaaaaaaaaaaaaaaaaaaaaaaaaaaaaaaaaaaaaa

SEQ ID NO: 16311 - RNA, 9485 nt, synthetic construct
  source 1..9485: mol_type = other RNA
aggaaataagagagaaaagaagagtaagaagaaatataagagccaccatggcccctaagaagaagcgtaaagtgagccggatggaacgcctcgtctacgaggtgcggcagaagtgcagaaacatcgaggacatctgcatctcctgcggatctctgaacgtgaccctggagcacccactgttcatcggcggcatgtgccagaactgtaaaaactgttttctggagtgtgcctatcaatacgacgatgacggctaccagagctactgcaccatctgttgcggcggaagagaggtgctgatgtgtggaaataacaactgctgccggtgcttctgcgtggaatgcgtggacctgctggtgggccccggcgccgcccaggccgctattaaggaagatccttggaactgctacatgtgcggccacaagggcacatacggcctgctgagacggagagaggactggcctagcagactgcagatgttcttcgccaataaccacgaccaggagttcgacccccctaaggtgtaccctcccgtccccgccgagaagagaaagcccatccgggtcctgagcctgttcgatggcatcgccaccggtctgctggtgctgaaggacctgggcatccaggtggataggtacattgcctccgaggtgtgcgaggactccatcaccgtgggaatggtgcgtcatcagggcaagatcatgtacgtgggcgacgtgcggagcgtgacacagaagcatatccaggagtggggccctttcgacctggtgatcggcggcagcccttgcaatgacctgagcatcgtgaacccagcccggaagggcctgtacgagggaaccggcagactgttcttcgagttttacagactgctgcacgacgcccggcctaaggaaggcgacgaccggcccttcttttggctgttcgagaatgtggtggccatgggagtcagcgacaagcgggatattagccggttcctggagagcaaccccgtgatgatcgatgccaaggaagtgagcgccgcccaccgggccagatacttctggggcaatctgcctggcatgaacagacccctggccagcaccgtgaacgacaagctggagctgcaggagtgcctggagcacggccggatcgccaagttcagcaaggtgagaaccatcaccacccgaagcaacagcatcaaacaaggcaaggaccagcactttcctgtgttcatgaacgagaaggaggacatcctgtggtgtaccgagatggagagagtgttcgggttcccagtccactacacagatgtcagcaacatgtctagactggccagacagagactgctgggaagaagctggtccgtccctgtgatcagacacctgttcgcccctctgaaggagtacttcgcctgcgtgagcagcggcaacagcaacgccaacagccggggccccagcttctctagcggcctggtgccactgtccctgagagggagccacatgggccccatggagatctacaaaaccgtgagcgcctggaagcggcagcctgtgcgcgtgctgagcctgtttcggaatatcgataaagtcctgaaaagcctgggattcctggagagcggctctggctccggcggtggcaccctgaagtacgtggaggatgtgacaaacgtggtcagacgggatgtggagaagtggggccccttcgatctggtgtacggcagcacccaacccctgggcagctcttgtgaccggtgccctggctggtacatgtttcagttccaccggatcctgcagtacgccctgccgagacaggagtcccagcggccattcttttggattttcatggacaacttgctgctgaccgaggatgaccaggaaactaccactcggttcctgcagaccgaagccgtgaccctgcaggacgtgagaggccgggactaccagaacgccatgcgggtgtggtccaacatccctggactgaaaagcaagcacgcacctctgacccctaaagaagaggagtacctgcaggcccaggtgcggagcagaagcaagctggacgcccctaaggtggatctgctggtgaagaattgcctcctgcccctgagagagtacttcaagtatttcagccagaatagtctgcccctgggaggcagcggcggcggcgccctggtgacatttgaggacgtcgccgtgcggttcacccaggaggaatgggctctgctggatccttctcagaaaatcctgtaccgggacgtgatgagagagacataccggaatctgacctccgtgggcatcaactgggaatgttgggaccttgaagcctgcttcagaagcctgggaagaaacctgagagtgcaggtggtgaagagaaagtgcgagctgaccaacagcggcccctgcgccgagggcggcccaagcagcggcgcccctcctcccagcggcggcagcccagccggctccccaacctctaccgaggagggcacctctgagtccgccacccccgagagcggccctggcacctccaccgagcccagcgagggcagcgcacccggcagccctgccggcagccccacctccacagaggagggaaccagcaccgagcccagcgaaggcagcgccccaggcaccagcaccgagcctagtgagcaggagattaaacggatcaacaagatcagaagaagacttgtgaaagacagcaacaccaagaaggccggcaagacaggccccatgaaaaccctgctggttagagtgatgacacccgatctgagagagcggctggaaaacctgagaaagaagcctgaaaatatcccccagcccatcagcaatacatctagagccaacctgaataagctgctgaccgattacaccgaaatgaagaaggcgatcctgcatgtgtactgggaagagttccagaaggaccctgtgggcctgatgagccgggtggcccagcctgccagcaagaagatcgatcagaacaagctgaaacctgagatggacgagaagggcaacctgaccaccgccggctttgcctgctctcagtgtggccagcccctgttcgtgtacaagctggagcaggtgtctgagaagggcaaggcttacaccaactacttcggacggtgcaatgtggccgagcacgaaaagctgatcctgctggcccagctgaagcccgagaaggatagcgacgaagccgtgacatatagcctgggaaagtttgggcagagggccctggatttctacagcattcatgtgaccaaggagtccacccaccccgtgaagcccctggcccagatcgccggaaacagatacgcctccggacctgtgggaaaggccctgagcgacgcatgtatgggcacaatcgcctccttcctgtctaagtaccaggacatcatcatcgaacaccagaaggtggtgaagggcaaccagaagagactggagagcctgcgggagctggccggcaaggaaaacctggaataccctagcgtgaccctgccacctcagcctcacaccaaggagggcgttgatgcctacaacgaagtgatcgcccgggtgcgaatgtgggtgaacctgaacctgtggcagaagctgaagctaagcagagatgatgccaagcctctgctgagactgaagggattcccttcctttcctctggtcgagagacaggccaacgaagtggactggtgggacatggtgtgtaacgtgaagaagctgatcaacgagaaaaaggaggatggcaaggtgttttggcagaatctggctggctacaagagacaggaagccctgagaccatacctgagcagcgaggaagatcggaagaagggaaagaaattcgctcggtaccagctgggcgacctgctgctgcacctggaaaagaagcacggcgaggactggggaaaggtgtacgacgaggcctgggagcggattgacaagaaagtggaaggcctgagcaagcacatcaagctggaagaggaacggagaagcgaggacgcccagagcaaggccgccctgaccgactggctgcgggctaaggccagcttcgtgatcgagggcctgaaggaggccgacaaggacgagttctgcagatgcgagctgaagctgcagaagtggtacggggacctgcggggaaagcccttcgccatcgaagccgagaacagcatcctggacatcagcggcttcagcaagcagtacaactgtgccttcatctggcagaaggacggcgtgaagaagctgaacctgtacctgatcatcaactacttcaagggcggcaagctgcggttcaagaagatcaaacctgaagccttcgaagccaacagattctacaccgtgatcaacaaaaagagcggcgagatcgtgcccatggaggtgaacttcaacttcgacgaccccaacctgatcatcctgcctctggcctttggcaagagacagggcagagaattcatctggaacgacctgctgtccctggaaaccggcagcctgaagctggccaacggaagagtgatcgagaagacactgtacaacagaagaacccggcaggatgagcctgccctgttcgtggccctgaccttcgagcggcgggaggtcctggactcctccaatatcaaaccaatgaacctgatcggcgtggcaagaggcgaaaacatccccgccgtgatcgccctgaccgaccccgagggctgcccactgagccggtttaaggatagcctgggaaacccaacccacatcctgagaatcggcgagagctataaggagaagcagcggaccatccaggccaagaaggaggtggagcagcggagagccggcggctacagccggaagtacgccagcaaagccaagaatctggcagacgatatggtgagaaacaccgctagagatctgctgtactacgccgtgacccaggatgccatgctgatcttcgccaacctgagccggggcttcggccggcagggcaagcggaccttcatggccgagagacagtacacacggatggaggactggctgaccgccaagctggcctacgagggcctgagcaagacctacctgtccaagacactggcccagtacacctccaagacatgcagcaactgtgggtttaccatcaccagcgccgactacgacagggtgctggagaagctgaagaagacagcaacaggctggatgaccacaattaacggcaaggagctgaaggtggagggccagattacctactacaacagatacaagagacagaacgtagtcaaggacctgtccgtcgagctggatagactgagcgaagaatctgtgaacaacgacatctcctcctggacaaagggcagaagcggagaagctctgagcctcctgaagaaaagattctcccatagacccgtgcaggagaagttcgtgtgcctgaactgcggcttcgagacacacgcagccgagcaagccgccctgaacatcgccagatcctggctgttcctgcggagccaggagtacaagaaataccagacaaacaagacaaccggcaacaccgataagagagccttcgtcgagacctggcagtccttttaccggaagaagcttaaggaggtgtggaaacctgccgtgcggtctggcggatctggcggaggctccatgatcgagtaccagatccccgtgagcttcaaggacgtggtggtgggcttcacccaggaggagtggcacaggctgagccccgcccagagggccctgtacagggacgtgatgctggagacctacagcaacctggtgagcgtgggctacgagggcaccaagcccgacgtgatcctgaggctggagcaggaggaggccccctggatcggcgaggccgcctgccccggctgccactgctggggcaagggcggcccaagcagcggcgcccctcctcccagcggcggcagcccagccggctccccaacctctaccgaggagggcacctctgagtccgccacccccgagagcggccctggcacctccaccgagcccagcgagggcagcgcacccggcagccctgccggcagccccacctccacagaggagggaaccagcaccgagcccagcgaaggcagcgccccaggcaccagcaccgagcctagtgagcaggagattaaacggatcaacaagatcagaagaagacttgtgaaagacagcaacaccaagaaggccggcaagacaggccccatgaaaaccctgctggttagagtgatgacacccgatctgagagagcggctggaaaacctgagaaagaagcctgaaaatatcccccagcccatcagcaatacatctagagccaacctgaataagctgctgaccgattacaccgaaatgaagaaggcgatcctgcatgtgtactgggaagagttccagaaggaccctgtgggcctgatgagccgggtggcccagcctgccagcaagaagatcgatcagaacaagctgaaacctgagatggacgagaagggcaacctgaccaccgccggctttgcctgctctcagtgtggccagcccctgttcgtgtacaagctggagcaggtgtctgagaagggcaaggcttacaccaactacttcggacggtgcaatgtggccgagcacgaaaagctgatcctgctggcccagctgaagcccgagaaggatagcgacgaagccgtgacatatagcctgggaaagtttgggcagagggccctggatttctacagcattcatgtgaccaaggagtccacccaccccgtgaagcccctggcccagatcgccggaaacagatacgcctccggacctgtgggaaaggccctgagcgacgcatgtatgggcacaatcgcctccttcctgtctaagtaccaggacatcatcatcgaacaccagaaggtggtgaagggcaaccagaagagactggagagcctgcgggagctggccggcaaggaaaacctggaataccctagcgtgaccctgccacctcagcctcacaccaaggagggcgttgatgcctacaacgaagtgatcgcccgggtgcgaatgtgggtgaacctgaacctgtggcagaagctgaagctaagcagagatgatgccaagcctctgctgagactgaagggattcccttcctttcctctggtcgagagacaggccaacgaagtggactggtgggacatggtgtgtaacgtgaagaagctgatcaacgagaaaaaggaggatggcaaggtgttttggcagaatctggctggctacaagagacaggaagccctgagaccatacctgagcagcgaggaagatcggaagaagggaaagaaattcgctcggtaccagctgggcgacctgctgctgcacctggaaaagaagcacggcgaggactggggaaaggtgtacgacgaggcctgggagcggattgacaagaaagtggaaggcctgagcaagcacatcaagctggaagaggaacggagaagcgaggacgcccagagcaaggccgccctgaccgactggctgcgggctaaggccagcttcgtgatcgagggcctgaaggaggccgacaaggacgagttctgcagatgcgagctgaagctgcagaagtggtacggggacctgcggggaaagcccttcgccatcgaagccgagaacagcatcctggacatcagcggcttcagcaagcagtacaactgtgccttcatctggcagaaggacggcgtgaagaagctgaacctgtacctgatcatcaactacttcaagggcggcaagctgcggttcaagaagatcaaacctgaagccttcgaagccaacagattctacaccgtgatcaacaaaaagagcggcgagatcgtgcccatggaggtgaacttcaacttcgacgaccccaacctgatcatcctgcctctggcctttggcaagagacagggcagagaattcatctggaacgacctgctgtccctggaaaccggcagcctgaagctggccaacggaagagtgatcgagaagacactgtacaacagaagaacccggcaggatgagcctgccctgttcgtggccctgaccttcgagcggcgggaggtcctggactcctccaatatcaaaccaatgaacctgatcggcgtggcaagaggcgaaaacatccccgccgtgatcgccctgaccgaccccgagggctgcccactgagccggtttaaggatagcctgggaaacccaacccacatcctgagaatcggcgagagctataaggagaagcagcggaccatccaggccaagaaggaggtggagcagcggagagccggcggctacagccggaagtacgccagcaaagccaagaatctggcagacgatatggtgagaaacaccgctagagatctgctgtactacgccgtgacccaggatgccatgctgatcttcgccaacctgagccggggcttcggccggcagggcaagcggaccttcatggccgagagacagtacacacggatggaggactggctgaccgccaagctggcctacgagggcctgagcaagacctacctgtccaagacactggcccagtacacctccaagacatgcagcaactgtgggtttaccatcaccagcgccgactacgacagggtgctggagaagctgaagaagacagcaacaggctggatgaccacaattaacggcaaggagctgaaggtggagggccagattacctactacaacagatacaagagacagaacgtagtcaaggacctgtccgtcgagctggatagactgagcgaagaatctgtgaacaacgacatctcctcctggacaaagggcagaagcggagaagctctgagcctcctgaagaaaagattctcccatagacccgtgcaggagaagttcgtgtgcctgaactgcggcttcgagacacacgcagccgagcaagccgccctgaacatcgccagatcctggctgttcctgcggagccaggagtacaagaaataccagacaaacaagacaaccggcaacaccgataagagagccttcgtcgagacctggcagtccttttaccggaagaagcttaaggaggtgtggaaacctgccgtgcggtctggcggatctggcggaggctcctatgatcgagtaccagatccccgtgagcttcaaggacgtggtggtgggcttcacccaggaggagtggcacaggctgagccccgcccagagggccctgtacagggacgtgatgctggagacctacagcaacctggtgagcgtgggctacgagggcaccaagcccgacgtgatcctgaggctggagcaggaggaggccccctggatcggcgaggccgcctgccccggctgccactgctggggcaagggatctggctccggcagcggccccaagaaaaagagaaaagtctaagctgccttctgcggggcttgccttctggccatgcccttcttctctcccttgcacctgtacctcttggtctttgaataaagcctgagtaggaaggctagcaaaaaaaaaaaaaaaaaaaaaaaaaaaaaaaaaaaaaaaaaaaaaaaaaaaaaaaaaaaaaaaaaaaaaaaaaaaaaaaa

SEQ ID NO: 16312 - RNA, 9485 nt, synthetic construct
  source 1..9485: mol_type = other RNA
aggaaataagagagaaaagaagagtaagaagaaatataagagccaccatggcccctaagaagaagcgtaaagtgagccggatggaacgcctcgtctacgaggtgcggcagaagtgcagaaacatcgaggacatctgcatctcctgcggatctctgaacgtgaccctggagcacccactgttcatcggcggcatgtgccagaactgtaaaaactgttttctggagtgtgcctatcaatacgacgatgacggctaccagagctactgcaccatctgttgcggcggaagagaggtgctgatgtgtggaaataacaactgctgccggtgcttctgcgtggaatgcgtggacctgctggtgggccccggcgccgcccaggccgctattaaggaagatccttggaactgctacatgtgcggccacaagggcacatacggcctgctgagacggagagaggactggcctagcagactgcagatgttcttcgccaataaccacgaccaggagttcgacccccctaaggtgtaccctcccgtccccgccgagaagagaaagcccatccgggtcctgagcctgttcgatggcatcgccaccggtctgctggtgctgaaggacctgggcatccaggtggataggtacattgcctccgaggtgtgcgaggactccatcaccgtgggaatggtgcgtcatcagggcaagatcatgtacgtgggcgacgtgcggagcgtgacacagaagcatatccaggagtggggccctttcgacctggtgatcggcggcagcccttgcaatgacctgagcatcgtgaacccagcccggaagggcctgtacgagggaaccggcagactgttcttcgagttttacagactgctgcacgacgcccggcctaaggaaggcgacgaccggcccttcttttggctgttcgagaatgtggtggccatgggagtcagcgacaagcgggatattagccggttcctggagagcaaccccgtgatgatcgatgccaaggaagtgagcgccgcccaccgggccagatacttctggggcaatctgcctggcatgaacagacccctggccagcaccgtgaacgacaagctggagctgcaggagtgcctggagcacggccggatcgccaagttcagcaaggtgagaaccatcaccacccgaagcaacagcatcaaacaaggcaaggaccagcactttcctgtgttcatgaacgagaaggaggacatcctgtggtgtaccgagatggagagagtgttcgggttcccagtccactacacagatgtcagcaacatgtctagactggccagacagagactgctgggaagaagctggtccgtccctgtgatcagacacctgttcgcccctctgaaggagtacttcgcctgcgtgagcagcggcaacagcaacgccaacagccggggccccagcttctctagcggcctggtgccactgtccctgagagggagccacatgggccccatggagatctacaaaaccgtgagcgcctggaagcggcagcctgtgcgcgtgctgagcctgtttcggaatatcgataaagtcctgaaaagcctgggattcctggagagcggctctggctccggcggtggcaccctgaagtacgtggaggatgtgacaaacgtggtcagacgggatgtggagaagtggggccccttcgatctggtgtacggcagcacccaacccctgggcagctcttgtgaccggtgccctggctggtacatgtttcagttccaccggatcctgcagtacgccctgccgagacaggagtcccagcggccattcttttggattttcatggacaacttgctgctgaccgaggatgaccaggaaactaccactcggttcctgcagaccgaagccgtgaccctgcaggacgtgagaggccgggactaccagaacgccatgcgggtgtggtccaacatccctggactgaaaagcaagcacgcacctctgacccctaaagaagaggagtacctgcaggcccaggtgcggagcagaagcaagctggacgcccctaaggtggatctgctggtgaagaattgcctcctgcccctgagagagtacttcaagtatttcagccagaatagtctgcccctgggaggcagcggcggcggcgccctggtgacatttgaggacgtcgccgtgcggttcacccaggaggaatgggctctgctggatccttctcagaaaatcctgtaccgggacgtgatgagagagacataccggaatctgacctccgtgggcatcaactgggaatgttgggaccttgaagcctgcttcagaagcctgggaagaaacctgagagtgcaggtggtgaagagaaagtgcgagctgaccaacagcggcccctgcgccgagggcggcccaagcagcggcgcccctcctcccagcggcggcagcccagccggctccccaacctctaccgaggagggcacctctgagtccgccacccccgagagcggccctggcacctccaccgagcccagcgagggcagcgcacccggcagccctgccggcagccccacctccacagaggagggaaccagcaccgagcccagcgaaggcagcgccccaggcaccagcaccgagcctagtgagcaggagattaaacggatcaacaagatcagaagaagacttgtgaaagacagcaacaccaagaaggccggcaagacaggccccatgaaaaccctgctggttagagtgatgacacccgatctgagagagcggctggaaaacctgagaaagaagcctgaaaatatcccccagcccatcagcaatacatctagagccaacctgaataagctgctgaccgattacaccgaaatgaagaaggcgatcctgcatgtgtactgggaagagttccagaaggaccctgtgggcctgatgagccgggtggcccagcctgccagcaagaagatcgatcagaacaagctgaaacctgagatggacgagaagggcaacctgaccaccgccggctttgcctgctctcagtgtggccagcccctgttcgtgtacaagctggagcaggtgtctgagaagggcaaggcttacaccaactacttcggacggtgcaatgtggccgagcacgaaaagctgatcctgctggcccagctgaagcccgagaaggatagcgacgaagccgtgacatatagcctgggaaagtttgggcagagggccctggatttctacagcattcatgtgaccaaggagtccacccaccccgtgaagcccctggcccagatcgccggaaacagatacgcctccggacctgtgggaaaggccctgagcgacgcatgtatgggcacaatcgcctccttcctgtctaagtaccaggacatcatcatcgaacaccagaaggtggtgaagggcaaccagaagagactggagagcctgcgggagctggccggcaaggaaaacctggaataccctagcgtgaccctgccacctcagcctcacaccaaggagggcgttgatgcctacaacgaagtgatcgcccgggtgcgaatgtgggtgaacctgaacctgtggcagaagctgaagctaagcagagatgatgccaagcctctgctgagactgaagggattcccttcctttcctctggtcgagagacaggccaacgaagtggactggtgggacatggtgtgtaacgtgaagaagctgatcaacgagaaaaaggaggatggcaaggtgttttggcagaatctggctggctacaagagacaggaagccctgagaccatacctgagcagcgaggaagatcggaagaagggaaagaaattcgctcggtaccagctgggcgacctgctgctgcacctggaaaagaagcacggcgaggactggggaaaggtgtacgacgaggcctgggagcggattgacaagaaagtggaaggcctgagcaagcacatcaagctggaagaggaacggagaagcgaggacgcccagagcaaggccgccctgaccgactggctgcgggctaaggccagcttcgtgatcgagggcctgaaggaggccgacaaggacgagttctgcagatgcgagctgaagctgcagaagtggtacggggacctgcggggaaagcccttcgccatcgaagccgagaacagcatcctggacatcagcggcttcagcaagcagtacaactgtgccttcatctggcagaaggacggcgtgaagaagctgaacctgtacctgatcatcaactacttcaagggcggcaagctgcggttcaagaagatcaaacctgaagccttcgaagccaacagattctacaccgtgatcaacaaaaagagcggcgagatcgtgcccatggaggtgaacttcaacttcgacgaccccaacctgatcatcctgcctctggcctttggcaagagacagggcagagaattcatctggaacgacctgctgtccctggaaaccggcagcctgaagctggccaacggaagagtgatcgagaagacactgtacaacagaagaacccggcaggatgagcctgccctgttcgtggccctgaccttcgagcggcgggaggtcctggactcctccaatatcaaaccaatgaacctgatcggcgtggcaagaggcgaaaacatccccgccgtgatcgccctgaccgaccccgagggctgcccactgagccggtttaaggatagcctgggaaacccaacccacatcctgagaatcggcgagagctataaggagaagcagcggaccatccaggccaagaaggaggtggagcagcggagagccggcggctacagccggaagtacgccagcaaagccaagaatctggcagacgatatggtgagaaacaccgctagagatctgctgtactacgccgtgacccaggatgccatgctgatcttcgccaacctgagccggggcttcggccggcagggcaagcggaccttcatggccgagagacagtacacacggatggaggactggctgaccgccaagctggcctacgagggcctgagcaagacctacctgtccaagacactggcccagtacacctccaagacatgcagcaactgtgggtttaccatcaccagcgccgactacgacagggtgctggagaagctgaagaagacagcaacaggctggatgaccacaattaacggcaaggagctgaaggtggagggccagattacctactacaacagatacaagagacagaacgtagtcaaggacctgtccgtcgagctggatagactgagcgaagaatctgtgaacaacgacatctcctcctggacaaagggcagaagcggagaagctctgagcctcctgaagaaaagattctcccatagacccgtgcaggagaagttcgtgtgcctgaactgcggcttcgagacacacgcagccgagcaagccgccctgaacatcgccagatcctggctgttcctgcggagccaggagtacaagaaataccagacaaacaagacaaccggcaacaccgataagagagccttcgtcgagacctggcagtccttttaccggaagaagcttaaggaggtgtggaaacctgccgtgcggtctggcggatctggcggaggctccctgcaggaggccgtgaccttcaacgacgtggccatcgacttcagccaggaggagtgggagtggctgaacagcgcccagaggagcctgtacaggaccgtggtgctggagaactacaggaacctggtgagcgtgggcgcctgcatcagcaagcccagcctgatcagcctgctggagcacggcaaggagccctgggaggtgaagggccaggtgaccggcagcagggtgcagggcggcgagagcgtgggcggcccaagcagcggcgcccctcctcccagcggcggcagcccagccggctccccaacctctaccgaggagggcacctctgagtccgccacccccgagagcggccctggcacctccaccgagcccagcgagggcagcgcacccggcagccctgccggcagccccacctccacagaggagggaaccagcaccgagcccagcgaaggcagcgccccaggcaccagcaccgagcctagtgagcaggagattaaacggatcaacaagatcagaagaagacttgtgaaagacagcaacaccaagaaggccggcaagacaggccccatgaaaaccctgctggttagagtgatgacacccgatctgagagagcggctggaaaacctgagaaagaagcctgaaaatatcccccagcccatcagcaatacatctagagccaacctgaataagctgctgaccgattacaccgaaatgaagaaggcgatcctgcatgtgtactgggaagagttccagaaggaccctgtgggcctgatgagccgggtggcccagcctgccagcaagaagatcgatcagaacaagctgaaacctgagatggacgagaagggcaacctgaccaccgccggctttgcctgctctcagtgtggccagcccctgttcgtgtacaagctggagcaggtgtctgagaagggcaaggcttacaccaactacttcggacggtgcaatgtggccgagcacgaaaagctgatcctgctggcccagctgaagcccgagaaggatagcgacgaagccgtgacatatagcctgggaaagtttgggcagagggccctggatttctacagcattcatgtgaccaaggagtccacccaccccgtgaagcccctggcccagatcgccggaaacagatacgcctccggacctgtgggaaaggccctgagcgacgcatgtatgggcacaatcgcctccttcctgtctaagtaccaggacatcatcatcgaacaccagaaggtggtgaagggcaaccagaagagactggagagcctgcgggagctggccggcaaggaaaacctggaataccctagcgtgaccctgccacctcagcctcacaccaaggagggcgttgatgcctacaacgaagtgatcgcccgggtgcgaatgtgggtgaacctgaacctgtggcagaagctgaagctaagcagagatgatgccaagcctctgctgagactgaagggattcccttcctttcctctggtcgagagacaggccaacgaagtggactggtgggacatggtgtgtaacgtgaagaagctgatcaacgagaaaaaggaggatggcaaggtgttttggcagaatctggctggctacaagagacaggaagccctgagaccatacctgagcagcgaggaagatcggaagaagggaaagaaattcgctcggtaccagctgggcgacctgctgctgcacctggaaaagaagcacggcgaggactggggaaaggtgtacgacgaggcctgggagcggattgacaagaaagtggaaggcctgagcaagcacatcaagctggaagaggaacggagaagcgaggacgcccagagcaaggccgccctgaccgactggctgcgggctaaggccagcttcgtgatcgagggcctgaaggaggccgacaaggacgagttctgcagatgcgagctgaagctgcagaagtggtacggggacctgcggggaaagcccttcgccatcgaagccgagaacagcatcctggacatcagcggcttcagcaagcagtacaactgtgccttcatctggcagaaggacggcgtgaagaagctgaacctgtacctgatcatcaactacttcaagggcggcaagctgcggttcaagaagatcaaacctgaagccttcgaagccaacagattctacaccgtgatcaacaaaaagagcggcgagatcgtgcccatggaggtgaacttcaacttcgacgaccccaacctgatcatcctgcctctggcctttggcaagagacagggcagagaattcatctggaacgacctgctgtccctggaaaccggcagcctgaagctggccaacggaagagtgatcgagaagacactgtacaacagaagaacccggcaggatgagcctgccctgttcgtggccctgaccttcgagcggcgggaggtcctggactcctccaatatcaaaccaatgaacctgatcggcgtggcaagaggcgaaaacatccccgccgtgatcgccctgaccgaccccgagggctgcccactgagccggtttaaggatagcctgggaaacccaacccacatcctgagaatcggcgagagctataaggagaagcagcggaccatccaggccaagaaggaggtggagcagcggagagccggcggctacagccggaagtacgccagcaaagccaagaatctggcagacgatatggtgagaaacaccgctagagatctgctgtactacgccgtgacccaggatgccatgctgatcttcgccaacctgagccggggcttcggccggcagggcaagcggaccttcatggccgagagacagtacacacggatggaggactggctgaccgccaagctggcctacgagggcctgagcaagacctacctgtccaagacactggcccagtacacctccaagacatgcagcaactgtgggtttaccatcaccagcgccgactacgacagggtgctggagaagctgaagaagacagcaacaggctggatgaccacaattaacggcaaggagctgaaggtggagggccagattacctactacaacagatacaagagacagaacgtagtcaaggacctgtccgtcgagctggatagactgagcgaagaatctgtgaacaacgacatctcctcctggacaaagggcagaagcggagaagctctgagcctcctgaagaaaagattctcccatagacccgtgcaggagaagttcgtgtgcctgaactgcggcttcgagacacacgcagccgagcaagccgccctgaacatcgccagatcctggctgttcctgcggagccaggagtacaagaaataccagacaaacaagacaaccggcaacaccgataagagagccttcgtcgagacctggcagtccttttaccggaagaagcttaaggaggtgtggaaacctgccgtgcggtctggcggatctggcggaggctcctctgcaggaggccgtgaccttcaacgacgtggccatcgacttcagccaggaggagtgggagtggctgaacagcgcccagaggagcctgtacaggaccgtggtgctggagaactacaggaacctggtgagcgtgggcgcctgcatcagcaagcccagcctgatcagcctgctggagcacggcaaggagccctgggaggtgaagggccaggtgaccggcagcagggtgcagggcggcgagagcgtgggatctggctccggcagcggccccaagaaaaagagaaaagtctaagctgccttctgcggggcttgccttctggccatgcccttcttctctcccttgcacctgtacctcttggtctttgaataaagcctgagtaggaaggctagcaaaaaaaaaaaaaaaaaaaaaaaaaaaaaaaaaaaaaaaaaaaaaaaaaaaaaaaaaaaaaaaaaaaaaaaaaaaaaaaa

SEQ ID NO: 16313 - RNA, 9485 nt, synthetic construct
  source 1..9485: mol_type = other RNA
aggaaataagagagaaaagaagagtaagaagaaatataagagccaccatggcccctaagaagaagcgtaaagtgagccggatggaacgcctcgtctacgaggtgcggcagaagtgcagaaacatcgaggacatctgcatctcctgcggatctctgaacgtgaccctggagcacccactgttcatcggcggcatgtgccagaactgtaaaaactgttttctggagtgtgcctatcaatacgacgatgacggctaccagagctactgcaccatctgttgcggcggaagagaggtgctgatgtgtggaaataacaactgctgccggtgcttctgcgtggaatgcgtggacctgctggtgggccccggcgccgcccaggccgctattaaggaagatccttggaactgctacatgtgcggccacaagggcacatacggcctgctgagacggagagaggactggcctagcagactgcagatgttcttcgccaataaccacgaccaggagttcgacccccctaaggtgtaccctcccgtccccgccgagaagagaaagcccatccgggtcctgagcctgttcgatggcatcgccaccggtctgctggtgctgaaggacctgggcatccaggtggataggtacattgcctccgaggtgtgcgaggactccatcaccgtgggaatggtgcgtcatcagggcaagatcatgtacgtgggcgacgtgcggagcgtgacacagaagcatatccaggagtggggccctttcgacctggtgatcggcggcagcccttgcaatgacctgagcatcgtgaacccagcccggaagggcctgtacgagggaaccggcagactgttcttcgagttttacagactgctgcacgacgcccggcctaaggaaggcgacgaccggcccttcttttggctgttcgagaatgtggtggccatgggagtcagcgacaagcgggatattagccggttcctggagagcaaccccgtgatgatcgatgccaaggaagtgagcgccgcccaccgggccagatacttctggggcaatctgcctggcatgaacagacccctggccagcaccgtgaacgacaagctggagctgcaggagtgcctggagcacggccggatcgccaagttcagcaaggtgagaaccatcaccacccgaagcaacagcatcaaacaaggcaaggaccagcactttcctgtgttcatgaacgagaaggaggacatcctgtggtgtaccgagatggagagagtgttcgggttcccagtccactacacagatgtcagcaacatgtctagactggccagacagagactgctgggaagaagctggtccgtccctgtgatcagacacctgttcgcccctctgaaggagtacttcgcctgcgtgagcagcggcaacagcaacgccaacagccggggccccagcttctctagcggcctggtgccactgtccctgagagggagccacatgggccccatggagatctacaaaaccgtgagcgcctggaagcggcagcctgtgcgcgtgctgagcctgtttcggaatatcgataaagtcctgaaaagcctgggattcctggagagcggctctggctccggcggtggcaccctgaagtacgtggaggatgtgacaaacgtggtcagacgggatgtggagaagtggggccccttcgatctggtgtacggcagcacccaacccctgggcagctcttgtgaccggtgccctggctggtacatgtttcagttccaccggatcctgcagtacgccctgccgagacaggagtcccagcggccattcttttggattttcatggacaacttgctgctgaccgaggatgaccaggaaactaccactcggttcctgcagaccgaagccgtgaccctgcaggacgtgagaggccgggactaccagaacgccatgcgggtgtggtccaacatccctggactgaaaagcaagcacgcacctctgacccctaaagaagaggagtacctgcaggcccaggtgcggagcagaagcaagctggacgcccctaaggtggatctgctggtgaagaattgcctcctgcccctgagagagtacttcaagtatttcagccagaatagtctgcccctgggaggcagcggcggcggcgccctggtgacatttgaggacgtcgccgtgcggttcacccaggaggaatgggctctgctggatccttctcagaaaatcctgtaccgggacgtgatgagagagacataccggaatctgacctccgtgggcatcaactgggaatgttgggaccttgaagcctgcttcagaagcctgggaagaaacctgagagtgcaggtggtgaagagaaagtgcgagctgaccaacagcggcccctgcgccgagggcggcccaagcagcggcgcccctcctcccagcggcggcagcccagccggctccccaacctctaccgaggagggcacctctgagtccgccacccccgagagcggccctggcacctccaccgagcccagcgagggcagcgcacccggcagccctgccggcagccccacctccacagaggagggaaccagcaccgagcccagcgaaggcagcgccccaggcaccagcaccgagcctagtgagcaggagattaaacggatcaacaagatcagaagaagacttgtgaaagacagcaacaccaagaaggccggcaagacaggccccatgaaaaccctgctggttagagtgatgacacccgatctgagagagcggctggaaaacctgagaaagaagcctgaaaatatcccccagcccatcagcaatacatctagagccaacctgaataagctgctgaccgattacaccgaaatgaagaaggcgatcctgcatgtgtactgggaagagttccagaaggaccctgtgggcctgatgagccgggtggcccagcctgccagcaagaagatcgatcagaacaagctgaaacctgagatggacgagaagggcaacctgaccaccgccggctttgcctgctctcagtgtggccagcccctgttcgtgtacaagctggagcaggtgtctgagaagggcaaggcttacaccaactacttcggacggtgcaatgtggccgagcacgaaaagctgatcctgctggcccagctgaagcccgagaaggatagcgacgaagccgtgacatatagcctgggaaagtttgggcagagggccctggatttctacagcattcatgtgaccaaggagtccacccaccccgtgaagcccctggcccagatcgccggaaacagatacgcctccggacctgtgggaaaggccctgagcgacgcatgtatgggcacaatcgcctccttcctgtctaagtaccaggacatcatcatcgaacaccagaaggtggtgaagggcaaccagaagagactggagagcctgcgggagctggccggcaaggaaaacctggaataccctagcgtgaccctgccacctcagcctcacaccaaggagggcgttgatgcctacaacgaagtgatcgcccgggtgcgaatgtgggtgaacctgaacctgtggcagaagctgaagctaagcagagatgatgccaagcctctgctgagactgaagggattcccttcctttcctctggtcgagagacaggccaacgaagtggactggtgggacatggtgtgtaacgtgaagaagctgatcaacgagaaaaaggaggatggcaaggtgttttggcagaatctggctggctacaagagacaggaagccctgagaccatacctgagcagcgaggaagatcggaagaagggaaagaaattcgctcggtaccagctgggcgacctgctgctgcacctggaaaagaagcacggcgaggactggggaaaggtgtacgacgaggcctgggagcggattgacaagaaagtggaaggcctgagcaagcacatcaagctggaagaggaacggagaagcgaggacgcccagagcaaggccgccctgaccgactggctgcgggctaaggccagcttcgtgatcgagggcctgaaggaggccgacaaggacgagttctgcagatgcgagctgaagctgcagaagtggtacggggacctgcggggaaagcccttcgccatcgaagccgagaacagcatcctggacatcagcggcttcagcaagcagtacaactgtgccttcatctggcagaaggacggcgtgaagaagctgaacctgtacctgatcatcaactacttcaagggcggcaagctgcggttcaagaagatcaaacctgaagccttcgaagccaacagattctacaccgtgatcaacaaaaagagcggcgagatcgtgcccatggaggtgaacttcaacttcgacgaccccaacctgatcatcctgcctctggcctttggcaagagacagggcagagaattcatctggaacgacctgctgtccctggaaaccggcagcctgaagctggccaacggaagagtgatcgagaagacactgtacaacagaagaacccggcaggatgagcctgccctgttcgtggccctgaccttcgagcggcgggaggtcctggactcctccaatatcaaaccaatgaacctgatcggcgtggcaagaggcgaaaacatccccgccgtgatcgccctgaccgaccccgagggctgcccactgagccggtttaaggatagcctgggaaacccaacccacatcctgagaatcggcgagagctataaggagaagcagcggaccatccaggccaagaaggaggtggagcagcggagagccggcggctacagccggaagtacgccagcaaagccaagaatctggcagacgatatggtgagaaacaccgctagagatctgctgtactacgccgtgacccaggatgccatgctgatcttcgccaacctgagccggggcttcggccggcagggcaagcggaccttcatggccgagagacagtacacacggatggaggactggctgaccgccaagctggcctacgagggcctgagcaagacctacctgtccaagacactggcccagtacacctccaagacatgcagcaactgtgggtttaccatcaccagcgccgactacgacagggtgctggagaagctgaagaagacagcaacaggctggatgaccacaattaacggcaaggagctgaaggtggagggccagattacctactacaacagatacaagagacagaacgtagtcaaggacctgtccgtcgagctggatagactgagcgaagaatctgtgaacaacgacatctcctcctggacaaagggcagaagcggagaagctctgagcctcctgaagaaaagattctcccatagacccgtgcaggagaagttcgtgtgcctgaactgcggcttcgagacacacgcagccgagcaagccgccctgaacatcgccagatcctggctgttcctgcggagccaggagtacaagaaataccagacaaacaagacaaccggcaacaccgataagagagccttcgtcgagacctggcagtccttttaccggaagaagcttaaggaggtgtggaaacctgccgtgcggtctggcggatctggcggaggctccatggccctgacccagggccaggtgaccttcagggacgtggccatcgagttcagccaggaggagtggacctgcctggaccccgcccagaggagcctgtacagggacgtgatgctggagaactacaggaacctggccagcctgggcatcagctgcttcgacctgagcatcatcagcatgctggagcagggcaagggccccttcgccctggagagccaggtgcagagggccggcaaccccgacggcggcggcccaagcagcggcgcccctcctcccagcggcggcagcccagccggctccccaacctctaccgaggagggcacctctgagtccgccacccccgagagcggccctggcacctccaccgagcccagcgagggcagcgcacccggcagccctgccggcagccccacctccacagaggagggaaccagcaccgagcccagcgaaggcagcgccccaggcaccagcaccgagcctagtgagcaggagattaaacggatcaacaagatcagaagaagacttgtgaaagacagcaacaccaagaaggccggcaagacaggccccatgaaaaccctgctggttagagtgatgacacccgatctgagagagcggctggaaaacctgagaaagaagcctgaaaatatcccccagcccatcagcaatacatctagagccaacctgaataagctgctgaccgattacaccgaaatgaagaaggcgatcctgcatgtgtactgggaagagttccagaaggaccctgtgggcctgatgagccgggtggcccagcctgccagcaagaagatcgatcagaacaagctgaaacctgagatggacgagaagggcaacctgaccaccgccggctttgcctgctctcagtgtggccagcccctgttcgtgtacaagctggagcaggtgtctgagaagggcaaggcttacaccaactacttcggacggtgcaatgtggccgagcacgaaaagctgatcctgctggcccagctgaagcccgagaaggatagcgacgaagccgtgacatatagcctgggaaagtttgggcagagggccctggatttctacagcattcatgtgaccaaggagtccacccaccccgtgaagcccctggcccagatcgccggaaacagatacgcctccggacctgtgggaaaggccctgagcgacgcatgtatgggcacaatcgcctccttcctgtctaagtaccaggacatcatcatcgaacaccagaaggtggtgaagggcaaccagaagagactggagagcctgcgggagctggccggcaaggaaaacctggaataccctagcgtgaccctgccacctcagcctcacaccaaggagggcgttgatgcctacaacgaagtgatcgcccgggtgcgaatgtgggtgaacctgaacctgtggcagaagctgaagctaagcagagatgatgccaagcctctgctgagactgaagggattcccttcctttcctctggtcgagagacaggccaacgaagtggactggtgggacatggtgtgtaacgtgaagaagctgatcaacgagaaaaaggaggatggcaaggtgttttggcagaatctggctggctacaagagacaggaagccctgagaccatacctgagcagcgaggaagatcggaagaagggaaagaaattcgctcggtaccagctgggcgacctgctgctgcacctggaaaagaagcacggcgaggactggggaaaggtgtacgacgaggcctgggagcggattgacaagaaagtggaaggcctgagcaagcacatcaagctggaagaggaacggagaagcgaggacgcccagagcaaggccgccctgaccgactggctgcgggctaaggccagcttcgtgatcgagggcctgaaggaggccgacaaggacgagttctgcagatgcgagctgaagctgcagaagtggtacggggacctgcggggaaagcccttcgccatcgaagccgagaacagcatcctggacatcagcggcttcagcaagcagtacaactgtgccttcatctggcagaaggacggcgtgaagaagctgaacctgtacctgatcatcaactacttcaagggcggcaagctgcggttcaagaagatcaaacctgaagccttcgaagccaacagattctacaccgtgatcaacaaaaagagcggcgagatcgtgcccatggaggtgaacttcaacttcgacgaccccaacctgatcatcctgcctctggcctttggcaagagacagggcagagaattcatctggaacgacctgctgtccctggaaaccggcagcctgaagctggccaacggaagagtgatcgagaagacactgtacaacagaagaacccggcaggatgagcctgccctgttcgtggccctgaccttcgagcggcgggaggtcctggactcctccaatatcaaaccaatgaacctgatcggcgtggcaagaggcgaaaacatccccgccgtgatcgccctgaccgaccccgagggctgcccactgagccggtttaaggatagcctgggaaacccaacccacatcctgagaatcggcgagagctataaggagaagcagcggaccatccaggccaagaaggaggtggagcagcggagagccggcggctacagccggaagtacgccagcaaagccaagaatctggcagacgatatggtgagaaacaccgctagagatctgctgtactacgccgtgacccaggatgccatgctgatcttcgccaacctgagccggggcttcggccggcagggcaagcggaccttcatggccgagagacagtacacacggatggaggactggctgaccgccaagctggcctacgagggcctgagcaagacctacctgtccaagacactggcccagtacacctccaagacatgcagcaactgtgggtttaccatcaccagcgccgactacgacagggtgctggagaagctgaagaagacagcaacaggctggatgaccacaattaacggcaaggagctgaaggtggagggccagattacctactacaacagatacaagagacagaacgtagtcaaggacctgtccgtcgagctggatagactgagcgaagaatctgtgaacaacgacatctcctcctggacaaagggcagaagcggagaagctctgagcctcctgaagaaaagattctcccatagacccgtgcaggagaagttcgtgtgcctgaactgcggcttcgagacacacgcagccgagcaagccgccctgaacatcgccagatcctggctgttcctgcggagccaggagtacaagaaataccagacaaacaagacaaccggcaacaccgataagagagccttcgtcgagacctggcagtccttttaccggaagaagcttaaggaggtgtggaaacctgccgtgcggtctggcggatctggcggaggctcctatggccctgacccagggccaggtgaccttcagggacgtggccatcgagttcagccaggaggagtggacctgcctggaccccgcccagaggagcctgtacagggacgtgatgctggagaactacaggaacctggccagcctgggcatcagctgcttcgacctgagcatcatcagcatgctggagcagggcaagggccccttcgccctggagagccaggtgcagagggccggcaaccccgacggcggatctggctccggcagcggccccaagaaaaagagaaaagtctaagctgccttctgcggggcttgccttctggccatgcccttcttctctcccttgcacctgtacctcttggtctttgaataaagcctgagtaggaaggctagcaaaaaaaaaaaaaaaaaaaaaaaaaaaaaaaaaaaaaaaaaaaaaaaaaaaaaaaaaaaaaaaaaaaaaaaaaaaaaaaa

SEQ ID NO: 16314 - RNA, 9485 nt, synthetic construct
  source 1..9485: mol_type = other RNA
aggaaataagagagaaaagaagagtaagaagaaatataagagccaccatggcccctaagaagaagcgtaaagtgagccggatggaacgcctcgtctacgaggtgcggcagaagtgcagaaacatcgaggacatctgcatctcctgcggatctctgaacgtgaccctggagcacccactgttcatcggcggcatgtgccagaactgtaaaaactgttttctggagtgtgcctatcaatacgacgatgacggctaccagagctactgcaccatctgttgcggcggaagagaggtgctgatgtgtggaaataacaactgctgccggtgcttctgcgtggaatgcgtggacctgctggtgggccccggcgccgcccaggccgctattaaggaagatccttggaactgctacatgtgcggccacaagggcacatacggcctgctgagacggagagaggactggcctagcagactgcagatgttcttcgccaataaccacgaccaggagttcgacccccctaaggtgtaccctcccgtccccgccgagaagagaaagcccatccgggtcctgagcctgttcgatggcatcgccaccggtctgctggtgctgaaggacctgggcatccaggtggataggtacattgcctccgaggtgtgcgaggactccatcaccgtgggaatggtgcgtcatcagggcaagatcatgtacgtgggcgacgtgcggagcgtgacacagaagcatatccaggagtggggccctttcgacctggtgatcggcggcagcccttgcaatgacctgagcatcgtgaacccagcccggaagggcctgtacgagggaaccggcagactgttcttcgagttttacagactgctgcacgacgcccggcctaaggaaggcgacgaccggcccttcttttggctgttcgagaatgtggtggccatgggagtcagcgacaagcgggatattagccggttcctggagagcaaccccgtgatgatcgatgccaaggaagtgagcgccgcccaccgggccagatacttctggggcaatctgcctggcatgaacagacccctggccagcaccgtgaacgacaagctggagctgcaggagtgcctggagcacggccggatcgccaagttcagcaaggtgagaaccatcaccacccgaagcaacagcatcaaacaaggcaaggaccagcactttcctgtgttcatgaacgagaaggaggacatcctgtggtgtaccgagatggagagagtgttcgggttcccagtccactacacagatgtcagcaacatgtctagactggccagacagagactgctgggaagaagctggtccgtccctgtgatcagacacctgttcgcccctctgaaggagtacttcgcctgcgtgagcagcggcaacagcaacgccaacagccggggccccagcttctctagcggcctggtgccactgtccctgagagggagccacatgggccccatggagatctacaaaaccgtgagcgcctggaagcggcagcctgtgcgcgtgctgagcctgtttcggaatatcgataaagtcctgaaaagcctgggattcctggagagcggctctggctccggcggtggcaccctgaagtacgtggaggatgtgacaaacgtggtcagacgggatgtggagaagtggggccccttcgatctggtgtacggcagcacccaacccctgggcagctcttgtgaccggtgccctggctggtacatgtttcagttccaccggatcctgcagtacgccctgccgagacaggagtcccagcggccattcttttggattttcatggacaacttgctgctgaccgaggatgaccaggaaactaccactcggttcctgcagaccgaagccgtgaccctgcaggacgtgagaggccgggactaccagaacgccatgcgggtgtggtccaacatccctggactgaaaagcaagcacgcacctctgacccctaaagaagaggagtacctgcaggcccaggtgcggagcagaagcaagctggacgcccctaaggtggatctgctggtgaagaattgcctcctgcccctgagagagtacttcaagtatttcagccagaatagtctgcccctgggaggcagcggcggcggcgccctggtgacatttgaggacgtcgccgtgcggttcacccaggaggaatgggctctgctggatccttctcagaaaatcctgtaccgggacgtgatgagagagacataccggaatctgacctccgtgggcatcaactgggaatgttgggaccttgaagcctgcttcagaagcctgggaagaaacctgagagtgcaggtggtgaagagaaagtgcgagctgaccaacagcggcccctgcgccgagggcggcccaagcagcggcgcccctcctcccagcggcggcagcccagccggctccccaacctctaccgaggagggcacctctgagtccgccacccccgagagcggccctggcacctccaccgagcccagcgagggcagcgcacccggcagccctgccggcagccccacctccacagaggagggaaccagcaccgagcccagcgaaggcagcgccccaggcaccagcaccgagcctagtgagcaggagattaaacggatcaacaagatcagaagaagacttgtgaaagacagcaacaccaagaaggccggcaagacaggccccatgaaaaccctgctggttagagtgatgacacccgatctgagagagcggctggaaaacctgagaaagaagcctgaaaatatcccccagcccatcagcaatacatctagagccaacctgaataagctgctgaccgattacaccgaaatgaagaaggcgatcctgcatgtgtactgggaagagttccagaaggaccctgtgggcctgatgagccgggtggcccagcctgccagcaagaagatcgatcagaacaagctgaaacctgagatggacgagaagggcaacctgaccaccgccggctttgcctgctctcagtgtggccagcccctgttcgtgtacaagctggagcaggtgtctgagaagggcaaggcttacaccaactacttcggacggtgcaatgtggccgagcacgaaaagctgatcctgctggcccagctgaagcccgagaaggatagcgacgaagccgtgacatatagcctgggaaagtttgggcagagggccctggatttctacagcattcatgtgaccaaggagtccacccaccccgtgaagcccctggcccagatcgccggaaacagatacgcctccggacctgtgggaaaggccctgagcgacgcatgtatgggcacaatcgcctccttcctgtctaagtaccaggacatcatcatcgaacaccagaaggtggtgaagggcaaccagaagagactggagagcctgcgggagctggccggcaaggaaaacctggaataccctagcgtgaccctgccacctcagcctcacaccaaggagggcgttgatgcctacaacgaagtgatcgcccgggtgcgaatgtgggtgaacctgaacctgtggcagaagctgaagctaagcagagatgatgccaagcctctgctgagactgaagggattcccttcctttcctctggtcgagagacaggccaacgaagtggactggtgggacatggtgtgtaacgtgaagaagctgatcaacgagaaaaaggaggatggcaaggtgttttggcagaatctggctggctacaagagacaggaagccctgagaccatacctgagcagcgaggaagatcggaagaagggaaagaaattcgctcggtaccagctgggcgacctgctgctgcacctggaaaagaagcacggcgaggactggggaaaggtgtacgacgaggcctgggagcggattgacaagaaagtggaaggcctgagcaagcacatcaagctggaagaggaacggagaagcgaggacgcccagagcaaggccgccctgaccgactggctgcgggctaaggccagcttcgtgatcgagggcctgaaggaggccgacaaggacgagttctgcagatgcgagctgaagctgcagaagtggtacggggacctgcggggaaagcccttcgccatcgaagccgagaacagcatcctggacatcagcggcttcagcaagcagtacaactgtgccttcatctggcagaaggacggcgtgaagaagctgaacctgtacctgatcatcaactacttcaagggcggcaagctgcggttcaagaagatcaaacctgaagccttcgaagccaacagattctacaccgtgatcaacaaaaagagcggcgagatcgtgcccatggaggtgaacttcaacttcgacgaccccaacctgatcatcctgcctctggcctttggcaagagacagggcagagaattcatctggaacgacctgctgtccctggaaaccggcagcctgaagctggccaacggaagagtgatcgagaagacactgtacaacagaagaacccggcaggatgagcctgccctgttcgtggccctgaccttcgagcggcgggaggtcctggactcctccaatatcaaaccaatgaacctgatcggcgtggcaagaggcgaaaacatccccgccgtgatcgccctgaccgaccccgagggctgcccactgagccggtttaaggatagcctgggaaacccaacccacatcctgagaatcggcgagagctataaggagaagcagcggaccatccaggccaagaaggaggtggagcagcggagagccggcggctacagccggaagtacgccagcaaagccaagaatctggcagacgatatggtgagaaacaccgctagagatctgctgtactacgccgtgacccaggatgccatgctgatcttcgccaacctgagccggggcttcggccggcagggcaagcggaccttcatggccgagagacagtacacacggatggaggactggctgaccgccaagctggcctacgagggcctgagcaagacctacctgtccaagacactggcccagtacacctccaagacatgcagcaactgtgggtttaccatcaccagcgccgactacgacagggtgctggagaagctgaagaagacagcaacaggctggatgaccacaattaacggcaaggagctgaaggtggagggccagattacctactacaacagatacaagagacagaacgtagtcaaggacctgtccgtcgagctggatagactgagcgaagaatctgtgaacaacgacatctcctcctggacaaagggcagaagcggagaagctctgagcctcctgaagaaaagattctcccatagacccgtgcaggagaagttcgtgtgcctgaactgcggcttcgagacacacgcagccgagcaagccgccctgaacatcgccagatcctggctgttcctgcggagccaggagtacaagaaataccagacaaacaagacaaccggcaacaccgataagagagccttcgtcgagacctggcagtccttttaccggaagaagcttaaggaggtgtggaaacctgccgtgcggtctggcggatctggcggaggctccctggcccccgacgaccacggcagcagctacgagggcagcgtgagcttcagggacgtggccatcgacttcagcagggaggagtggaggcacctggaccccagccagaggaacctgtacagggacgtgatgctggagacctacagccacctgctgagcgtgggctaccaggtgcccgaggccgaggtggtgatgctggagcagggcaaggagccctgggccctgcagggcgagaggcccaggcacggcggcccaagcagcggcgcccctcctcccagcggcggcagcccagccggctccccaacctctaccgaggagggcacctctgagtccgccacccccgagagcggccctggcacctccaccgagcccagcgagggcagcgcacccggcagccctgccggcagccccacctccacagaggagggaaccagcaccgagcccagcgaaggcagcgccccaggcaccagcaccgagcctagtgagcaggagattaaacggatcaacaagatcagaagaagacttgtgaaagacagcaacaccaagaaggccggcaagacaggccccatgaaaaccctgctggttagagtgatgacacccgatctgagagagcggctggaaaacctgagaaagaagcctgaaaatatcccccagcccatcagcaatacatctagagccaacctgaataagctgctgaccgattacaccgaaatgaagaaggcgatcctgcatgtgtactgggaagagttccagaaggaccctgtgggcctgatgagccgggtggcccagcctgccagcaagaagatcgatcagaacaagctgaaacctgagatggacgagaagggcaacctgaccaccgccggctttgcctgctctcagtgtggccagcccctgttcgtgtacaagctggagcaggtgtctgagaagggcaaggcttacaccaactacttcggacggtgcaatgtggccgagcacgaaaagctgatcctgctggcccagctgaagcccgagaaggatagcgacgaagccgtgacatatagcctgggaaagtttgggcagagggccctggatttctacagcattcatgtgaccaaggagtccacccaccccgtgaagcccctggcccagatcgccggaaacagatacgcctccggacctgtgggaaaggccctgagcgacgcatgtatgggcacaatcgcctccttcctgtctaagtaccaggacatcatcatcgaacaccagaaggtggtgaagggcaaccagaagagactggagagcctgcgggagctggccggcaaggaaaacctggaataccctagcgtgaccctgccacctcagcctcacaccaaggagggcgttgatgcctacaacgaagtgatcgcccgggtgcgaatgtgggtgaacctgaacctgtggcagaagctgaagctaagcagagatgatgccaagcctctgctgagactgaagggattcccttcctttcctctggtcgagagacaggccaacgaagtggactggtgggacatggtgtgtaacgtgaagaagctgatcaacgagaaaaaggaggatggcaaggtgttttggcagaatctggctggctacaagagacaggaagccctgagaccatacctgagcagcgaggaagatcggaagaagggaaagaaattcgctcggtaccagctgggcgacctgctgctgcacctggaaaagaagcacggcgaggactggggaaaggtgtacgacgaggcctgggagcggattgacaagaaagtggaaggcctgagcaagcacatcaagctggaagaggaacggagaagcgaggacgcccagagcaaggccgccctgaccgactggctgcgggctaaggccagcttcgtgatcgagggcctgaaggaggccgacaaggacgagttctgcagatgcgagctgaagctgcagaagtggtacggggacctgcggggaaagcccttcgccatcgaagccgagaacagcatcctggacatcagcggcttcagcaagcagtacaactgtgccttcatctggcagaaggacggcgtgaagaagctgaacctgtacctgatcatcaactacttcaagggcggcaagctgcggttcaagaagatcaaacctgaagccttcgaagccaacagattctacaccgtgatcaacaaaaagagcggcgagatcgtgcccatggaggtgaacttcaacttcgacgaccccaacctgatcatcctgcctctggcctttggcaagagacagggcagagaattcatctggaacgacctgctgtccctggaaaccggcagcctgaagctggccaacggaagagtgatcgagaagacactgtacaacagaagaacccggcaggatgagcctgccctgttcgtggccctgaccttcgagcggcgggaggtcctggactcctccaatatcaaaccaatgaacctgatcggcgtggcaagaggcgaaaacatccccgccgtgatcgccctgaccgaccccgagggctgcccactgagccggtttaaggatagcctgggaaacccaacccacatcctgagaatcggcgagagctataaggagaagcagcggaccatccaggccaagaaggaggtggagcagcggagagccggcggctacagccggaagtacgccagcaaagccaagaatctggcagacgatatggtgagaaacaccgctagagatctgctgtactacgccgtgacccaggatgccatgctgatcttcgccaacctgagccggggcttcggccggcagggcaagcggaccttcatggccgagagacagtacacacggatggaggactggctgaccgccaagctggcctacgagggcctgagcaagacctacctgtccaagacactggcccagtacacctccaagacatgcagcaactgtgggtttaccatcaccagcgccgactacgacagggtgctggagaagctgaagaagacagcaacaggctggatgaccacaattaacggcaaggagctgaaggtggagggccagattacctactacaacagatacaagagacagaacgtagtcaaggacctgtccgtcgagctggatagactgagcgaagaatctgtgaacaacgacatctcctcctggacaaagggcagaagcggagaagctctgagcctcctgaagaaaagattctcccatagacccgtgcaggagaagttcgtgtgcctgaactgcggcttcgagacacacgcagccgagcaagccgccctgaacatcgccagatcctggctgttcctgcggagccaggagtacaagaaataccagacaaacaagacaaccggcaacaccgataagagagccttcgtcgagacctggcagtccttttaccggaagaagcttaaggaggtgtggaaacctgccgtgcggtctggcggatctggcggaggctcctctggcccccgacgaccacggcagcagctacgagggcagcgtgagcttcagggacgtggccatcgacttcagcagggaggagtggaggcacctggaccccagccagaggaacctgtacagggacgtgatgctggagacctacagccacctgctgagcgtgggctaccaggtgcccgaggccgaggtggtgatgctggagcagggcaaggagccctgggccctgcagggcgagaggcccaggcacggatctggctccggcagcggccccaagaaaaagagaaaagtctaagctgccttctgcggggcttgccttctggccatgcccttcttctctcccttgcacctgtacctcttggtctttgaataaagcctgagtaggaaggctagcaaaaaaaaaaaaaaaaaaaaaaaaaaaaaaaaaaaaaaaaaaaaaaaaaaaaaaaaaaaaaaaaaaaaaaaaaaaaaaaa

SEQ ID NO: 16315 - RNA, 9485 nt, synthetic construct
  source 1..9485: mol_type = other RNA
aggaaataagagagaaaagaagagtaagaagaaatataagagccaccatggcccctaagaagaagcgtaaagtgagccggatggaacgcctcgtctacgaggtgcggcagaagtgcagaaacatcgaggacatctgcatctcctgcggatctctgaacgtgaccctggagcacccactgttcatcggcggcatgtgccagaactgtaaaaactgttttctggagtgtgcctatcaatacgacgatgacggctaccagagctactgcaccatctgttgcggcggaagagaggtgctgatgtgtggaaataacaactgctgccggtgcttctgcgtggaatgcgtggacctgctggtgggccccggcgccgcccaggccgctattaaggaagatccttggaactgctacatgtgcggccacaagggcacatacggcctgctgagacggagagaggactggcctagcagactgcagatgttcttcgccaataaccacgaccaggagttcgacccccctaaggtgtaccctcccgtccccgccgagaagagaaagcccatccgggtcctgagcctgttcgatggcatcgccaccggtctgctggtgctgaaggacctgggcatccaggtggataggtacattgcctccgaggtgtgcgaggactccatcaccgtgggaatggtgcgtcatcagggcaagatcatgtacgtgggcgacgtgcggagcgtgacacagaagcatatccaggagtggggccctttcgacctggtgatcggcggcagcccttgcaatgacctgagcatcgtgaacccagcccggaagggcctgtacgagggaaccggcagactgttcttcgagttttacagactgctgcacgacgcccggcctaaggaaggcgacgaccggcccttcttttggctgttcgagaatgtggtggccatgggagtcagcgacaagcgggatattagccggttcctggagagcaaccccgtgatgatcgatgccaaggaagtgagcgccgcccaccgggccagatacttctggggcaatctgcctggcatgaacagacccctggccagcaccgtgaacgacaagctggagctgcaggagtgcctggagcacggccggatcgccaagttcagcaaggtgagaaccatcaccacccgaagcaacagcatcaaacaaggcaaggaccagcactttcctgtgttcatgaacgagaaggaggacatcctgtggtgtaccgagatggagagagtgttcgggttcccagtccactacacagatgtcagcaacatgtctagactggccagacagagactgctgggaagaagctggtccgtccctgtgatcagacacctgttcgcccctctgaaggagtacttcgcctgcgtgagcagcggcaacagcaacgccaacagccggggccccagcttctctagcggcctggtgccactgtccctgagagggagccacatgggccccatggagatctacaaaaccgtgagcgcctggaagcggcagcctgtgcgcgtgctgagcctgtttcggaatatcgataaagtcctgaaaagcctgggattcctggagagcggctctggctccggcggtggcaccctgaagtacgtggaggatgtgacaaacgtggtcagacgggatgtggagaagtggggccccttcgatctggtgtacggcagcacccaacccctgggcagctcttgtgaccggtgccctggctggtacatgtttcagttccaccggatcctgcagtacgccctgccgagacaggagtcccagcggccattcttttggattttcatggacaacttgctgctgaccgaggatgaccaggaaactaccactcggttcctgcagaccgaagccgtgaccctgcaggacgtgagaggccgggactaccagaacgccatgcgggtgtggtccaacatccctggactgaaaagcaagcacgcacctctgacccctaaagaagaggagtacctgcaggcccaggtgcggagcagaagcaagctggacgcccctaaggtggatctgctggtgaagaattgcctcctgcccctgagagagtacttcaagtatttcagccagaatagtctgcccctgggaggcagcggcggcggcgccctggtgacatttgaggacgtcgccgtgcggttcacccaggaggaatgggctctgctggatccttctcagaaaatcctgtaccgggacgtgatgagagagacataccggaatctgacctccgtgggcatcaactgggaatgttgggaccttgaagcctgcttcagaagcctgggaagaaacctgagagtgcaggtggtgaagagaaagtgcgagctgaccaacagcggcccctgcgccgagggcggcccaagcagcggcgcccctcctcccagcggcggcagcccagccggctccccaacctctaccgaggagggcacctctgagtccgccacccccgagagcggccctggcacctccaccgagcccagcgagggcagcgcacccggcagccctgccggcagccccacctccacagaggagggaaccagcaccgagcccagcgaaggcagcgccccaggcaccagcaccgagcctagtgagcaggagattaaacggatcaacaagatcagaagaagacttgtgaaagacagcaacaccaagaaggccggcaagacaggccccatgaaaaccctgctggttagagtgatgacacccgatctgagagagcggctggaaaacctgagaaagaagcctgaaaatatcccccagcccatcagcaatacatctagagccaacctgaataagctgctgaccgattacaccgaaatgaagaaggcgatcctgcatgtgtactgggaagagttccagaaggaccctgtgggcctgatgagccgggtggcccagcctgccagcaagaagatcgatcagaacaagctgaaacctgagatggacgagaagggcaacctgaccaccgccggctttgcctgctctcagtgtggccagcccctgttcgtgtacaagctggagcaggtgtctgagaagggcaaggcttacaccaactacttcggacggtgcaatgtggccgagcacgaaaagctgatcctgctggcccagctgaagcccgagaaggatagcgacgaagccgtgacatatagcctgggaaagtttgggcagagggccctggatttctacagcattcatgtgaccaaggagtccacccaccccgtgaagcccctggcccagatcgccggaaacagatacgcctccggacctgtgggaaaggccctgagcgacgcatgtatgggcacaatcgcctccttcctgtctaagtaccaggacatcatcatcgaacaccagaaggtggtgaagggcaaccagaagagactggagagcctgcgggagctggccggcaaggaaaacctggaataccctagcgtgaccctgccacctcagcctcacaccaaggagggcgttgatgcctacaacgaagtgatcgcccgggtgcgaatgtgggtgaacctgaacctgtggcagaagctgaagctaagcagagatgatgccaagcctctgctgagactgaagggattcccttcctttcctctggtcgagagacaggccaacgaagtggactggtgggacatggtgtgtaacgtgaagaagctgatcaacgagaaaaaggaggatggcaaggtgttttggcagaatctggctggctacaagagacaggaagccctgagaccatacctgagcagcgaggaagatcggaagaagggaaagaaattcgctcggtaccagctgggcgacctgctgctgcacctggaaaagaagcacggcgaggactggggaaaggtgtacgacgaggcctgggagcggattgacaagaaagtggaaggcctgagcaagcacatcaagctggaagaggaacggagaagcgaggacgcccagagcaaggccgccctgaccgactggctgcgggctaaggccagcttcgtgatcgagggcctgaaggaggccgacaaggacgagttctgcagatgcgagctgaagctgcagaagtggtacggggacctgcggggaaagcccttcgccatcgaagccgagaacagcatcctggacatcagcggcttcagcaagcagtacaactgtgccttcatctggcagaaggacggcgtgaagaagctgaacctgtacctgatcatcaactacttcaagggcggcaagctgcggttcaagaagatcaaacctgaagccttcgaagccaacagattctacaccgtgatcaacaaaaagagcggcgagatcgtgcccatggaggtgaacttcaacttcgacgaccccaacctgatcatcctgcctctggcctttggcaagagacagggcagagaattcatctggaacgacctgctgtccctggaaaccggcagcctgaagctggccaacggaagagtgatcgagaagacactgtacaacagaagaacccggcaggatgagcctgccctgttcgtggccctgaccttcgagcggcgggaggtcctggactcctccaatatcaaaccaatgaacctgatcggcgtggcaagaggcgaaaacatccccgccgtgatcgccctgaccgaccccgagggctgcccactgagccggtttaaggatagcctgggaaacccaacccacatcctgagaatcggcgagagctataaggagaagcagcggaccatccaggccaagaaggaggtggagcagcggagagccggcggctacagccggaagtacgccagcaaagccaagaatctggcagacgatatggtgagaaacaccgctagagatctgctgtactacgccgtgacccaggatgccatgctgatcttcgccaacctgagccggggcttcggccggcagggcaagcggaccttcatggccgagagacagtacacacggatggaggactggctgaccgccaagctggcctacgagggcctgagcaagacctacctgtccaagacactggcccagtacacctccaagacatgcagcaactgtgggtttaccatcaccagcgccgactacgacagggtgctggagaagctgaagaagacagcaacaggctggatgaccacaattaacggcaaggagctgaaggtggagggccagattacctactacaacagatacaagagacagaacgtagtcaaggacctgtccgtcgagctggatagactgagcgaagaatctgtgaacaacgacatctcctcctggacaaagggcagaagcggagaagctctgagcctcctgaagaaaagattctcccatagacccgtgcaggagaagttcgtgtgcctgaactgcggcttcgagacacacgcagccgagcaagccgccctgaacatcgccagatcctggctgttcctgcggagccaggagtacaagaaataccagacaaacaagacaaccggcaacaccgataagagagccttcgtcgagacctggcagtccttttaccggaagaagcttaaggaggtgtggaaacctgccgtgcggtctggcggatctggcggaggctccatccaggagcccgtgaccttcaaggacgtggccgtggacttcacccaggaggagtggggcaggctggaccccgtgcagaggaccctgtacagggacgtgatgctggagacctacaggcacctgctgagcgtgggcaaccagatcgccaagcccgaggtgatcagcctgctggagcagggcgaggagccctggagcgtggagcaggcctacccccagagcacctgccccgccgtggacaccgagggcggcccaagcagcggcgcccctcctcccagcggcggcagcccagccggctccccaacctctaccgaggagggcacctctgagtccgccacccccgagagcggccctggcacctccaccgagcccagcgagggcagcgcacccggcagccctgccggcagccccacctccacagaggagggaaccagcaccgagcccagcgaaggcagcgccccaggcaccagcaccgagcctagtgagcaggagattaaacggatcaacaagatcagaagaagacttgtgaaagacagcaacaccaagaaggccggcaagacaggccccatgaaaaccctgctggttagagtgatgacacccgatctgagagagcggctggaaaacctgagaaagaagcctgaaaatatcccccagcccatcagcaatacatctagagccaacctgaataagctgctgaccgattacaccgaaatgaagaaggcgatcctgcatgtgtactgggaagagttccagaaggaccctgtgggcctgatgagccgggtggcccagcctgccagcaagaagatcgatcagaacaagctgaaacctgagatggacgagaagggcaacctgaccaccgccggctttgcctgctctcagtgtggccagcccctgttcgtgtacaagctggagcaggtgtctgagaagggcaaggcttacaccaactacttcggacggtgcaatgtggccgagcacgaaaagctgatcctgctggcccagctgaagcccgagaaggatagcgacgaagccgtgacatatagcctgggaaagtttgggcagagggccctggatttctacagcattcatgtgaccaaggagtccacccaccccgtgaagcccctggcccagatcgccggaaacagatacgcctccggacctgtgggaaaggccctgagcgacgcatgtatgggcacaatcgcctccttcctgtctaagtaccaggacatcatcatcgaacaccagaaggtggtgaagggcaaccagaagagactggagagcctgcgggagctggccggcaaggaaaacctggaataccctagcgtgaccctgccacctcagcctcacaccaaggagggcgttgatgcctacaacgaagtgatcgcccgggtgcgaatgtgggtgaacctgaacctgtggcagaagctgaagctaagcagagatgatgccaagcctctgctgagactgaagggattcccttcctttcctctggtcgagagacaggccaacgaagtggactggtgggacatggtgtgtaacgtgaagaagctgatcaacgagaaaaaggaggatggcaaggtgttttggcagaatctggctggctacaagagacaggaagccctgagaccatacctgagcagcgaggaagatcggaagaagggaaagaaattcgctcggtaccagctgggcgacctgctgctgcacctggaaaagaagcacggcgaggactggggaaaggtgtacgacgaggcctgggagcggattgacaagaaagtggaaggcctgagcaagcacatcaagctggaagaggaacggagaagcgaggacgcccagagcaaggccgccctgaccgactggctgcgggctaaggccagcttcgtgatcgagggcctgaaggaggccgacaaggacgagttctgcagatgcgagctgaagctgcagaagtggtacggggacctgcggggaaagcccttcgccatcgaagccgagaacagcatcctggacatcagcggcttcagcaagcagtacaactgtgccttcatctggcagaaggacggcgtgaagaagctgaacctgtacctgatcatcaactacttcaagggcggcaagctgcggttcaagaagatcaaacctgaagccttcgaagccaacagattctacaccgtgatcaacaaaaagagcggcgagatcgtgcccatggaggtgaacttcaacttcgacgaccccaacctgatcatcctgcctctggcctttggcaagagacagggcagagaattcatctggaacgacctgctgtccctggaaaccggcagcctgaagctggccaacggaagagtgatcgagaagacactgtacaacagaagaacccggcaggatgagcctgccctgttcgtggccctgaccttcgagcggcgggaggtcctggactcctccaatatcaaaccaatgaacctgatcggcgtggcaagaggcgaaaacatccccgccgtgatcgccctgaccgaccccgagggctgcccactgagccggtttaaggatagcctgggaaacccaacccacatcctgagaatcggcgagagctataaggagaagcagcggaccatccaggccaagaaggaggtggagcagcggagagccggcggctacagccggaagtacgccagcaaagccaagaatctggcagacgatatggtgagaaacaccgctagagatctgctgtactacgccgtgacccaggatgccatgctgatcttcgccaacctgagccggggcttcggccggcagggcaagcggaccttcatggccgagagacagtacacacggatggaggactggctgaccgccaagctggcctacgagggcctgagcaagacctacctgtccaagacactggcccagtacacctccaagacatgcagcaactgtgggtttaccatcaccagcgccgactacgacagggtgctggagaagctgaagaagacagcaacaggctggatgaccacaattaacggcaaggagctgaaggtggagggccagattacctactacaacagatacaagagacagaacgtagtcaaggacctgtccgtcgagctggatagactgagcgaagaatctgtgaacaacgacatctcctcctggacaaagggcagaagcggagaagctctgagcctcctgaagaaaagattctcccatagacccgtgcaggagaagttcgtgtgcctgaactgcggcttcgagacacacgcagccgagcaagccgccctgaacatcgccagatcctggctgttcctgcggagccaggagtacaagaaataccagacaaacaagacaaccggcaacaccgataagagagccttcgtcgagacctggcagtccttttaccggaagaagcttaaggaggtgtggaaacctgccgtgcggtctggcggatctggcggaggctcctatccaggagcccgtgaccttcaaggacgtggccgtggacttcacccaggaggagtggggcaggctggaccccgtgcagaggaccctgtacagggacgtgatgctggagacctacaggcacctgctgagcgtgggcaaccagatcgccaagcccgaggtgatcagcctgctggagcagggcgaggagccctggagcgtggagcaggcctacccccagagcacctgccccgccgtggacaccgagggatctggctccggcagcggccccaagaaaaagagaaaagtctaagctgccttctgcggggcttgccttctggccatgcccttcttctctcccttgcacctgtacctcttggtctttgaataaagcctgagtaggaaggctagcaaaaaaaaaaaaaaaaaaaaaaaaaaaaaaaaaaaaaaaaaaaaaaaaaaaaaaaaaaaaaaaaaaaaaaaaaaaaaaaa

SEQ ID NO: 16316 - RNA, 9497 nt, synthetic construct
  source 1..9497: mol_type = other RNA
aggaaataagagagaaaagaagagtaagaagaaatataagagccaccatggcccctaagaagaagcgtaaagtgagccggatggaacgcctcgtctacgaggtgcggcagaagtgcagaaacatcgaggacatctgcatctcctgcggatctctgaacgtgaccctggagcacccactgttcatcggcggcatgtgccagaactgtaaaaactgttttctggagtgtgcctatcaatacgacgatgacggctaccagagctactgcaccatctgttgcggcggaagagaggtgctgatgtgtggaaataacaactgctgccggtgcttctgcgtggaatgcgtggacctgctggtgggccccggcgccgcccaggccgctattaaggaagatccttggaactgctacatgtgcggccacaagggcacatacggcctgctgagacggagagaggactggcctagcagactgcagatgttcttcgccaataaccacgaccaggagttcgacccccctaaggtgtaccctcccgtccccgccgagaagagaaagcccatccgggtcctgagcctgttcgatggcatcgccaccggtctgctggtgctgaaggacctgggcatccaggtggataggtacattgcctccgaggtgtgcgaggactccatcaccgtgggaatggtgcgtcatcagggcaagatcatgtacgtgggcgacgtgcggagcgtgacacagaagcatatccaggagtggggccctttcgacctggtgatcggcggcagcccttgcaatgacctgagcatcgtgaacccagcccggaagggcctgtacgagggaaccggcagactgttcttcgagttttacagactgctgcacgacgcccggcctaaggaaggcgacgaccggcccttcttttggctgttcgagaatgtggtggccatgggagtcagcgacaagcgggatattagccggttcctggagagcaaccccgtgatgatcgatgccaaggaagtgagcgccgcccaccgggccagatacttctggggcaatctgcctggcatgaacagacccctggccagcaccgtgaacgacaagctggagctgcaggagtgcctggagcacggccggatcgccaagttcagcaaggtgagaaccatcaccacccgaagcaacagcatcaaacaaggcaaggaccagcactttcctgtgttcatgaacgagaaggaggacatcctgtggtgtaccgagatggagagagtgttcgggttcccagtccactacacagatgtcagcaacatgtctagactggccagacagagactgctgggaagaagctggtccgtccctgtgatcagacacctgttcgcccctctgaaggagtacttcgcctgcgtgagcagcggcaacagcaacgccaacagccggggccccagcttctctagcggcctggtgccactgtccctgagagggagccacatgggccccatggagatctacaaaaccgtgagcgcctggaagcggcagcctgtgcgcgtgctgagcctgtttcggaatatcgataaagtcctgaaaagcctgggattcctggagagcggctctggctccggcggtggcaccctgaagtacgtggaggatgtgacaaacgtggtcagacgggatgtggagaagtggggccccttcgatctggtgtacggcagcacccaacccctgggcagctcttgtgaccggtgccctggctggtacatgtttcagttccaccggatcctgcagtacgccctgccgagacaggagtcccagcggccattcttttggattttcatggacaacttgctgctgaccgaggatgaccaggaaactaccactcggttcctgcagaccgaagccgtgaccctgcaggacgtgagaggccgggactaccagaacgccatgcgggtgtggtccaacatccctggactgaaaagcaagcacgcacctctgacccctaaagaagaggagtacctgcaggcccaggtgcggagcagaagcaagctggacgcccctaaggtggatctgctggtgaagaattgcctcctgcccctgagagagtacttcaagtatttcagccagaatagtctgcccctgggaggcagcggcggcggcgccctggtgacatttgaggacgtcgccgtgcggttcacccaggaggaatgggctctgctggatccttctcagaaaatcctgtaccgggacgtgatgagagagacataccggaatctgacctccgtgggcatcaactgggaatgttgggaccttgaagcctgcttcagaagcctgggaagaaacctgagagtgcaggtggtgaagagaaagtgcgagctgaccaacagcggcccctgcgccgagggcggcccaagcagcggcgcccctcctcccagcggcggcagcccagccggctccccaacctctaccgaggagggcacctctgagtccgccacccccgagagcggccctggcacctccaccgagcccagcgagggcagcgcacccggcagccctgccggcagccccacctccacagaggagggaaccagcaccgagcccagcgaaggcagcgccccaggcaccagcaccgagcctagtgagcaggagattaaacggatcaacaagatcagaagaagacttgtgaaagacagcaacaccaagaaggccggcaagacaggccccatgaaaaccctgctggttagagtgatgacacccgatctgagagagcggctggaaaacctgagaaagaagcctgaaaatatcccccagcccatcagcaatacatctagagccaacctgaataagctgctgaccgattacaccgaaatgaagaaggcgatcctgcatgtgtactgggaagagttccagaaggaccctgtgggcctgatgagccgggtggcccagcctgccagcaagaagatcgatcagaacaagctgaaacctgagatggacgagaagggcaacctgaccaccgccggctttgcctgctctcagtgtggccagcccctgttcgtgtacaagctggagcaggtgtctgagaagggcaaggcttacaccaactacttcggacggtgcaatgtggccgagcacgaaaagctgatcctgctggcccagctgaagcccgagaaggatagcgacgaagccgtgacatatagcctgggaaagtttgggcagagggccctggatttctacagcattcatgtgaccaaggagtccacccaccccgtgaagcccctggcccagatcgccggaaacagatacgcctccggacctgtgggaaaggccctgagcgacgcatgtatgggcacaatcgcctccttcctgtctaagtaccaggacatcatcatcgaacaccagaaggtggtgaagggcaaccagaagagactggagagcctgcgggagctggccggcaaggaaaacctggaataccctagcgtgaccctgccacctcagcctcacaccaaggagggcgttgatgcctacaacgaagtgatcgcccgggtgcgaatgtgggtgaacctgaacctgtggcagaagctgaagctaagcagagatgatgccaagcctctgctgagactgaagggattcccttcctttcctctggtcgagagacaggccaacgaagtggactggtgggacatggtgtgtaacgtgaagaagctgatcaacgagaaaaaggaggatggcaaggtgttttggcagaatctggctggctacaagagacaggaagccctgagaccatacctgagcagcgaggaagatcggaagaagggaaagaaattcgctcggtaccagctgggcgacctgctgctgcacctggaaaagaagcacggcgaggactggggaaaggtgtacgacgaggcctgggagcggattgacaagaaagtggaaggcctgagcaagcacatcaagctggaagaggaacggagaagcgaggacgcccagagcaaggccgccctgaccgactggctgcgggctaaggccagcttcgtgatcgagggcctgaaggaggccgacaaggacgagttctgcagatgcgagctgaagctgcagaagtggtacggggacctgcggggaaagcccttcgccatcgaagccgagaacagcatcctggacatcagcggcttcagcaagcagtacaactgtgccttcatctggcagaaggacggcgtgaagaagctgaacctgtacctgatcatcaactacttcaagggcggcaagctgcggttcaagaagatcaaacctgaagccttcgaagccaacagattctacaccgtgatcaacaaaaagagcggcgagatcgtgcccatggaggtgaacttcaacttcgacgaccccaacctgatcatcctgcctctggcctttggcaagagacagggcagagaattcatctggaacgacctgctgtccctggaaaccggcagcctgaagctggccaacggaagagtgatcgagaagacactgtacaacagaagaacccggcaggatgagcctgccctgttcgtggccctgaccttcgagcggcgggaggtcctggactcctccaatatcaaaccaatgaacctgatcggcgtggcaagaggcgaaaacatccccgccgtgatcgccctgaccgaccccgagggctgcccactgagccggtttaaggatagcctgggaaacccaacccacatcctgagaatcggcgagagctataaggagaagcagcggaccatccaggccaagaaggaggtggagcagcggagagccggcggctacagccggaagtacgccagcaaagccaagaatctggcagacgatatggtgagaaacaccgctagagatctgctgtactacgccgtgacccaggatgccatgctgatcttcgccaacctgagccggggcttcggccggcagggcaagcggaccttcatggccgagagacagtacacacggatggaggactggctgaccgccaagctggcctacgagggcctgagcaagacctacctgtccaagacactggcccagtacacctccaagacatgcagcaactgtgggtttaccatcaccagcgccgactacgacagggtgctggagaagctgaagaagacagcaacaggctggatgaccacaattaacggcaaggagctgaaggtggagggccagattacctactacaacagatacaagagacagaacgtagtcaaggacctgtccgtcgagctggatagactgagcgaagaatctgtgaacaacgacatctcctcctggacaaagggcagaagcggagaagctctgagcctcctgaagaaaagattctcccatagacccgtgcaggagaagttcgtgtgcctgaactgcggcttcgagacacacgcagccgagcaagccgccctgaacatcgccagatcctggctgttcctgcggagccaggagtacaagaaataccagacaaacaagacaaccggcaacaccgataagagagccttcgtcgagacctggcagtccttttaccggaagaagcttaaggaggtgtggaaacctgccgtgcggtctggcggatctggcggaggctccgtgacctacgacgacgtgtgcatcgacttcacctgggaggagtggaccctgctggaccccagccagaagaagctgtacaaggacgtgatgctggagacctacaggaacctgaccgccatcggctacaactgggagaaccaccacgtggaggagtactaccagagcagcaggaggaacgccaggaacgagaagagccagaccgccgagaagcccagcgtgaacacccagtgcgtgaaggccttcacccacggcggcccaagcagcggcgcccctcctcccagcggcggcagcccagccggctccccaacctctaccgaggagggcacctctgagtccgccacccccgagagcggccctggcacctccaccgagcccagcgagggcagcgcacccggcagccctgccggcagccccacctccacagaggagggaaccagcaccgagcccagcgaaggcagcgccccaggcaccagcaccgagcctagtgagcaggagattaaacggatcaacaagatcagaagaagacttgtgaaagacagcaacaccaagaaggccggcaagacaggccccatgaaaaccctgctggttagagtgatgacacccgatctgagagagcggctggaaaacctgagaaagaagcctgaaaatatcccccagcccatcagcaatacatctagagccaacctgaataagctgctgaccgattacaccgaaatgaagaaggcgatcctgcatgtgtactgggaagagttccagaaggaccctgtgggcctgatgagccgggtggcccagcctgccagcaagaagatcgatcagaacaagctgaaacctgagatggacgagaagggcaacctgaccaccgccggctttgcctgctctcagtgtggccagcccctgttcgtgtacaagctggagcaggtgtctgagaagggcaaggcttacaccaactacttcggacggtgcaatgtggccgagcacgaaaagctgatcctgctggcccagctgaagcccgagaaggatagcgacgaagccgtgacatatagcctgggaaagtttgggcagagggccctggatttctacagcattcatgtgaccaaggagtccacccaccccgtgaagcccctggcccagatcgccggaaacagatacgcctccggacctgtgggaaaggccctgagcgacgcatgtatgggcacaatcgcctccttcctgtctaagtaccaggacatcatcatcgaacaccagaaggtggtgaagggcaaccagaagagactggagagcctgcgggagctggccggcaaggaaaacctggaataccctagcgtgaccctgccacctcagcctcacaccaaggagggcgttgatgcctacaacgaagtgatcgcccgggtgcgaatgtgggtgaacctgaacctgtggcagaagctgaagctaagcagagatgatgccaagcctctgctgagactgaagggattcccttcctttcctctggtcgagagacaggccaacgaagtggactggtgggacatggtgtgtaacgtgaagaagctgatcaacgagaaaaaggaggatggcaaggtgttttggcagaatctggctggctacaagagacaggaagccctgagaccatacctgagcagcgaggaagatcggaagaagggaaagaaattcgctcggtaccagctgggcgacctgctgctgcacctggaaaagaagcacggcgaggactggggaaaggtgtacgacgaggcctgggagcggattgacaagaaagtggaaggcctgagcaagcacatcaagctggaagaggaacggagaagcgaggacgcccagagcaaggccgccctgaccgactggctgcgggctaaggccagcttcgtgatcgagggcctgaaggaggccgacaaggacgagttctgcagatgcgagctgaagctgcagaagtggtacggggacctgcggggaaagcccttcgccatcgaagccgagaacagcatcctggacatcagcggcttcagcaagcagtacaactgtgccttcatctggcagaaggacggcgtgaagaagctgaacctgtacctgatcatcaactacttcaagggcggcaagctgcggttcaagaagatcaaacctgaagccttcgaagccaacagattctacaccgtgatcaacaaaaagagcggcgagatcgtgcccatggaggtgaacttcaacttcgacgaccccaacctgatcatcctgcctctggcctttggcaagagacagggcagagaattcatctggaacgacctgctgtccctggaaaccggcagcctgaagctggccaacggaagagtgatcgagaagacactgtacaacagaagaacccggcaggatgagcctgccctgttcgtggccctgaccttcgagcggcgggaggtcctggactcctccaatatcaaaccaatgaacctgatcggcgtggcaagaggcgaaaacatccccgccgtgatcgccctgaccgaccccgagggctgcccactgagccggtttaaggatagcctgggaaacccaacccacatcctgagaatcggcgagagctataaggagaagcagcggaccatccaggccaagaaggaggtggagcagcggagagccggcggctacagccggaagtacgccagcaaagccaagaatctggcagacgatatggtgagaaacaccgctagagatctgctgtactacgccgtgacccaggatgccatgctgatcttcgccaacctgagccggggcttcggccggcagggcaagcggaccttcatggccgagagacagtacacacggatggaggactggctgaccgccaagctggcctacgagggcctgagcaagacctacctgtccaagacactggcccagtacacctccaagacatgcagcaactgtgggtttaccatcaccagcgccgactacgacagggtgctggagaagctgaagaagacagcaacaggctggatgaccacaattaacggcaaggagctgaaggtggagggccagattacctactacaacagatacaagagacagaacgtagtcaaggacctgtccgtcgagctggatagactgagcgaagaatctgtgaacaacgacatctcctcctggacaaagggcagaagcggagaagctctgagcctcctgaagaaaagattctcccatagacccgtgcaggagaagttcgtgtgcctgaactgcggcttcgagacacacgcagccgagcaagccgccctgaacatcgccagatcctggctgttcctgcggagccaggagtacaagaaataccagacaaacaagacaaccggcaacaccgataagagagccttcgtcgagacctggcagtccttttaccggaagaagcttaaggaggtgtggaaacctgccgtgcggtctggcggatctggcggaggctcctgtgacctacgacgacgtgtgcatcgacttcacctgggaggagtggaccctgctggaccccagccagaagaagctgtacaaggacgtgatgctggagacctacaggaacctgaccgccatcggctacaactgggagaaccaccacgtggaggagtactaccagagcagcaggaggaacgccaggaacgagaagagccagaccgccgagaagcccagcgtgaacacccagtgcgtgaaggccttcacccacggatctggctccggcagcggccccaagaaaaagagaaaagtctaagctgccttctgcggggcttgccttctggccatgcccttcttctctcccttgcacctgtacctcttggtctttgaataaagcctgagtaggaaggctagcaaaaaaaaaaaaaaaaaaaaaaaaaaaaaaaaaaaaaaaaaaaaaaaaaaaaaaaaaaaaaaaaaaaaaaaaaaaaaaaa

SEQ ID NO: 16317 - RNA, 9485 nt, synthetic construct
  source 1..9485: mol_type = other RNA
aggaaataagagagaaaagaagagtaagaagaaatataagagccaccatggcccctaagaagaagcgtaaagtgagccggatggaacgcctcgtctacgaggtgcggcagaagtgcagaaacatcgaggacatctgcatctcctgcggatctctgaacgtgaccctggagcacccactgttcatcggcggcatgtgccagaactgtaaaaactgttttctggagtgtgcctatcaatacgacgatgacggctaccagagctactgcaccatctgttgcggcggaagagaggtgctgatgtgtggaaataacaactgctgccggtgcttctgcgtggaatgcgtggacctgctggtgggccccggcgccgcccaggccgctattaaggaagatccttggaactgctacatgtgcggccacaagggcacatacggcctgctgagacggagagaggactggcctagcagactgcagatgttcttcgccaataaccacgaccaggagttcgacccccctaaggtgtaccctcccgtccccgccgagaagagaaagcccatccgggtcctgagcctgttcgatggcatcgccaccggtctgctggtgctgaaggacctgggcatccaggtggataggtacattgcctccgaggtgtgcgaggactccatcaccgtgggaatggtgcgtcatcagggcaagatcatgtacgtgggcgacgtgcggagcgtgacacagaagcatatccaggagtggggccctttcgacctggtgatcggcggcagcccttgcaatgacctgagcatcgtgaacccagcccggaagggcctgtacgagggaaccggcagactgttcttcgagttttacagactgctgcacgacgcccggcctaaggaaggcgacgaccggcccttcttttggctgttcgagaatgtggtggccatgggagtcagcgacaagcgggatattagccggttcctggagagcaaccccgtgatgatcgatgccaaggaagtgagcgccgcccaccgggccagatacttctggggcaatctgcctggcatgaacagacccctggccagcaccgtgaacgacaagctggagctgcaggagtgcctggagcacggccggatcgccaagttcagcaaggtgagaaccatcaccacccgaagcaacagcatcaaacaaggcaaggaccagcactttcctgtgttcatgaacgagaaggaggacatcctgtggtgtaccgagatggagagagtgttcgggttcccagtccactacacagatgtcagcaacatgtctagactggccagacagagactgctgggaagaagctggtccgtccctgtgatcagacacctgttcgcccctctgaaggagtacttcgcctgcgtgagcagcggcaacagcaacgccaacagccggggccccagcttctctagcggcctggtgccactgtccctgagagggagccacatgggccccatggagatctacaaaaccgtgagcgcctggaagcggcagcctgtgcgcgtgctgagcctgtttcggaatatcgataaagtcctgaaaagcctgggattcctggagagcggctctggctccggcggtggcaccctgaagtacgtggaggatgtgacaaacgtggtcagacgggatgtggagaagtggggccccttcgatctggtgtacggcagcacccaacccctgggcagctcttgtgaccggtgccctggctggtacatgtttcagttccaccggatcctgcagtacgccctgccgagacaggagtcccagcggccattcttttggattttcatggacaacttgctgctgaccgaggatgaccaggaaactaccactcggttcctgcagaccgaagccgtgaccctgcaggacgtgagaggccgggactaccagaacgccatgcgggtgtggtccaacatccctggactgaaaagcaagcacgcacctctgacccctaaagaagaggagtacctgcaggcccaggtgcggagcagaagcaagctggacgcccctaaggtggatctgctggtgaagaattgcctcctgcccctgagagagtacttcaagtatttcagccagaatagtctgcccctgggaggcagcggcggcggcgccctggtgacatttgaggacgtcgccgtgcggttcacccaggaggaatgggctctgctggatccttctcagaaaatcctgtaccgggacgtgatgagagagacataccggaatctgacctccgtgggcatcaactgggaatgttgggaccttgaagcctgcttcagaagcctgggaagaaacctgagagtgcaggtggtgaagagaaagtgcgagctgaccaacagcggcccctgcgccgagggcggcccaagcagcggcgcccctcctcccagcggcggcagcccagccggctccccaacctctaccgaggagggcacctctgagtccgccacccccgagagcggccctggcacctccaccgagcccagcgagggcagcgcacccggcagccctgccggcagccccacctccacagaggagggaaccagcaccgagcccagcgaaggcagcgccccaggcaccagcaccgagcctagtgagcaggagattaaacggatcaacaagatcagaagaagacttgtgaaagacagcaacaccaagaaggccggcaagacaggccccatgaaaaccctgctggttagagtgatgacacccgatctgagagagcggctggaaaacctgagaaagaagcctgaaaatatcccccagcccatcagcaatacatctagagccaacctgaataagctgctgaccgattacaccgaaatgaagaaggcgatcctgcatgtgtactgggaagagttccagaaggaccctgtgggcctgatgagccgggtggcccagcctgccagcaagaagatcgatcagaacaagctgaaacctgagatggacgagaagggcaacctgaccaccgccggctttgcctgctctcagtgtggccagcccctgttcgtgtacaagctggagcaggtgtctgagaagggcaaggcttacaccaactacttcggacggtgcaatgtggccgagcacgaaaagctgatcctgctggcccagctgaagcccgagaaggatagcgacgaagccgtgacatatagcctgggaaagtttgggcagagggccctggatttctacagcattcatgtgaccaaggagtccacccaccccgtgaagcccctggcccagatcgccggaaacagatacgcctccggacctgtgggaaaggccctgagcgacgcatgtatgggcacaatcgcctccttcctgtctaagtaccaggacatcatcatcgaacaccagaaggtggtgaagggcaaccagaagagactggagagcctgcgggagctggccggcaaggaaaacctggaataccctagcgtgaccctgccacctcagcctcacaccaaggagggcgttgatgcctacaacgaagtgatcgcccgggtgcgaatgtgggtgaacctgaacctgtggcagaagctgaagctaagcagagatgatgccaagcctctgctgagactgaagggattcccttcctttcctctggtcgagagacaggccaacgaagtggactggtgggacatggtgtgtaacgtgaagaagctgatcaacgagaaaaaggaggatggcaaggtgttttggcagaatctggctggctacaagagacaggaagccctgagaccatacctgagcagcgaggaagatcggaagaagggaaagaaattcgctcggtaccagctgggcgacctgctgctgcacctggaaaagaagcacggcgaggactggggaaaggtgtacgacgaggcctgggagcggattgacaagaaagtggaaggcctgagcaagcacatcaagctggaagaggaacggagaagcgaggacgcccagagcaaggccgccctgaccgactggctgcgggctaaggccagcttcgtgatcgagggcctgaaggaggccgacaaggacgagttctgcagatgcgagctgaagctgcagaagtggtacggggacctgcggggaaagcccttcgccatcgaagccgagaacagcatcctggacatcagcggcttcagcaagcagtacaactgtgccttcatctggcagaaggacggcgtgaagaagctgaacctgtacctgatcatcaactacttcaagggcggcaagctgcggttcaagaagatcaaacctgaagccttcgaagccaacagattctacaccgtgatcaacaaaaagagcggcgagatcgtgcccatggaggtgaacttcaacttcgacgaccccaacctgatcatcctgcctctggcctttggcaagagacagggcagagaattcatctggaacgacctgctgtccctggaaaccggcagcctgaagctggccaacggaagagtgatcgagaagacactgtacaacagaagaacccggcaggatgagcctgccctgttcgtggccctgaccttcgagcggcgggaggtcctggactcctccaatatcaaaccaatgaacctgatcggcgtggcaagaggcgaaaacatccccgccgtgatcgccctgaccgaccccgagggctgcccactgagccggtttaaggatagcctgggaaacccaacccacatcctgagaatcggcgagagctataaggagaagcagcggaccatccaggccaagaaggaggtggagcagcggagagccggcggctacagccggaagtacgccagcaaagccaagaatctggcagacgatatggtgagaaacaccgctagagatctgctgtactacgccgtgacccaggatgccatgctgatcttcgccaacctgagccggggcttcggccggcagggcaagcggaccttcatggccgagagacagtacacacggatggaggactggctgaccgccaagctggcctacgagggcctgagcaagacctacctgtccaagacactggcccagtacacctccaagacatgcagcaactgtgggtttaccatcaccagcgccgactacgacagggtgctggagaagctgaagaagacagcaacaggctggatgaccacaattaacggcaaggagctgaaggtggagggccagattacctactacaacagatacaagagacagaacgtagtcaaggacctgtccgtcgagctggatagactgagcgaagaatctgtgaacaacgacatctcctcctggacaaagggcagaagcggagaagctctgagcctcctgaagaaaagattctcccatagacccgtgcaggagaagttcgtgtgcctgaactgcggcttcgagacacacgcagccgagcaagccgccctgaacatcgccagatcctggctgttcctgcggagccaggagtacaagaaataccagacaaacaagacaaccggcaacaccgataagagagccttcgtcgagacctggcagtccttttaccggaagaagcttaaggaggtgtggaaacctgccgtgcggtctggcggatctggcggaggctccatggagggcctggtgatgttcagggacgtggccgtggacttcagccaggaggagtgggcctgcctggaccccgcccagaggggcctgtacagggacgtgatgctggagaactaccaccacctggtgagcctgggcctgagcctgagcaagcccgacgtgatcagcctgctggagcagggcaaggagccctggatggtgagcaggaacatggccggcggctggtgccccgacaggctgaagaacggcggcccaagcagcggcgcccctcctcccagcggcggcagcccagccggctccccaacctctaccgaggagggcacctctgagtccgccacccccgagagcggccctggcacctccaccgagcccagcgagggcagcgcacccggcagccctgccggcagccccacctccacagaggagggaaccagcaccgagcccagcgaaggcagcgccccaggcaccagcaccgagcctagtgagcaggagattaaacggatcaacaagatcagaagaagacttgtgaaagacagcaacaccaagaaggccggcaagacaggccccatgaaaaccctgctggttagagtgatgacacccgatctgagagagcggctggaaaacctgagaaagaagcctgaaaatatcccccagcccatcagcaatacatctagagccaacctgaataagctgctgaccgattacaccgaaatgaagaaggcgatcctgcatgtgtactgggaagagttccagaaggaccctgtgggcctgatgagccgggtggcccagcctgccagcaagaagatcgatcagaacaagctgaaacctgagatggacgagaagggcaacctgaccaccgccggctttgcctgctctcagtgtggccagcccctgttcgtgtacaagctggagcaggtgtctgagaagggcaaggcttacaccaactacttcggacggtgcaatgtggccgagcacgaaaagctgatcctgctggcccagctgaagcccgagaaggatagcgacgaagccgtgacatatagcctgggaaagtttgggcagagggccctggatttctacagcattcatgtgaccaaggagtccacccaccccgtgaagcccctggcccagatcgccggaaacagatacgcctccggacctgtgggaaaggccctgagcgacgcatgtatgggcacaatcgcctccttcctgtctaagtaccaggacatcatcatcgaacaccagaaggtggtgaagggcaaccagaagagactggagagcctgcgggagctggccggcaaggaaaacctggaataccctagcgtgaccctgccacctcagcctcacaccaaggagggcgttgatgcctacaacgaagtgatcgcccgggtgcgaatgtgggtgaacctgaacctgtggcagaagctgaagctaagcagagatgatgccaagcctctgctgagactgaagggattcccttcctttcctctggtcgagagacaggccaacgaagtggactggtgggacatggtgtgtaacgtgaagaagctgatcaacgagaaaaaggaggatggcaaggtgttttggcagaatctggctggctacaagagacaggaagccctgagaccatacctgagcagcgaggaagatcggaagaagggaaagaaattcgctcggtaccagctgggcgacctgctgctgcacctggaaaagaagcacggcgaggactggggaaaggtgtacgacgaggcctgggagcggattgacaagaaagtggaaggcctgagcaagcacatcaagctggaagaggaacggagaagcgaggacgcccagagcaaggccgccctgaccgactggctgcgggctaaggccagcttcgtgatcgagggcctgaaggaggccgacaaggacgagttctgcagatgcgagctgaagctgcagaagtggtacggggacctgcggggaaagcccttcgccatcgaagccgagaacagcatcctggacatcagcggcttcagcaagcagtacaactgtgccttcatctggcagaaggacggcgtgaagaagctgaacctgtacctgatcatcaactacttcaagggcggcaagctgcggttcaagaagatcaaacctgaagccttcgaagccaacagattctacaccgtgatcaacaaaaagagcggcgagatcgtgcccatggaggtgaacttcaacttcgacgaccccaacctgatcatcctgcctctggcctttggcaagagacagggcagagaattcatctggaacgacctgctgtccctggaaaccggcagcctgaagctggccaacggaagagtgatcgagaagacactgtacaacagaagaacccggcaggatgagcctgccctgttcgtggccctgaccttcgagcggcgggaggtcctggactcctccaatatcaaaccaatgaacctgatcggcgtggcaagaggcgaaaacatccccgccgtgatcgccctgaccgaccccgagggctgcccactgagccggtttaaggatagcctgggaaacccaacccacatcctgagaatcggcgagagctataaggagaagcagcggaccatccaggccaagaaggaggtggagcagcggagagccggcggctacagccggaagtacgccagcaaagccaagaatctggcagacgatatggtgagaaacaccgctagagatctgctgtactacgccgtgacccaggatgccatgctgatcttcgccaacctgagccggggcttcggccggcagggcaagcggaccttcatggccgagagacagtacacacggatggaggactggctgaccgccaagctggcctacgagggcctgagcaagacctacctgtccaagacactggcccagtacacctccaagacatgcagcaactgtgggtttaccatcaccagcgccgactacgacagggtgctggagaagctgaagaagacagcaacaggctggatgaccacaattaacggcaaggagctgaaggtggagggccagattacctactacaacagatacaagagacagaacgtagtcaaggacctgtccgtcgagctggatagactgagcgaagaatctgtgaacaacgacatctcctcctggacaaagggcagaagcggagaagctctgagcctcctgaagaaaagattctcccatagacccgtgcaggagaagttcgtgtgcctgaactgcggcttcgagacacacgcagccgagcaagccgccctgaacatcgccagatcctggctgttcctgcggagccaggagtacaagaaataccagacaaacaagacaaccggcaacaccgataagagagccttcgtcgagacctggcagtccttttaccggaagaagcttaaggaggtgtggaaacctgccgtgcggtctggcggatctggcggaggctcctatggagggcctggtgatgttcagggacgtggccgtggacttcagccaggaggagtgggcctgcctggaccccgcccagaggggcctgtacagggacgtgatgctggagaactaccaccacctggtgagcctgggcctgagcctgagcaagcccgacgtgatcagcctgctggagcagggcaaggagccctggatggtgagcaggaacatggccggcggctggtgccccgacaggctgaagaacggatctggctccggcagcggccccaagaaaaagagaaaagtctaagctgccttctgcggggcttgccttctggccatgcccttcttctctcccttgcacctgtacctcttggtctttgaataaagcctgagtaggaaggctagcaaaaaaaaaaaaaaaaaaaaaaaaaaaaaaaaaaaaaaaaaaaaaaaaaaaaaaaaaaaaaaaaaaaaaaaaaaaaaaaa

SEQ ID NO: 16318 - RNA, 9485 nt, synthetic construct
  source 1..9485: mol_type = other RNA
aggaaataagagagaaaagaagagtaagaagaaatataagagccaccatggcccctaagaagaagcgtaaagtgagccggatggaacgcctcgtctacgaggtgcggcagaagtgcagaaacatcgaggacatctgcatctcctgcggatctctgaacgtgaccctggagcacccactgttcatcggcggcatgtgccagaactgtaaaaactgttttctggagtgtgcctatcaatacgacgatgacggctaccagagctactgcaccatctgttgcggcggaagagaggtgctgatgtgtggaaataacaactgctgccggtgcttctgcgtggaatgcgtggacctgctggtgggccccggcgccgcccaggccgctattaaggaagatccttggaactgctacatgtgcggccacaagggcacatacggcctgctgagacggagagaggactggcctagcagactgcagatgttcttcgccaataaccacgaccaggagttcgacccccctaaggtgtaccctcccgtccccgccgagaagagaaagcccatccgggtcctgagcctgttcgatggcatcgccaccggtctgctggtgctgaaggacctgggcatccaggtggataggtacattgcctccgaggtgtgcgaggactccatcaccgtgggaatggtgcgtcatcagggcaagatcatgtacgtgggcgacgtgcggagcgtgacacagaagcatatccaggagtggggccctttcgacctggtgatcggcggcagcccttgcaatgacctgagcatcgtgaacccagcccggaagggcctgtacgagggaaccggcagactgttcttcgagttttacagactgctgcacgacgcccggcctaaggaaggcgacgaccggcccttcttttggctgttcgagaatgtggtggccatgggagtcagcgacaagcgggatattagccggttcctggagagcaaccccgtgatgatcgatgccaaggaagtgagcgccgcccaccgggccagatacttctggggcaatctgcctggcatgaacagacccctggccagcaccgtgaacgacaagctggagctgcaggagtgcctggagcacggccggatcgccaagttcagcaaggtgagaaccatcaccacccgaagcaacagcatcaaacaaggcaaggaccagcactttcctgtgttcatgaacgagaaggaggacatcctgtggtgtaccgagatggagagagtgttcgggttcccagtccactacacagatgtcagcaacatgtctagactggccagacagagactgctgggaagaagctggtccgtccctgtgatcagacacctgttcgcccctctgaaggagtacttcgcctgcgtgagcagcggcaacagcaacgccaacagccggggccccagcttctctagcggcctggtgccactgtccctgagagggagccacatgggccccatggagatctacaaaaccgtgagcgcctggaagcggcagcctgtgcgcgtgctgagcctgtttcggaatatcgataaagtcctgaaaagcctgggattcctggagagcggctctggctccggcggtggcaccctgaagtacgtggaggatgtgacaaacgtggtcagacgggatgtggagaagtggggccccttcgatctggtgtacggcagcacccaacccctgggcagctcttgtgaccggtgccctggctggtacatgtttcagttccaccggatcctgcagtacgccctgccgagacaggagtcccagcggccattcttttggattttcatggacaacttgctgctgaccgaggatgaccaggaaactaccactcggttcctgcagaccgaagccgtgaccctgcaggacgtgagaggccgggactaccagaacgccatgcgggtgtggtccaacatccctggactgaaaagcaagcacgcacctctgacccctaaagaagaggagtacctgcaggcccaggtgcggagcagaagcaagctggacgcccctaaggtggatctgctggtgaagaattgcctcctgcccctgagagagtacttcaagtatttcagccagaatagtctgcccctgggaggcagcggcggcggcgccctggtgacatttgaggacgtcgccgtgcggttcacccaggaggaatgggctctgctggatccttctcagaaaatcctgtaccgggacgtgatgagagagacataccggaatctgacctccgtgggcatcaactgggaatgttgggaccttgaagcctgcttcagaagcctgggaagaaacctgagagtgcaggtggtgaagagaaagtgcgagctgaccaacagcggcccctgcgccgagggcggcccaagcagcggcgcccctcctcccagcggcggcagcccagccggctccccaacctctaccgaggagggcacctctgagtccgccacccccgagagcggccctggcacctccaccgagcccagcgagggcagcgcacccggcagccctgccggcagccccacctccacagaggagggaaccagcaccgagcccagcgaaggcagcgccccaggcaccagcaccgagcctagtgagcaggagattaaacggatcaacaagatcagaagaagacttgtgaaagacagcaacaccaagaaggccggcaagacaggccccatgaaaaccctgctggttagagtgatgacacccgatctgagagagcggctggaaaacctgagaaagaagcctgaaaatatcccccagcccatcagcaatacatctagagccaacctgaataagctgctgaccgattacaccgaaatgaagaaggcgatcctgcatgtgtactgggaagagttccagaaggaccctgtgggcctgatgagccgggtggcccagcctgccagcaagaagatcgatcagaacaagctgaaacctgagatggacgagaagggcaacctgaccaccgccggctttgcctgctctcagtgtggccagcccctgttcgtgtacaagctggagcaggtgtctgagaagggcaaggcttacaccaactacttcggacggtgcaatgtggccgagcacgaaaagctgatcctgctggcccagctgaagcccgagaaggatagcgacgaagccgtgacatatagcctgggaaagtttgggcagagggccctggatttctacagcattcatgtgaccaaggagtccacccaccccgtgaagcccctggcccagatcgccggaaacagatacgcctccggacctgtgggaaaggccctgagcgacgcatgtatgggcacaatcgcctccttcctgtctaagtaccaggacatcatcatcgaacaccagaaggtggtgaagggcaaccagaagagactggagagcctgcgggagctggccggcaaggaaaacctggaataccctagcgtgaccctgccacctcagcctcacaccaaggagggcgttgatgcctacaacgaagtgatcgcccgggtgcgaatgtgggtgaacctgaacctgtggcagaagctgaagctaagcagagatgatgccaagcctctgctgagactgaagggattcccttcctttcctctggtcgagagacaggccaacgaagtggactggtgggacatggtgtgtaacgtgaagaagctgatcaacgagaaaaaggaggatggcaaggtgttttggcagaatctggctggctacaagagacaggaagccctgagaccatacctgagcagcgaggaagatcggaagaagggaaagaaattcgctcggtaccagctgggcgacctgctgctgcacctggaaaagaagcacggcgaggactggggaaaggtgtacgacgaggcctgggagcggattgacaagaaagtggaaggcctgagcaagcacatcaagctggaagaggaacggagaagcgaggacgcccagagcaaggccgccctgaccgactggctgcgggctaaggccagcttcgtgatcgagggcctgaaggaggccgacaaggacgagttctgcagatgcgagctgaagctgcagaagtggtacggggacctgcggggaaagcccttcgccatcgaagccgagaacagcatcctggacatcagcggcttcagcaagcagtacaactgtgccttcatctggcagaaggacggcgtgaagaagctgaacctgtacctgatcatcaactacttcaagggcggcaagctgcggttcaagaagatcaaacctgaagccttcgaagccaacagattctacaccgtgatcaacaaaaagagcggcgagatcgtgcccatggaggtgaacttcaacttcgacgaccccaacctgatcatcctgcctctggcctttggcaagagacagggcagagaattcatctggaacgacctgctgtccctggaaaccggcagcctgaagctggccaacggaagagtgatcgagaagacactgtacaacagaagaacccggcaggatgagcctgccctgttcgtggccctgaccttcgagcggcgggaggtcctggactcctccaatatcaaaccaatgaacctgatcggcgtggcaagaggcgaaaacatccccgccgtgatcgccctgaccgaccccgagggctgcccactgagccggtttaaggatagcctgggaaacccaacccacatcctgagaatcggcgagagctataaggagaagcagcggaccatccaggccaagaaggaggtggagcagcggagagccggcggctacagccggaagtacgccagcaaagccaagaatctggcagacgatatggtgagaaacaccgctagagatctgctgtactacgccgtgacccaggatgccatgctgatcttcgccaacctgagccggggcttcggccggcagggcaagcggaccttcatggccgagagacagtacacacggatggaggactggctgaccgccaagctggcctacgagggcctgagcaagacctacctgtccaagacactggcccagtacacctccaagacatgcagcaactgtgggtttaccatcaccagcgccgactacgacagggtgctggagaagctgaagaagacagcaacaggctggatgaccacaattaacggcaaggagctgaaggtggagggccagattacctactacaacagatacaagagacagaacgtagtcaaggacctgtccgtcgagctggatagactgagcgaagaatctgtgaacaacgacatctcctcctggacaaagggcagaagcggagaagctctgagcctcctgaagaaaagattctcccatagacccgtgcaggagaagttcgtgtgcctgaactgcggcttcgagacacacgcagccgagcaagccgccctgaacatcgccagatcctggctgttcctgcggagccaggagtacaagaaataccagacaaacaagacaaccggcaacaccgataagagagccttcgtcgagacctggcagtccttttaccggaagaagcttaaggaggtgtggaaacctgccgtgcggtctggcggatctggcggaggctccgccagggagcccgtgagcttcgtggaggtggccgtgtacttcagcagggaggagtgggccctgctggaccccgcccagagggccctgtacagggacgtgatgctggagacctacgagagcgtggccagcctgggccccttccccgcccccaagcccgtggtgatcagcctgctggagggcggcgacgacccctggatccccgacgtgcacagccccgaggccgtgagcggcgacttcagccccggcggcccaagcagcggcgcccctcctcccagcggcggcagcccagccggctccccaacctctaccgaggagggcacctctgagtccgccacccccgagagcggccctggcacctccaccgagcccagcgagggcagcgcacccggcagccctgccggcagccccacctccacagaggagggaaccagcaccgagcccagcgaaggcagcgccccaggcaccagcaccgagcctagtgagcaggagattaaacggatcaacaagatcagaagaagacttgtgaaagacagcaacaccaagaaggccggcaagacaggccccatgaaaaccctgctggttagagtgatgacacccgatctgagagagcggctggaaaacctgagaaagaagcctgaaaatatcccccagcccatcagcaatacatctagagccaacctgaataagctgctgaccgattacaccgaaatgaagaaggcgatcctgcatgtgtactgggaagagttccagaaggaccctgtgggcctgatgagccgggtggcccagcctgccagcaagaagatcgatcagaacaagctgaaacctgagatggacgagaagggcaacctgaccaccgccggctttgcctgctctcagtgtggccagcccctgttcgtgtacaagctggagcaggtgtctgagaagggcaaggcttacaccaactacttcggacggtgcaatgtggccgagcacgaaaagctgatcctgctggcccagctgaagcccgagaaggatagcgacgaagccgtgacatatagcctgggaaagtttgggcagagggccctggatttctacagcattcatgtgaccaaggagtccacccaccccgtgaagcccctggcccagatcgccggaaacagatacgcctccggacctgtgggaaaggccctgagcgacgcatgtatgggcacaatcgcctccttcctgtctaagtaccaggacatcatcatcgaacaccagaaggtggtgaagggcaaccagaagagactggagagcctgcgggagctggccggcaaggaaaacctggaataccctagcgtgaccctgccacctcagcctcacaccaaggagggcgttgatgcctacaacgaagtgatcgcccgggtgcgaatgtgggtgaacctgaacctgtggcagaagctgaagctaagcagagatgatgccaagcctctgctgagactgaagggattcccttcctttcctctggtcgagagacaggccaacgaagtggactggtgggacatggtgtgtaacgtgaagaagctgatcaacgagaaaaaggaggatggcaaggtgttttggcagaatctggctggctacaagagacaggaagccctgagaccatacctgagcagcgaggaagatcggaagaagggaaagaaattcgctcggtaccagctgggcgacctgctgctgcacctggaaaagaagcacggcgaggactggggaaaggtgtacgacgaggcctgggagcggattgacaagaaagtggaaggcctgagcaagcacatcaagctggaagaggaacggagaagcgaggacgcccagagcaaggccgccctgaccgactggctgcgggctaaggccagcttcgtgatcgagggcctgaaggaggccgacaaggacgagttctgcagatgcgagctgaagctgcagaagtggtacggggacctgcggggaaagcccttcgccatcgaagccgagaacagcatcctggacatcagcggcttcagcaagcagtacaactgtgccttcatctggcagaaggacggcgtgaagaagctgaacctgtacctgatcatcaactacttcaagggcggcaagctgcggttcaagaagatcaaacctgaagccttcgaagccaacagattctacaccgtgatcaacaaaaagagcggcgagatcgtgcccatggaggtgaacttcaacttcgacgaccccaacctgatcatcctgcctctggcctttggcaagagacagggcagagaattcatctggaacgacctgctgtccctggaaaccggcagcctgaagctggccaacggaagagtgatcgagaagacactgtacaacagaagaacccggcaggatgagcctgccctgttcgtggccctgaccttcgagcggcgggaggtcctggactcctccaatatcaaaccaatgaacctgatcggcgtggcaagaggcgaaaacatccccgccgtgatcgccctgaccgaccccgagggctgcccactgagccggtttaaggatagcctgggaaacccaacccacatcctgagaatcggcgagagctataaggagaagcagcggaccatccaggccaagaaggaggtggagcagcggagagccggcggctacagccggaagtacgccagcaaagccaagaatctggcagacgatatggtgagaaacaccgctagagatctgctgtactacgccgtgacccaggatgccatgctgatcttcgccaacctgagccggggcttcggccggcagggcaagcggaccttcatggccgagagacagtacacacggatggaggactggctgaccgccaagctggcctacgagggcctgagcaagacctacctgtccaagacactggcccagtacacctccaagacatgcagcaactgtgggtttaccatcaccagcgccgactacgacagggtgctggagaagctgaagaagacagcaacaggctggatgaccacaattaacggcaaggagctgaaggtggagggccagattacctactacaacagatacaagagacagaacgtagtcaaggacctgtccgtcgagctggatagactgagcgaagaatctgtgaacaacgacatctcctcctggacaaagggcagaagcggagaagctctgagcctcctgaagaaaagattctcccatagacccgtgcaggagaagttcgtgtgcctgaactgcggcttcgagacacacgcagccgagcaagccgccctgaacatcgccagatcctggctgttcctgcggagccaggagtacaagaaataccagacaaacaagacaaccggcaacaccgataagagagccttcgtcgagacctggcagtccttttaccggaagaagcttaaggaggtgtggaaacctgccgtgcggtctggcggatctggcggaggctcctgccagggagcccgtgagcttcgtggaggtggccgtgtacttcagcagggaggagtgggccctgctggaccccgcccagagggccctgtacagggacgtgatgctggagacctacgagagcgtggccagcctgggccccttccccgcccccaagcccgtggtgatcagcctgctggagggcggcgacgacccctggatccccgacgtgcacagccccgaggccgtgagcggcgacttcagccccggatctggctccggcagcggccccaagaaaaagagaaaagtctaagctgccttctgcggggcttgccttctggccatgcccttcttctctcccttgcacctgtacctcttggtctttgaataaagcctgagtaggaaggctagcaaaaaaaaaaaaaaaaaaaaaaaaaaaaaaaaaaaaaaaaaaaaaaaaaaaaaaaaaaaaaaaaaaaaaaaaaaaaaaaa

SEQ ID NO: 16319 - RNA, 9485 nt, synthetic construct
  source 1..9485: mol_type = other RNA
aggaaataagagagaaaagaagagtaagaagaaatataagagccaccatggcccctaagaagaagcgtaaagtgagccggatggaacgcctcgtctacgaggtgcggcagaagtgcagaaacatcgaggacatctgcatctcctgcggatctctgaacgtgaccctggagcacccactgttcatcggcggcatgtgccagaactgtaaaaactgttttctggagtgtgcctatcaatacgacgatgacggctaccagagctactgcaccatctgttgcggcggaagagaggtgctgatgtgtggaaataacaactgctgccggtgcttctgcgtggaatgcgtggacctgctggtgggccccggcgccgcccaggccgctattaaggaagatccttggaactgctacatgtgcggccacaagggcacatacggcctgctgagacggagagaggactggcctagcagactgcagatgttcttcgccaataaccacgaccaggagttcgacccccctaaggtgtaccctcccgtccccgccgagaagagaaagcccatccgggtcctgagcctgttcgatggcatcgccaccggtctgctggtgctgaaggacctgggcatccaggtggataggtacattgcctccgaggtgtgcgaggactccatcaccgtgggaatggtgcgtcatcagggcaagatcatgtacgtgggcgacgtgcggagcgtgacacagaagcatatccaggagtggggccctttcgacctggtgatcggcggcagcccttgcaatgacctgagcatcgtgaacccagcccggaagggcctgtacgagggaaccggcagactgttcttcgagttttacagactgctgcacgacgcccggcctaaggaaggcgacgaccggcccttcttttggctgttcgagaatgtggtggccatgggagtcagcgacaagcgggatattagccggttcctggagagcaaccccgtgatgatcgatgccaaggaagtgagcgccgcccaccgggccagatacttctggggcaatctgcctggcatgaacagacccctggccagcaccgtgaacgacaagctggagctgcaggagtgcctggagcacggccggatcgccaagttcagcaaggtgagaaccatcaccacccgaagcaacagcatcaaacaaggcaaggaccagcactttcctgtgttcatgaacgagaaggaggacatcctgtggtgtaccgagatggagagagtgttcgggttcccagtccactacacagatgtcagcaacatgtctagactggccagacagagactgctgggaagaagctggtccgtccctgtgatcagacacctgttcgcccctctgaaggagtacttcgcctgcgtgagcagcggcaacagcaacgccaacagccggggccccagcttctctagcggcctggtgccactgtccctgagagggagccacatgggccccatggagatctacaaaaccgtgagcgcctggaagcggcagcctgtgcgcgtgctgagcctgtttcggaatatcgataaagtcctgaaaagcctgggattcctggagagcggctctggctccggcggtggcaccctgaagtacgtggaggatgtgacaaacgtggtcagacgggatgtggagaagtggggccccttcgatctggtgtacggcagcacccaacccctgggcagctcttgtgaccggtgccctggctggtacatgtttcagttccaccggatcctgcagtacgccctgccgagacaggagtcccagcggccattcttttggattttcatggacaacttgctgctgaccgaggatgaccaggaaactaccactcggttcctgcagaccgaagccgtgaccctgcaggacgtgagaggccgggactaccagaacgccatgcgggtgtggtccaacatccctggactgaaaagcaagcacgcacctctgacccctaaagaagaggagtacctgcaggcccaggtgcggagcagaagcaagctggacgcccctaaggtggatctgctggtgaagaattgcctcctgcccctgagagagtacttcaagtatttcagccagaatagtctgcccctgggaggcagcggcggcggcgccctggtgacatttgaggacgtcgccgtgcggttcacccaggaggaatgggctctgctggatccttctcagaaaatcctgtaccgggacgtgatgagagagacataccggaatctgacctccgtgggcatcaactgggaatgttgggaccttgaagcctgcttcagaagcctgggaagaaacctgagagtgcaggtggtgaagagaaagtgcgagctgaccaacagcggcccctgcgccgagggcggcccaagcagcggcgcccctcctcccagcggcggcagcccagccggctccccaacctctaccgaggagggcacctctgagtccgccacccccgagagcggccctggcacctccaccgagcccagcgagggcagcgcacccggcagccctgccggcagccccacctccacagaggagggaaccagcaccgagcccagcgaaggcagcgccccaggcaccagcaccgagcctagtgagcaggagattaaacggatcaacaagatcagaagaagacttgtgaaagacagcaacaccaagaaggccggcaagacaggccccatgaaaaccctgctggttagagtgatgacacccgatctgagagagcggctggaaaacctgagaaagaagcctgaaaatatcccccagcccatcagcaatacatctagagccaacctgaataagctgctgaccgattacaccgaaatgaagaaggcgatcctgcatgtgtactgggaagagttccagaaggaccctgtgggcctgatgagccgggtggcccagcctgccagcaagaagatcgatcagaacaagctgaaacctgagatggacgagaagggcaacctgaccaccgccggctttgcctgctctcagtgtggccagcccctgttcgtgtacaagctggagcaggtgtctgagaagggcaaggcttacaccaactacttcggacggtgcaatgtggccgagcacgaaaagctgatcctgctggcccagctgaagcccgagaaggatagcgacgaagccgtgacatatagcctgggaaagtttgggcagagggccctggatttctacagcattcatgtgaccaaggagtccacccaccccgtgaagcccctggcccagatcgccggaaacagatacgcctccggacctgtgggaaaggccctgagcgacgcatgtatgggcacaatcgcctccttcctgtctaagtaccaggacatcatcatcgaacaccagaaggtggtgaagggcaaccagaagagactggagagcctgcgggagctggccggcaaggaaaacctggaataccctagcgtgaccctgccacctcagcctcacaccaaggagggcgttgatgcctacaacgaagtgatcgcccgggtgcgaatgtgggtgaacctgaacctgtggcagaagctgaagctaagcagagatgatgccaagcctctgctgagactgaagggattcccttcctttcctctggtcgagagacaggccaacgaagtggactggtgggacatggtgtgtaacgtgaagaagctgatcaacgagaaaaaggaggatggcaaggtgttttggcagaatctggctggctacaagagacaggaagccctgagaccatacctgagcagcgaggaagatcggaagaagggaaagaaattcgctcggtaccagctgggcgacctgctgctgcacctggaaaagaagcacggcgaggactggggaaaggtgtacgacgaggcctgggagcggattgacaagaaagtggaaggcctgagcaagcacatcaagctggaagaggaacggagaagcgaggacgcccagagcaaggccgccctgaccgactggctgcgggctaaggccagcttcgtgatcgagggcctgaaggaggccgacaaggacgagttctgcagatgcgagctgaagctgcagaagtggtacggggacctgcggggaaagcccttcgccatcgaagccgagaacagcatcctggacatcagcggcttcagcaagcagtacaactgtgccttcatctggcagaaggacggcgtgaagaagctgaacctgtacctgatcatcaactacttcaagggcggcaagctgcggttcaagaagatcaaacctgaagccttcgaagccaacagattctacaccgtgatcaacaaaaagagcggcgagatcgtgcccatggaggtgaacttcaacttcgacgaccccaacctgatcatcctgcctctggcctttggcaagagacagggcagagaattcatctggaacgacctgctgtccctggaaaccggcagcctgaagctggccaacggaagagtgatcgagaagacactgtacaacagaagaacccggcaggatgagcctgccctgttcgtggccctgaccttcgagcggcgggaggtcctggactcctccaatatcaaaccaatgaacctgatcggcgtggcaagaggcgaaaacatccccgccgtgatcgccctgaccgaccccgagggctgcccactgagccggtttaaggatagcctgggaaacccaacccacatcctgagaatcggcgagagctataaggagaagcagcggaccatccaggccaagaaggaggtggagcagcggagagccggcggctacagccggaagtacgccagcaaagccaagaatctggcagacgatatggtgagaaacaccgctagagatctgctgtactacgccgtgacccaggatgccatgctgatcttcgccaacctgagccggggcttcggccggcagggcaagcggaccttcatggccgagagacagtacacacggatggaggactggctgaccgccaagctggcctacgagggcctgagcaagacctacctgtccaagacactggcccagtacacctccaagacatgcagcaactgtgggtttaccatcaccagcgccgactacgacagggtgctggagaagctgaagaagacagcaacaggctggatgaccacaattaacggcaaggagctgaaggtggagggccagattacctactacaacagatacaagagacagaacgtagtcaaggacctgtccgtcgagctggatagactgagcgaagaatctgtgaacaacgacatctcctcctggacaaagggcagaagcggagaagctctgagcctcctgaagaaaagattctcccatagacccgtgcaggagaagttcgtgtgcctgaactgcggcttcgagacacacgcagccgagcaagccgccctgaacatcgccagatcctggctgttcctgcggagccaggagtacaagaaataccagacaaacaagacaaccggcaacaccgataagagagccttcgtcgagacctggcagtccttttaccggaagaagcttaaggaggtgtggaaacctgccgtgcggtctggcggatctggcggaggctccgccagggccagcctgagcttcgaggacgtggccgtgggcttcagctgggaggagtggcagctgctggcccccagccagaaggacctgtacagggaggtgatgctggagaactacaggaacctggtgagcgtgggctaccaggccagcaagcccgacagcctgttccagctggagcagggcgagcccccctggaccgtggtgggcgccgcccagagccagacctgccaggaggagatctgggagggcggcccaagcagcggcgcccctcctcccagcggcggcagcccagccggctccccaacctctaccgaggagggcacctctgagtccgccacccccgagagcggccctggcacctccaccgagcccagcgagggcagcgcacccggcagccctgccggcagccccacctccacagaggagggaaccagcaccgagcccagcgaaggcagcgccccaggcaccagcaccgagcctagtgagcaggagattaaacggatcaacaagatcagaagaagacttgtgaaagacagcaacaccaagaaggccggcaagacaggccccatgaaaaccctgctggttagagtgatgacacccgatctgagagagcggctggaaaacctgagaaagaagcctgaaaatatcccccagcccatcagcaatacatctagagccaacctgaataagctgctgaccgattacaccgaaatgaagaaggcgatcctgcatgtgtactgggaagagttccagaaggaccctgtgggcctgatgagccgggtggcccagcctgccagcaagaagatcgatcagaacaagctgaaacctgagatggacgagaagggcaacctgaccaccgccggctttgcctgctctcagtgtggccagcccctgttcgtgtacaagctggagcaggtgtctgagaagggcaaggcttacaccaactacttcggacggtgcaatgtggccgagcacgaaaagctgatcctgctggcccagctgaagcccgagaaggatagcgacgaagccgtgacatatagcctgggaaagtttgggcagagggccctggatttctacagcattcatgtgaccaaggagtccacccaccccgtgaagcccctggcccagatcgccggaaacagatacgcctccggacctgtgggaaaggccctgagcgacgcatgtatgggcacaatcgcctccttcctgtctaagtaccaggacatcatcatcgaacaccagaaggtggtgaagggcaaccagaagagactggagagcctgcgggagctggccggcaaggaaaacctggaataccctagcgtgaccctgccacctcagcctcacaccaaggagggcgttgatgcctacaacgaagtgatcgcccgggtgcgaatgtgggtgaacctgaacctgtggcagaagctgaagctaagcagagatgatgccaagcctctgctgagactgaagggattcccttcctttcctctggtcgagagacaggccaacgaagtggactggtgggacatggtgtgtaacgtgaagaagctgatcaacgagaaaaaggaggatggcaaggtgttttggcagaatctggctggctacaagagacaggaagccctgagaccatacctgagcagcgaggaagatcggaagaagggaaagaaattcgctcggtaccagctgggcgacctgctgctgcacctggaaaagaagcacggcgaggactggggaaaggtgtacgacgaggcctgggagcggattgacaagaaagtggaaggcctgagcaagcacatcaagctggaagaggaacggagaagcgaggacgcccagagcaaggccgccctgaccgactggctgcgggctaaggccagcttcgtgatcgagggcctgaaggaggccgacaaggacgagttctgcagatgcgagctgaagctgcagaagtggtacggggacctgcggggaaagcccttcgccatcgaagccgagaacagcatcctggacatcagcggcttcagcaagcagtacaactgtgccttcatctggcagaaggacggcgtgaagaagctgaacctgtacctgatcatcaactacttcaagggcggcaagctgcggttcaagaagatcaaacctgaagccttcgaagccaacagattctacaccgtgatcaacaaaaagagcggcgagatcgtgcccatggaggtgaacttcaacttcgacgaccccaacctgatcatcctgcctctggcctttggcaagagacagggcagagaattcatctggaacgacctgctgtccctggaaaccggcagcctgaagctggccaacggaagagtgatcgagaagacactgtacaacagaagaacccggcaggatgagcctgccctgttcgtggccctgaccttcgagcggcgggaggtcctggactcctccaatatcaaaccaatgaacctgatcggcgtggcaagaggcgaaaacatccccgccgtgatcgccctgaccgaccccgagggctgcccactgagccggtttaaggatagcctgggaaacccaacccacatcctgagaatcggcgagagctataaggagaagcagcggaccatccaggccaagaaggaggtggagcagcggagagccggcggctacagccggaagtacgccagcaaagccaagaatctggcagacgatatggtgagaaacaccgctagagatctgctgtactacgccgtgacccaggatgccatgctgatcttcgccaacctgagccggggcttcggccggcagggcaagcggaccttcatggccgagagacagtacacacggatggaggactggctgaccgccaagctggcctacgagggcctgagcaagacctacctgtccaagacactggcccagtacacctccaagacatgcagcaactgtgggtttaccatcaccagcgccgactacgacagggtgctggagaagctgaagaagacagcaacaggctggatgaccacaattaacggcaaggagctgaaggtggagggccagattacctactacaacagatacaagagacagaacgtagtcaaggacctgtccgtcgagctggatagactgagcgaagaatctgtgaacaacgacatctcctcctggacaaagggcagaagcggagaagctctgagcctcctgaagaaaagattctcccatagacccgtgcaggagaagttcgtgtgcctgaactgcggcttcgagacacacgcagccgagcaagccgccctgaacatcgccagatcctggctgttcctgcggagccaggagtacaagaaataccagacaaacaagacaaccggcaacaccgataagagagccttcgtcgagacctggcagtccttttaccggaagaagcttaaggaggtgtggaaacctgccgtgcggtctggcggatctggcggaggctcctgccagggccagcctgagcttcgaggacgtggccgtgggcttcagctgggaggagtggcagctgctggcccccagccagaaggacctgtacagggaggtgatgctggagaactacaggaacctggtgagcgtgggctaccaggccagcaagcccgacagcctgttccagctggagcagggcgagcccccctggaccgtggtgggcgccgcccagagccagacctgccaggaggagatctgggagggatctggctccggcagcggccccaagaaaaagagaaaagtctaagctgccttctgcggggcttgccttctggccatgcccttcttctctcccttgcacctgtacctcttggtctttgaataaagcctgagtaggaaggctagcaaaaaaaaaaaaaaaaaaaaaaaaaaaaaaaaaaaaaaaaaaaaaaaaaaaaaaaaaaaaaaaaaaaaaaaaaaaaaaaa

SEQ ID NO: 16320 - RNA, 9485 nt, synthetic construct
  source 1..9485: mol_type = other RNA
aggaaataagagagaaaagaagagtaagaagaaatataagagccaccatggcccctaagaagaagcgtaaagtgagccggatggaacgcctcgtctacgaggtgcggcagaagtgcagaaacatcgaggacatctgcatctcctgcggatctctgaacgtgaccctggagcacccactgttcatcggcggcatgtgccagaactgtaaaaactgttttctggagtgtgcctatcaatacgacgatgacggctaccagagctactgcaccatctgttgcggcggaagagaggtgctgatgtgtggaaataacaactgctgccggtgcttctgcgtggaatgcgtggacctgctggtgggccccggcgccgcccaggccgctattaaggaagatccttggaactgctacatgtgcggccacaagggcacatacggcctgctgagacggagagaggactggcctagcagactgcagatgttcttcgccaataaccacgaccaggagttcgacccccctaaggtgtaccctcccgtccccgccgagaagagaaagcccatccgggtcctgagcctgttcgatggcatcgccaccggtctgctggtgctgaaggacctgggcatccaggtggataggtacattgcctccgaggtgtgcgaggactccatcaccgtgggaatggtgcgtcatcagggcaagatcatgtacgtgggcgacgtgcggagcgtgacacagaagcatatccaggagtggggccctttcgacctggtgatcggcggcagcccttgcaatgacctgagcatcgtgaacccagcccggaagggcctgtacgagggaaccggcagactgttcttcgagttttacagactgctgcacgacgcccggcctaaggaaggcgacgaccggcccttcttttggctgttcgagaatgtggtggccatgggagtcagcgacaagcgggatattagccggttcctggagagcaaccccgtgatgatcgatgccaaggaagtgagcgccgcccaccgggccagatacttctggggcaatctgcctggcatgaacagacccctggccagcaccgtgaacgacaagctggagctgcaggagtgcctggagcacggccggatcgccaagttcagcaaggtgagaaccatcaccacccgaagcaacagcatcaaacaaggcaaggaccagcactttcctgtgttcatgaacgagaaggaggacatcctgtggtgtaccgagatggagagagtgttcgggttcccagtccactacacagatgtcagcaacatgtctagactggccagacagagactgctgggaagaagctggtccgtccctgtgatcagacacctgttcgcccctctgaaggagtacttcgcctgcgtgagcagcggcaacagcaacgccaacagccggggccccagcttctctagcggcctggtgccactgtccctgagagggagccacatgggccccatggagatctacaaaaccgtgagcgcctggaagcggcagcctgtgcgcgtgctgagcctgtttcggaatatcgataaagtcctgaaaagcctgggattcctggagagcggctctggctccggcggtggcaccctgaagtacgtggaggatgtgacaaacgtggtcagacgggatgtggagaagtggggccccttcgatctggtgtacggcagcacccaacccctgggcagctcttgtgaccggtgccctggctggtacatgtttcagttccaccggatcctgcagtacgccctgccgagacaggagtcccagcggccattcttttggattttcatggacaacttgctgctgaccgaggatgaccaggaaactaccactcggttcctgcagaccgaagccgtgaccctgcaggacgtgagaggccgggactaccagaacgccatgcgggtgtggtccaacatccctggactgaaaagcaagcacgcacctctgacccctaaagaagaggagtacctgcaggcccaggtgcggagcagaagcaagctggacgcccctaaggtggatctgctggtgaagaattgcctcctgcccctgagagagtacttcaagtatttcagccagaatagtctgcccctgggaggcagcggcggcggcgccctggtgacatttgaggacgtcgccgtgcggttcacccaggaggaatgggctctgctggatccttctcagaaaatcctgtaccgggacgtgatgagagagacataccggaatctgacctccgtgggcatcaactgggaatgttgggaccttgaagcctgcttcagaagcctgggaagaaacctgagagtgcaggtggtgaagagaaagtgcgagctgaccaacagcggcccctgcgccgagggcggcccaagcagcggcgcccctcctcccagcggcggcagcccagccggctccccaacctctaccgaggagggcacctctgagtccgccacccccgagagcggccctggcacctccaccgagcccagcgagggcagcgcacccggcagccctgccggcagccccacctccacagaggagggaaccagcaccgagcccagcgaaggcagcgccccaggcaccagcaccgagcctagtgagcaggagattaaacggatcaacaagatcagaagaagacttgtgaaagacagcaacaccaagaaggccggcaagacaggccccatgaaaaccctgctggttagagtgatgacacccgatctgagagagcggctggaaaacctgagaaagaagcctgaaaatatcccccagcccatcagcaatacatctagagccaacctgaataagctgctgaccgattacaccgaaatgaagaaggcgatcctgcatgtgtactgggaagagttccagaaggaccctgtgggcctgatgagccgggtggcccagcctgccagcaagaagatcgatcagaacaagctgaaacctgagatggacgagaagggcaacctgaccaccgccggctttgcctgctctcagtgtggccagcccctgttcgtgtacaagctggagcaggtgtctgagaagggcaaggcttacaccaactacttcggacggtgcaatgtggccgagcacgaaaagctgatcctgctggcccagctgaagcccgagaaggatagcgacgaagccgtgacatatagcctgggaaagtttgggcagagggccctggatttctacagcattcatgtgaccaaggagtccacccaccccgtgaagcccctggcccagatcgccggaaacagatacgcctccggacctgtgggaaaggccctgagcgacgcatgtatgggcacaatcgcctccttcctgtctaagtaccaggacatcatcatcgaacaccagaaggtggtgaagggcaaccagaagagactggagagcctgcgggagctggccggcaaggaaaacctggaataccctagcgtgaccctgccacctcagcctcacaccaaggagggcgttgatgcctacaacgaagtgatcgcccgggtgcgaatgtgggtgaacctgaacctgtggcagaagctgaagctaagcagagatgatgccaagcctctgctgagactgaagggattcccttcctttcctctggtcgagagacaggccaacgaagtggactggtgggacatggtgtgtaacgtgaagaagctgatcaacgagaaaaaggaggatggcaaggtgttttggcagaatctggctggctacaagagacaggaagccctgagaccatacctgagcagcgaggaagatcggaagaagggaaagaaattcgctcggtaccagctgggcgacctgctgctgcacctggaaaagaagcacggcgaggactggggaaaggtgtacgacgaggcctgggagcggattgacaagaaagtggaaggcctgagcaagcacatcaagctggaagaggaacggagaagcgaggacgcccagagcaaggccgccctgaccgactggctgcgggctaaggccagcttcgtgatcgagggcctgaaggaggccgacaaggacgagttctgcagatgcgagctgaagctgcagaagtggtacggggacctgcggggaaagcccttcgccatcgaagccgagaacagcatcctggacatcagcggcttcagcaagcagtacaactgtgccttcatctggcagaaggacggcgtgaagaagctgaacctgtacctgatcatcaactacttcaagggcggcaagctgcggttcaagaagatcaaacctgaagccttcgaagccaacagattctacaccgtgatcaacaaaaagagcggcgagatcgtgcccatggaggtgaacttcaacttcgacgaccccaacctgatcatcctgcctctggcctttggcaagagacagggcagagaattcatctggaacgacctgctgtccctggaaaccggcagcctgaagctggccaacggaagagtgatcgagaagacactgtacaacagaagaacccggcaggatgagcctgccctgttcgtggccctgaccttcgagcggcgggaggtcctggactcctccaatatcaaaccaatgaacctgatcggcgtggcaagaggcgaaaacatccccgccgtgatcgccctgaccgaccccgagggctgcccactgagccggtttaaggatagcctgggaaacccaacccacatcctgagaatcggcgagagctataaggagaagcagcggaccatccaggccaagaaggaggtggagcagcggagagccggcggctacagccggaagtacgccagcaaagccaagaatctggcagacgatatggtgagaaacaccgctagagatctgctgtactacgccgtgacccaggatgccatgctgatcttcgccaacctgagccggggcttcggccggcagggcaagcggaccttcatggccgagagacagtacacacggatggaggactggctgaccgccaagctggcctacgagggcctgagcaagacctacctgtccaagacactggcccagtacacctccaagacatgcagcaactgtgggtttaccatcaccagcgccgactacgacagggtgctggagaagctgaagaagacagcaacaggctggatgaccacaattaacggcaaggagctgaaggtggagggccagattacctactacaacagatacaagagacagaacgtagtcaaggacctgtccgtcgagctggatagactgagcgaagaatctgtgaacaacgacatctcctcctggacaaagggcagaagcggagaagctctgagcctcctgaagaaaagattctcccatagacccgtgcaggagaagttcgtgtgcctgaactgcggcttcgagacacacgcagccgagcaagccgccctgaacatcgccagatcctggctgttcctgcggagccaggagtacaagaaataccagacaaacaagacaaccggcaacaccgataagagagccttcgtcgagacctggcagtccttttaccggaagaagcttaaggaggtgtggaaacctgccgtgcggtctggcggatctggcggaggctccagccagggcctggtgaccttcgaggacgtggccgtgtacttcagcctggaggagtgggagaggctgaacgtggagcagagggccctgtaccaggaggtgatgcagggcaactacggcatcctggtgagcctgggctaccccatccccaagcccgacctgatcttcaggctggagcagggcgaggagccctgggtgcccgacagcccccaccccgaggagggcgacatcgtgaccggcgtgtacggcggcccaagcagcggcgcccctcctcccagcggcggcagcccagccggctccccaacctctaccgaggagggcacctctgagtccgccacccccgagagcggccctggcacctccaccgagcccagcgagggcagcgcacccggcagccctgccggcagccccacctccacagaggagggaaccagcaccgagcccagcgaaggcagcgccccaggcaccagcaccgagcctagtgagcaggagattaaacggatcaacaagatcagaagaagacttgtgaaagacagcaacaccaagaaggccggcaagacaggccccatgaaaaccctgctggttagagtgatgacacccgatctgagagagcggctggaaaacctgagaaagaagcctgaaaatatcccccagcccatcagcaatacatctagagccaacctgaataagctgctgaccgattacaccgaaatgaagaaggcgatcctgcatgtgtactgggaagagttccagaaggaccctgtgggcctgatgagccgggtggcccagcctgccagcaagaagatcgatcagaacaagctgaaacctgagatggacgagaagggcaacctgaccaccgccggctttgcctgctctcagtgtggccagcccctgttcgtgtacaagctggagcaggtgtctgagaagggcaaggcttacaccaactacttcggacggtgcaatgtggccgagcacgaaaagctgatcctgctggcccagctgaagcccgagaaggatagcgacgaagccgtgacatatagcctgggaaagtttgggcagagggccctggatttctacagcattcatgtgaccaaggagtccacccaccccgtgaagcccctggcccagatcgccggaaacagatacgcctccggacctgtgggaaaggccctgagcgacgcatgtatgggcacaatcgcctccttcctgtctaagtaccaggacatcatcatcgaacaccagaaggtggtgaagggcaaccagaagagactggagagcctgcgggagctggccggcaaggaaaacctggaataccctagcgtgaccctgccacctcagcctcacaccaaggagggcgttgatgcctacaacgaagtgatcgcccgggtgcgaatgtgggtgaacctgaacctgtggcagaagctgaagctaagcagagatgatgccaagcctctgctgagactgaagggattcccttcctttcctctggtcgagagacaggccaacgaagtggactggtgggacatggtgtgtaacgtgaagaagctgatcaacgagaaaaaggaggatggcaaggtgttttggcagaatctggctggctacaagagacaggaagccctgagaccatacctgagcagcgaggaagatcggaagaagggaaagaaattcgctcggtaccagctgggcgacctgctgctgcacctggaaaagaagcacggcgaggactggggaaaggtgtacgacgaggcctgggagcggattgacaagaaagtggaaggcctgagcaagcacatcaagctggaagaggaacggagaagcgaggacgcccagagcaaggccgccctgaccgactggctgcgggctaaggccagcttcgtgatcgagggcctgaaggaggccgacaaggacgagttctgcagatgcgagctgaagctgcagaagtggtacggggacctgcggggaaagcccttcgccatcgaagccgagaacagcatcctggacatcagcggcttcagcaagcagtacaactgtgccttcatctggcagaaggacggcgtgaagaagctgaacctgtacctgatcatcaactacttcaagggcggcaagctgcggttcaagaagatcaaacctgaagccttcgaagccaacagattctacaccgtgatcaacaaaaagagcggcgagatcgtgcccatggaggtgaacttcaacttcgacgaccccaacctgatcatcctgcctctggcctttggcaagagacagggcagagaattcatctggaacgacctgctgtccctggaaaccggcagcctgaagctggccaacggaagagtgatcgagaagacactgtacaacagaagaacccggcaggatgagcctgccctgttcgtggccctgaccttcgagcggcgggaggtcctggactcctccaatatcaaaccaatgaacctgatcggcgtggcaagaggcgaaaacatccccgccgtgatcgccctgaccgaccccgagggctgcccactgagccggtttaaggatagcctgggaaacccaacccacatcctgagaatcggcgagagctataaggagaagcagcggaccatccaggccaagaaggaggtggagcagcggagagccggcggctacagccggaagtacgccagcaaagccaagaatctggcagacgatatggtgagaaacaccgctagagatctgctgtactacgccgtgacccaggatgccatgctgatcttcgccaacctgagccggggcttcggccggcagggcaagcggaccttcatggccgagagacagtacacacggatggaggactggctgaccgccaagctggcctacgagggcctgagcaagacctacctgtccaagacactggcccagtacacctccaagacatgcagcaactgtgggtttaccatcaccagcgccgactacgacagggtgctggagaagctgaagaagacagcaacaggctggatgaccacaattaacggcaaggagctgaaggtggagggccagattacctactacaacagatacaagagacagaacgtagtcaaggacctgtccgtcgagctggatagactgagcgaagaatctgtgaacaacgacatctcctcctggacaaagggcagaagcggagaagctctgagcctcctgaagaaaagattctcccatagacccgtgcaggagaagttcgtgtgcctgaactgcggcttcgagacacacgcagccgagcaagccgccctgaacatcgccagatcctggctgttcctgcggagccaggagtacaagaaataccagacaaacaagacaaccggcaacaccgataagagagccttcgtcgagacctggcagtccttttaccggaagaagcttaaggaggtgtggaaacctgccgtgcggtctggcggatctggcggaggctcctagccagggcctggtgaccttcgaggacgtggccgtgtacttcagcctggaggagtgggagaggctgaacgtggagcagagggccctgtaccaggaggtgatgcagggcaactacggcatcctggtgagcctgggctaccccatccccaagcccgacctgatcttcaggctggagcagggcgaggagccctgggtgcccgacagcccccaccccgaggagggcgacatcgtgaccggcgtgtacggatctggctccggcagcggccccaagaaaaagagaaaagtctaagctgccttctgcggggcttgccttctggccatgcccttcttctctcccttgcacctgtacctcttggtctttgaataaagcctgagtaggaaggctagcaaaaaaaaaaaaaaaaaaaaaaaaaaaaaaaaaaaaaaaaaaaaaaaaaaaaaaaaaaaaaaaaaaaaaaaaaaaaaaaa

SEQ ID NO: 16321 - RNA, 9485 nt, synthetic construct
  source 1..9485: mol_type = other RNA
aggaaataagagagaaaagaagagtaagaagaaatataagagccaccatggcccctaagaagaagcgtaaagtgagccggatggaacgcctcgtctacgaggtgcggcagaagtgcagaaacatcgaggacatctgcatctcctgcggatctctgaacgtgaccctggagcacccactgttcatcggcggcatgtgccagaactgtaaaaactgttttctggagtgtgcctatcaatacgacgatgacggctaccagagctactgcaccatctgttgcggcggaagagaggtgctgatgtgtggaaataacaactgctgccggtgcttctgcgtggaatgcgtggacctgctggtgggccccggcgccgcccaggccgctattaaggaagatccttggaactgctacatgtgcggccacaagggcacatacggcctgctgagacggagagaggactggcctagcagactgcagatgttcttcgccaataaccacgaccaggagttcgacccccctaaggtgtaccctcccgtccccgccgagaagagaaagcccatccgggtcctgagcctgttcgatggcatcgccaccggtctgctggtgctgaaggacctgggcatccaggtggataggtacattgcctccgaggtgtgcgaggactccatcaccgtgggaatggtgcgtcatcagggcaagatcatgtacgtgggcgacgtgcggagcgtgacacagaagcatatccaggagtggggccctttcgacctggtgatcggcggcagcccttgcaatgacctgagcatcgtgaacccagcccggaagggcctgtacgagggaaccggcagactgttcttcgagttttacagactgctgcacgacgcccggcctaaggaaggcgacgaccggcccttcttttggctgttcgagaatgtggtggccatgggagtcagcgacaagcgggatattagccggttcctggagagcaaccccgtgatgatcgatgccaaggaagtgagcgccgcccaccgggccagatacttctggggcaatctgcctggcatgaacagacccctggccagcaccgtgaacgacaagctggagctgcaggagtgcctggagcacggccggatcgccaagttcagcaaggtgagaaccatcaccacccgaagcaacagcatcaaacaaggcaaggaccagcactttcctgtgttcatgaacgagaaggaggacatcctgtggtgtaccgagatggagagagtgttcgggttcccagtccactacacagatgtcagcaacatgtctagactggccagacagagactgctgggaagaagctggtccgtccctgtgatcagacacctgttcgcccctctgaaggagtacttcgcctgcgtgagcagcggcaacagcaacgccaacagccggggccccagcttctctagcggcctggtgccactgtccctgagagggagccacatgggccccatggagatctacaaaaccgtgagcgcctggaagcggcagcctgtgcgcgtgctgagcctgtttcggaatatcgataaagtcctgaaaagcctgggattcctggagagcggctctggctccggcggtggcaccctgaagtacgtggaggatgtgacaaacgtggtcagacgggatgtggagaagtggggccccttcgatctggtgtacggcagcacccaacccctgggcagctcttgtgaccggtgccctggctggtacatgtttcagttccaccggatcctgcagtacgccctgccgagacaggagtcccagcggccattcttttggattttcatggacaacttgctgctgaccgaggatgaccaggaaactaccactcggttcctgcagaccgaagccgtgaccctgcaggacgtgagaggccgggactaccagaacgccatgcgggtgtggtccaacatccctggactgaaaagcaagcacgcacctctgacccctaaagaagaggagtacctgcaggcccaggtgcggagcagaagcaagctggacgcccctaaggtggatctgctggtgaagaattgcctcctgcccctgagagagtacttcaagtatttcagccagaatagtctgcccctgggaggcagcggcggcggcgccctggtgacatttgaggacgtcgccgtgcggttcacccaggaggaatgggctctgctggatccttctcagaaaatcctgtaccgggacgtgatgagagagacataccggaatctgacctccgtgggcatcaactgggaatgttgggaccttgaagcctgcttcagaagcctgggaagaaacctgagagtgcaggtggtgaagagaaagtgcgagctgaccaacagcggcccctgcgccgagggcggcccaagcagcggcgcccctcctcccagcggcggcagcccagccggctccccaacctctaccgaggagggcacctctgagtccgccacccccgagagcggccctggcacctccaccgagcccagcgagggcagcgcacccggcagccctgccggcagccccacctccacagaggagggaaccagcaccgagcccagcgaaggcagcgccccaggcaccagcaccgagcctagtgagcaggagattaaacggatcaacaagatcagaagaagacttgtgaaagacagcaacaccaagaaggccggcaagacaggccccatgaaaaccctgctggttagagtgatgacacccgatctgagagagcggctggaaaacctgagaaagaagcctgaaaatatcccccagcccatcagcaatacatctagagccaacctgaataagctgctgaccgattacaccgaaatgaagaaggcgatcctgcatgtgtactgggaagagttccagaaggaccctgtgggcctgatgagccgggtggcccagcctgccagcaagaagatcgatcagaacaagctgaaacctgagatggacgagaagggcaacctgaccaccgccggctttgcctgctctcagtgtggccagcccctgttcgtgtacaagctggagcaggtgtctgagaagggcaaggcttacaccaactacttcggacggtgcaatgtggccgagcacgaaaagctgatcctgctggcccagctgaagcccgagaaggatagcgacgaagccgtgacatatagcctgggaaagtttgggcagagggccctggatttctacagcattcatgtgaccaaggagtccacccaccccgtgaagcccctggcccagatcgccggaaacagatacgcctccggacctgtgggaaaggccctgagcgacgcatgtatgggcacaatcgcctccttcctgtctaagtaccaggacatcatcatcgaacaccagaaggtggtgaagggcaaccagaagagactggagagcctgcgggagctggccggcaaggaaaacctggaataccctagcgtgaccctgccacctcagcctcacaccaaggagggcgttgatgcctacaacgaagtgatcgcccgggtgcgaatgtgggtgaacctgaacctgtggcagaagctgaagctaagcagagatgatgccaagcctctgctgagactgaagggattcccttcctttcctctggtcgagagacaggccaacgaagtggactggtgggacatggtgtgtaacgtgaagaagctgatcaacgagaaaaaggaggatggcaaggtgttttggcagaatctggctggctacaagagacaggaagccctgagaccatacctgagcagcgaggaagatcggaagaagggaaagaaattcgctcggtaccagctgggcgacctgctgctgcacctggaaaagaagcacggcgaggactggggaaaggtgtacgacgaggcctgggagcggattgacaagaaagtggaaggcctgagcaagcacatcaagctggaagaggaacggagaagcgaggacgcccagagcaaggccgccctgaccgactggctgcgggctaaggccagcttcgtgatcgagggcctgaaggaggccgacaaggacgagttctgcagatgcgagctgaagctgcagaagtggtacggggacctgcggggaaagcccttcgccatcgaagccgagaacagcatcctggacatcagcggcttcagcaagcagtacaactgtgccttcatctggcagaaggacggcgtgaagaagctgaacctgtacctgatcatcaactacttcaagggcggcaagctgcggttcaagaagatcaaacctgaagccttcgaagccaacagattctacaccgtgatcaacaaaaagagcggcgagatcgtgcccatggaggtgaacttcaacttcgacgaccccaacctgatcatcctgcctctggcctttggcaagagacagggcagagaattcatctggaacgacctgctgtccctggaaaccggcagcctgaagctggccaacggaagagtgatcgagaagacactgtacaacagaagaacccggcaggatgagcctgccctgttcgtggccctgaccttcgagcggcgggaggtcctggactcctccaatatcaaaccaatgaacctgatcggcgtggcaagaggcgaaaacatccccgccgtgatcgccctgaccgaccccgagggctgcccactgagccggtttaaggatagcctgggaaacccaacccacatcctgagaatcggcgagagctataaggagaagcagcggaccatccaggccaagaaggaggtggagcagcggagagccggcggctacagccggaagtacgccagcaaagccaagaatctggcagacgatatggtgagaaacaccgctagagatctgctgtactacgccgtgacccaggatgccatgctgatcttcgccaacctgagccggggcttcggccggcagggcaagcggaccttcatggccgagagacagtacacacggatggaggactggctgaccgccaagctggcctacgagggcctgagcaagacctacctgtccaagacactggcccagtacacctccaagacatgcagcaactgtgggtttaccatcaccagcgccgactacgacagggtgctggagaagctgaagaagacagcaacaggctggatgaccacaattaacggcaaggagctgaaggtggagggccagattacctactacaacagatacaagagacagaacgtagtcaaggacctgtccgtcgagctggatagactgagcgaagaatctgtgaacaacgacatctcctcctggacaaagggcagaagcggagaagctctgagcctcctgaagaaaagattctcccatagacccgtgcaggagaagttcgtgtgcctgaactgcggcttcgagacacacgcagccgagcaagccgccctgaacatcgccagatcctggctgttcctgcggagccaggagtacaagaaataccagacaaacaagacaaccggcaacaccgataagagagccttcgtcgagacctggcagtccttttaccggaagaagcttaaggaggtgtggaaacctgccgtgcggtctggcggatctggcggaggctccccccagaagagcgtgaccttcgaggacgtggccgtgtacttcacccagaccgagtgggacggcctgagccccgcccagagggccctgtacagggacgtgatgctggagaactacggcaacgtggccagcctgggcttcagcctgctgaagcccgccgtgatcagccagctggagggcgccgacgagctggagggccccagccccctggtggccggcaccgagatcggcccccagggcctgtggggcggcccaagcagcggcgcccctcctcccagcggcggcagcccagccggctccccaacctctaccgaggagggcacctctgagtccgccacccccgagagcggccctggcacctccaccgagcccagcgagggcagcgcacccggcagccctgccggcagccccacctccacagaggagggaaccagcaccgagcccagcgaaggcagcgccccaggcaccagcaccgagcctagtgagcaggagattaaacggatcaacaagatcagaagaagacttgtgaaagacagcaacaccaagaaggccggcaagacaggccccatgaaaaccctgctggttagagtgatgacacccgatctgagagagcggctggaaaacctgagaaagaagcctgaaaatatcccccagcccatcagcaatacatctagagccaacctgaataagctgctgaccgattacaccgaaatgaagaaggcgatcctgcatgtgtactgggaagagttccagaaggaccctgtgggcctgatgagccgggtggcccagcctgccagcaagaagatcgatcagaacaagctgaaacctgagatggacgagaagggcaacctgaccaccgccggctttgcctgctctcagtgtggccagcccctgttcgtgtacaagctggagcaggtgtctgagaagggcaaggcttacaccaactacttcggacggtgcaatgtggccgagcacgaaaagctgatcctgctggcccagctgaagcccgagaaggatagcgacgaagccgtgacatatagcctgggaaagtttgggcagagggccctggatttctacagcattcatgtgaccaaggagtccacccaccccgtgaagcccctggcccagatcgccggaaacagatacgcctccggacctgtgggaaaggccctgagcgacgcatgtatgggcacaatcgcctccttcctgtctaagtaccaggacatcatcatcgaacaccagaaggtggtgaagggcaaccagaagagactggagagcctgcgggagctggccggcaaggaaaacctggaataccctagcgtgaccctgccacctcagcctcacaccaaggagggcgttgatgcctacaacgaagtgatcgcccgggtgcgaatgtgggtgaacctgaacctgtggcagaagctgaagctaagcagagatgatgccaagcctctgctgagactgaagggattcccttcctttcctctggtcgagagacaggccaacgaagtggactggtgggacatggtgtgtaacgtgaagaagctgatcaacgagaaaaaggaggatggcaaggtgttttggcagaatctggctggctacaagagacaggaagccctgagaccatacctgagcagcgaggaagatcggaagaagggaaagaaattcgctcggtaccagctgggcgacctgctgctgcacctggaaaagaagcacggcgaggactggggaaaggtgtacgacgaggcctgggagcggattgacaagaaagtggaaggcctgagcaagcacatcaagctggaagaggaacggagaagcgaggacgcccagagcaaggccgccctgaccgactggctgcgggctaaggccagcttcgtgatcgagggcctgaaggaggccgacaaggacgagttctgcagatgcgagctgaagctgcagaagtggtacggggacctgcggggaaagcccttcgccatcgaagccgagaacagcatcctggacatcagcggcttcagcaagcagtacaactgtgccttcatctggcagaaggacggcgtgaagaagctgaacctgtacctgatcatcaactacttcaagggcggcaagctgcggttcaagaagatcaaacctgaagccttcgaagccaacagattctacaccgtgatcaacaaaaagagcggcgagatcgtgcccatggaggtgaacttcaacttcgacgaccccaacctgatcatcctgcctctggcctttggcaagagacagggcagagaattcatctggaacgacctgctgtccctggaaaccggcagcctgaagctggccaacggaagagtgatcgagaagacactgtacaacagaagaacccggcaggatgagcctgccctgttcgtggccctgaccttcgagcggcgggaggtcctggactcctccaatatcaaaccaatgaacctgatcggcgtggcaagaggcgaaaacatccccgccgtgatcgccctgaccgaccccgagggctgcccactgagccggtttaaggatagcctgggaaacccaacccacatcctgagaatcggcgagagctataaggagaagcagcggaccatccaggccaagaaggaggtggagcagcggagagccggcggctacagccggaagtacgccagcaaagccaagaatctggcagacgatatggtgagaaacaccgctagagatctgctgtactacgccgtgacccaggatgccatgctgatcttcgccaacctgagccggggcttcggccggcagggcaagcggaccttcatggccgagagacagtacacacggatggaggactggctgaccgccaagctggcctacgagggcctgagcaagacctacctgtccaagacactggcccagtacacctccaagacatgcagcaactgtgggtttaccatcaccagcgccgactacgacagggtgctggagaagctgaagaagacagcaacaggctggatgaccacaattaacggcaaggagctgaaggtggagggccagattacctactacaacagatacaagagacagaacgtagtcaaggacctgtccgtcgagctggatagactgagcgaagaatctgtgaacaacgacatctcctcctggacaaagggcagaagcggagaagctctgagcctcctgaagaaaagattctcccatagacccgtgcaggagaagttcgtgtgcctgaactgcggcttcgagacacacgcagccgagcaagccgccctgaacatcgccagatcctggctgttcctgcggagccaggagtacaagaaataccagacaaacaagacaaccggcaacaccgataagagagccttcgtcgagacctggcagtccttttaccggaagaagcttaaggaggtgtggaaacctgccgtgcggtctggcggatctggcggaggctcctccccagaagagcgtgaccttcgaggacgtggccgtgtacttcacccagaccgagtgggacggcctgagccccgcccagagggccctgtacagggacgtgatgctggagaactacggcaacgtggccagcctgggcttcagcctgctgaagcccgccgtgatcagccagctggagggcgccgacgagctggagggccccagccccctggtggccggcaccgagatcggcccccagggcctgtggggatctggctccggcagcggccccaagaaaaagagaaaagtctaagctgccttctgcggggcttgccttctggccatgcccttcttctctcccttgcacctgtacctcttggtctttgaataaagcctgagtaggaaggctagcaaaaaaaaaaaaaaaaaaaaaaaaaaaaaaaaaaaaaaaaaaaaaaaaaaaaaaaaaaaaaaaaaaaaaaaaaaaaaaaa

SEQ ID NO: 16322 - RNA, 9485 nt, synthetic construct
  source 1..9485: mol_type = other RNA
aggaaataagagagaaaagaagagtaagaagaaatataagagccaccatggcccctaagaagaagcgtaaagtgagccggatggaacgcctcgtctacgaggtgcggcagaagtgcagaaacatcgaggacatctgcatctcctgcggatctctgaacgtgaccctggagcacccactgttcatcggcggcatgtgccagaactgtaaaaactgttttctggagtgtgcctatcaatacgacgatgacggctaccagagctactgcaccatctgttgcggcggaagagaggtgctgatgtgtggaaataacaactgctgccggtgcttctgcgtggaatgcgtggacctgctggtgggccccggcgccgcccaggccgctattaaggaagatccttggaactgctacatgtgcggccacaagggcacatacggcctgctgagacggagagaggactggcctagcagactgcagatgttcttcgccaataaccacgaccaggagttcgacccccctaaggtgtaccctcccgtccccgccgagaagagaaagcccatccgggtcctgagcctgttcgatggcatcgccaccggtctgctggtgctgaaggacctgggcatccaggtggataggtacattgcctccgaggtgtgcgaggactccatcaccgtgggaatggtgcgtcatcagggcaagatcatgtacgtgggcgacgtgcggagcgtgacacagaagcatatccaggagtggggccctttcgacctggtgatcggcggcagcccttgcaatgacctgagcatcgtgaacccagcccggaagggcctgtacgagggaaccggcagactgttcttcgagttttacagactgctgcacgacgcccggcctaaggaaggcgacgaccggcccttcttttggctgttcgagaatgtggtggccatgggagtcagcgacaagcgggatattagccggttcctggagagcaaccccgtgatgatcgatgccaaggaagtgagcgccgcccaccgggccagatacttctggggcaatctgcctggcatgaacagacccctggccagcaccgtgaacgacaagctggagctgcaggagtgcctggagcacggccggatcgccaagttcagcaaggtgagaaccatcaccacccgaagcaacagcatcaaacaaggcaaggaccagcactttcctgtgttcatgaacgagaaggaggacatcctgtggtgtaccgagatggagagagtgttcgggttcccagtccactacacagatgtcagcaacatgtctagactggccagacagagactgctgggaagaagctggtccgtccctgtgatcagacacctgttcgcccctctgaaggagtacttcgcctgcgtgagcagcggcaacagcaacgccaacagccggggccccagcttctctagcggcctggtgccactgtccctgagagggagccacatgggccccatggagatctacaaaaccgtgagcgcctggaagcggcagcctgtgcgcgtgctgagcctgtttcggaatatcgataaagtcctgaaaagcctgggattcctggagagcggctctggctccggcggtggcaccctgaagtacgtggaggatgtgacaaacgtggtcagacgggatgtggagaagtggggccccttcgatctggtgtacggcagcacccaacccctgggcagctcttgtgaccggtgccctggctggtacatgtttcagttccaccggatcctgcagtacgccctgccgagacaggagtcccagcggccattcttttggattttcatggacaacttgctgctgaccgaggatgaccaggaaactaccactcggttcctgcagaccgaagccgtgaccctgcaggacgtgagaggccgggactaccagaacgccatgcgggtgtggtccaacatccctggactgaaaagcaagcacgcacctctgacccctaaagaagaggagtacctgcaggcccaggtgcggagcagaagcaagctggacgcccctaaggtggatctgctggtgaagaattgcctcctgcccctgagagagtacttcaagtatttcagccagaatagtctgcccctgggaggcagcggcggcggcgccctggtgacatttgaggacgtcgccgtgcggttcacccaggaggaatgggctctgctggatccttctcagaaaatcctgtaccgggacgtgatgagagagacataccggaatctgacctccgtgggcatcaactgggaatgttgggaccttgaagcctgcttcagaagcctgggaagaaacctgagagtgcaggtggtgaagagaaagtgcgagctgaccaacagcggcccctgcgccgagggcggcccaagcagcggcgcccctcctcccagcggcggcagcccagccggctccccaacctctaccgaggagggcacctctgagtccgccacccccgagagcggccctggcacctccaccgagcccagcgagggcagcgcacccggcagccctgccggcagccccacctccacagaggagggaaccagcaccgagcccagcgaaggcagcgccccaggcaccagcaccgagcctagtgagcaggagattaaacggatcaacaagatcagaagaagacttgtgaaagacagcaacaccaagaaggccggcaagacaggccccatgaaaaccctgctggttagagtgatgacacccgatctgagagagcggctggaaaacctgagaaagaagcctgaaaatatcccccagcccatcagcaatacatctagagccaacctgaataagctgctgaccgattacaccgaaatgaagaaggcgatcctgcatgtgtactgggaagagttccagaaggaccctgtgggcctgatgagccgggtggcccagcctgccagcaagaagatcgatcagaacaagctgaaacctgagatggacgagaagggcaacctgaccaccgccggctttgcctgctctcagtgtggccagcccctgttcgtgtacaagctggagcaggtgtctgagaagggcaaggcttacaccaactacttcggacggtgcaatgtggccgagcacgaaaagctgatcctgctggcccagctgaagcccgagaaggatagcgacgaagccgtgacatatagcctgggaaagtttgggcagagggccctggatttctacagcattcatgtgaccaaggagtccacccaccccgtgaagcccctggcccagatcgccggaaacagatacgcctccggacctgtgggaaaggccctgagcgacgcatgtatgggcacaatcgcctccttcctgtctaagtaccaggacatcatcatcgaacaccagaaggtggtgaagggcaaccagaagagactggagagcctgcgggagctggccggcaaggaaaacctggaataccctagcgtgaccctgccacctcagcctcacaccaaggagggcgttgatgcctacaacgaagtgatcgcccgggtgcgaatgtgggtgaacctgaacctgtggcagaagctgaagctaagcagagatgatgccaagcctctgctgagactgaagggattcccttcctttcctctggtcgagagacaggccaacgaagtggactggtgggacatggtgtgtaacgtgaagaagctgatcaacgagaaaaaggaggatggcaaggtgttttggcagaatctggctggctacaagagacaggaagccctgagaccatacctgagcagcgaggaagatcggaagaagggaaagaaattcgctcggtaccagctgggcgacctgctgctgcacctggaaaagaagcacggcgaggactggggaaaggtgtacgacgaggcctgggagcggattgacaagaaagtggaaggcctgagcaagcacatcaagctggaagaggaacggagaagcgaggacgcccagagcaaggccgccctgaccgactggctgcgggctaaggccagcttcgtgatcgagggcctgaaggaggccgacaaggacgagttctgcagatgcgagctgaagctgcagaagtggtacggggacctgcggggaaagcccttcgccatcgaagccgagaacagcatcctggacatcagcggcttcagcaagcagtacaactgtgccttcatctggcagaaggacggcgtgaagaagctgaacctgtacctgatcatcaactacttcaagggcggcaagctgcggttcaagaagatcaaacctgaagccttcgaagccaacagattctacaccgtgatcaacaaaaagagcggcgagatcgtgcccatggaggtgaacttcaacttcgacgaccccaacctgatcatcctgcctctggcctttggcaagagacagggcagagaattcatctggaacgacctgctgtccctggaaaccggcagcctgaagctggccaacggaagagtgatcgagaagacactgtacaacagaagaacccggcaggatgagcctgccctgttcgtggccctgaccttcgagcggcgggaggtcctggactcctccaatatcaaaccaatgaacctgatcggcgtggcaagaggcgaaaacatccccgccgtgatcgccctgaccgaccccgagggctgcccactgagccggtttaaggatagcctgggaaacccaacccacatcctgagaatcggcgagagctataaggagaagcagcggaccatccaggccaagaaggaggtggagcagcggagagccggcggctacagccggaagtacgccagcaaagccaagaatctggcagacgatatggtgagaaacaccgctagagatctgctgtactacgccgtgacccaggatgccatgctgatcttcgccaacctgagccggggcttcggccggcagggcaagcggaccttcatggccgagagacagtacacacggatggaggactggctgaccgccaagctggcctacgagggcctgagcaagacctacctgtccaagacactggcccagtacacctccaagacatgcagcaactgtgggtttaccatcaccagcgccgactacgacagggtgctggagaagctgaagaagacagcaacaggctggatgaccacaattaacggcaaggagctgaaggtggagggccagattacctactacaacagatacaagagacagaacgtagtcaaggacctgtccgtcgagctggatagactgagcgaagaatctgtgaacaacgacatctcctcctggacaaagggcagaagcggagaagctctgagcctcctgaagaaaagattctcccatagacccgtgcaggagaagttcgtgtgcctgaactgcggcttcgagacacacgcagccgagcaagccgccctgaacatcgccagatcctggctgttcctgcggagccaggagtacaagaaataccagacaaacaagacaaccggcaacaccgataagagagccttcgtcgagacctggcagtccttttaccggaagaagcttaaggaggtgtggaaacctgccgtgcggtctggcggatctggcggaggctccaggcccagggccgtgaagttcgccgacgtggccgtgtacttcagccccgaggagtggggctgcctgaggcccgcccagagggccctgtacagggacgtgatgagggagacctacggccacctgggcgccctgggctgcgccggccccaagcccgccctgatcagctggctggagaggaacaccgacgactgggagcccgccgccctggacccccaggagtgccccaggggcctgaccgtgcagggcggcccaagcagcggcgcccctcctcccagcggcggcagcccagccggctccccaacctctaccgaggagggcacctctgagtccgccacccccgagagcggccctggcacctccaccgagcccagcgagggcagcgcacccggcagccctgccggcagccccacctccacagaggagggaaccagcaccgagcccagcgaaggcagcgccccaggcaccagcaccgagcctagtgagcaggagattaaacggatcaacaagatcagaagaagacttgtgaaagacagcaacaccaagaaggccggcaagacaggccccatgaaaaccctgctggttagagtgatgacacccgatctgagagagcggctggaaaacctgagaaagaagcctgaaaatatcccccagcccatcagcaatacatctagagccaacctgaataagctgctgaccgattacaccgaaatgaagaaggcgatcctgcatgtgtactgggaagagttccagaaggaccctgtgggcctgatgagccgggtggcccagcctgccagcaagaagatcgatcagaacaagctgaaacctgagatggacgagaagggcaacctgaccaccgccggctttgcctgctctcagtgtggccagcccctgttcgtgtacaagctggagcaggtgtctgagaagggcaaggcttacaccaactacttcggacggtgcaatgtggccgagcacgaaaagctgatcctgctggcccagctgaagcccgagaaggatagcgacgaagccgtgacatatagcctgggaaagtttgggcagagggccctggatttctacagcattcatgtgaccaaggagtccacccaccccgtgaagcccctggcccagatcgccggaaacagatacgcctccggacctgtgggaaaggccctgagcgacgcatgtatgggcacaatcgcctccttcctgtctaagtaccaggacatcatcatcgaacaccagaaggtggtgaagggcaaccagaagagactggagagcctgcgggagctggccggcaaggaaaacctggaataccctagcgtgaccctgccacctcagcctcacaccaaggagggcgttgatgcctacaacgaagtgatcgcccgggtgcgaatgtgggtgaacctgaacctgtggcagaagctgaagctaagcagagatgatgccaagcctctgctgagactgaagggattcccttcctttcctctggtcgagagacaggccaacgaagtggactggtgggacatggtgtgtaacgtgaagaagctgatcaacgagaaaaaggaggatggcaaggtgttttggcagaatctggctggctacaagagacaggaagccctgagaccatacctgagcagcgaggaagatcggaagaagggaaagaaattcgctcggtaccagctgggcgacctgctgctgcacctggaaaagaagcacggcgaggactggggaaaggtgtacgacgaggcctgggagcggattgacaagaaagtggaaggcctgagcaagcacatcaagctggaagaggaacggagaagcgaggacgcccagagcaaggccgccctgaccgactggctgcgggctaaggccagcttcgtgatcgagggcctgaaggaggccgacaaggacgagttctgcagatgcgagctgaagctgcagaagtggtacggggacctgcggggaaagcccttcgccatcgaagccgagaacagcatcctggacatcagcggcttcagcaagcagtacaactgtgccttcatctggcagaaggacggcgtgaagaagctgaacctgtacctgatcatcaactacttcaagggcggcaagctgcggttcaagaagatcaaacctgaagccttcgaagccaacagattctacaccgtgatcaacaaaaagagcggcgagatcgtgcccatggaggtgaacttcaacttcgacgaccccaacctgatcatcctgcctctggcctttggcaagagacagggcagagaattcatctggaacgacctgctgtccctggaaaccggcagcctgaagctggccaacggaagagtgatcgagaagacactgtacaacagaagaacccggcaggatgagcctgccctgttcgtggccctgaccttcgagcggcgggaggtcctggactcctccaatatcaaaccaatgaacctgatcggcgtggcaagaggcgaaaacatccccgccgtgatcgccctgaccgaccccgagggctgcccactgagccggtttaaggatagcctgggaaacccaacccacatcctgagaatcggcgagagctataaggagaagcagcggaccatccaggccaagaaggaggtggagcagcggagagccggcggctacagccggaagtacgccagcaaagccaagaatctggcagacgatatggtgagaaacaccgctagagatctgctgtactacgccgtgacccaggatgccatgctgatcttcgccaacctgagccggggcttcggccggcagggcaagcggaccttcatggccgagagacagtacacacggatggaggactggctgaccgccaagctggcctacgagggcctgagcaagacctacctgtccaagacactggcccagtacacctccaagacatgcagcaactgtgggtttaccatcaccagcgccgactacgacagggtgctggagaagctgaagaagacagcaacaggctggatgaccacaattaacggcaaggagctgaaggtggagggccagattacctactacaacagatacaagagacagaacgtagtcaaggacctgtccgtcgagctggatagactgagcgaagaatctgtgaacaacgacatctcctcctggacaaagggcagaagcggagaagctctgagcctcctgaagaaaagattctcccatagacccgtgcaggagaagttcgtgtgcctgaactgcggcttcgagacacacgcagccgagcaagccgccctgaacatcgccagatcctggctgttcctgcggagccaggagtacaagaaataccagacaaacaagacaaccggcaacaccgataagagagccttcgtcgagacctggcagtccttttaccggaagaagcttaaggaggtgtggaaacctgccgtgcggtctggcggatctggcggaggctcctaggcccagggccgtgaagttcgccgacgtggccgtgtacttcagccccgaggagtggggctgcctgaggcccgcccagagggccctgtacagggacgtgatgagggagacctacggccacctgggcgccctgggctgcgccggccccaagcccgccctgatcagctggctggagaggaacaccgacgactgggagcccgccgccctggacccccaggagtgccccaggggcctgaccgtgcagggatctggctccggcagcggccccaagaaaaagagaaaagtctaagctgccttctgcggggcttgccttctggccatgcccttcttctctcccttgcacctgtacctcttggtctttgaataaagcctgagtaggaaggctagcaaaaaaaaaaaaaaaaaaaaaaaaaaaaaaaaaaaaaaaaaaaaaaaaaaaaaaaaaaaaaaaaaaaaaaaaaaaaaaaa

SEQ ID NO: 16323 - RNA, 9485 nt, synthetic construct
  source 1..9485: mol_type = other RNA
aggaaataagagagaaaagaagagtaagaagaaatataagagccaccatggcccctaagaagaagcgtaaagtgagccggatggaacgcctcgtctacgaggtgcggcagaagtgcagaaacatcgaggacatctgcatctcctgcggatctctgaacgtgaccctggagcacccactgttcatcggcggcatgtgccagaactgtaaaaactgttttctggagtgtgcctatcaatacgacgatgacggctaccagagctactgcaccatctgttgcggcggaagagaggtgctgatgtgtggaaataacaactgctgccggtgcttctgcgtggaatgcgtggacctgctggtgggccccggcgccgcccaggccgctattaaggaagatccttggaactgctacatgtgcggccacaagggcacatacggcctgctgagacggagagaggactggcctagcagactgcagatgttcttcgccaataaccacgaccaggagttcgacccccctaaggtgtaccctcccgtccccgccgagaagagaaagcccatccgggtcctgagcctgttcgatggcatcgccaccggtctgctggtgctgaaggacctgggcatccaggtggataggtacattgcctccgaggtgtgcgaggactccatcaccgtgggaatggtgcgtcatcagggcaagatcatgtacgtgggcgacgtgcggagcgtgacacagaagcatatccaggagtggggccctttcgacctggtgatcggcggcagcccttgcaatgacctgagcatcgtgaacccagcccggaagggcctgtacgagggaaccggcagactgttcttcgagttttacagactgctgcacgacgcccggcctaaggaaggcgacgaccggcccttcttttggctgttcgagaatgtggtggccatgggagtcagcgacaagcgggatattagccggttcctggagagcaaccccgtgatgatcgatgccaaggaagtgagcgccgcccaccgggccagatacttctggggcaatctgcctggcatgaacagacccctggccagcaccgtgaacgacaagctggagctgcaggagtgcctggagcacggccggatcgccaagttcagcaaggtgagaaccatcaccacccgaagcaacagcatcaaacaaggcaaggaccagcactttcctgtgttcatgaacgagaaggaggacatcctgtggtgtaccgagatggagagagtgttcgggttcccagtccactacacagatgtcagcaacatgtctagactggccagacagagactgctgggaagaagctggtccgtccctgtgatcagacacctgttcgcccctctgaaggagtacttcgcctgcgtgagcagcggcaacagcaacgccaacagccggggccccagcttctctagcggcctggtgccactgtccctgagagggagccacatgggccccatggagatctacaaaaccgtgagcgcctggaagcggcagcctgtgcgcgtgctgagcctgtttcggaatatcgataaagtcctgaaaagcctgggattcctggagagcggctctggctccggcggtggcaccctgaagtacgtggaggatgtgacaaacgtggtcagacgggatgtggagaagtggggccccttcgatctggtgtacggcagcacccaacccctgggcagctcttgtgaccggtgccctggctggtacatgtttcagttccaccggatcctgcagtacgccctgccgagacaggagtcccagcggccattcttttggattttcatggacaacttgctgctgaccgaggatgaccaggaaactaccactcggttcctgcagaccgaagccgtgaccctgcaggacgtgagaggccgggactaccagaacgccatgcgggtgtggtccaacatccctggactgaaaagcaagcacgcacctctgacccctaaagaagaggagtacctgcaggcccaggtgcggagcagaagcaagctggacgcccctaaggtggatctgctggtgaagaattgcctcctgcccctgagagagtacttcaagtatttcagccagaatagtctgcccctgggaggcagcggcggcggcgccctggtgacatttgaggacgtcgccgtgcggttcacccaggaggaatgggctctgctggatccttctcagaaaatcctgtaccgggacgtgatgagagagacataccggaatctgacctccgtgggcatcaactgggaatgttgggaccttgaagcctgcttcagaagcctgggaagaaacctgagagtgcaggtggtgaagagaaagtgcgagctgaccaacagcggcccctgcgccgagggcggcccaagcagcggcgcccctcctcccagcggcggcagcccagccggctccccaacctctaccgaggagggcacctctgagtccgccacccccgagagcggccctggcacctccaccgagcccagcgagggcagcgcacccggcagccctgccggcagccccacctccacagaggagggaaccagcaccgagcccagcgaaggcagcgccccaggcaccagcaccgagcctagtgagcaggagattaaacggatcaacaagatcagaagaagacttgtgaaagacagcaacaccaagaaggccggcaagacaggccccatgaaaaccctgctggttagagtgatgacacccgatctgagagagcggctggaaaacctgagaaagaagcctgaaaatatcccccagcccatcagcaatacatctagagccaacctgaataagctgctgaccgattacaccgaaatgaagaaggcgatcctgcatgtgtactgggaagagttccagaaggaccctgtgggcctgatgagccgggtggcccagcctgccagcaagaagatcgatcagaacaagctgaaacctgagatggacgagaagggcaacctgaccaccgccggctttgcctgctctcagtgtggccagcccctgttcgtgtacaagctggagcaggtgtctgagaagggcaaggcttacaccaactacttcggacggtgcaatgtggccgagcacgaaaagctgatcctgctggcccagctgaagcccgagaaggatagcgacgaagccgtgacatatagcctgggaaagtttgggcagagggccctggatttctacagcattcatgtgaccaaggagtccacccaccccgtgaagcccctggcccagatcgccggaaacagatacgcctccggacctgtgggaaaggccctgagcgacgcatgtatgggcacaatcgcctccttcctgtctaagtaccaggacatcatcatcgaacaccagaaggtggtgaagggcaaccagaagagactggagagcctgcgggagctggccggcaaggaaaacctggaataccctagcgtgaccctgccacctcagcctcacaccaaggagggcgttgatgcctacaacgaagtgatcgcccgggtgcgaatgtgggtgaacctgaacctgtggcagaagctgaagctaagcagagatgatgccaagcctctgctgagactgaagggattcccttcctttcctctggtcgagagacaggccaacgaagtggactggtgggacatggtgtgtaacgtgaagaagctgatcaacgagaaaaaggaggatggcaaggtgttttggcagaatctggctggctacaagagacaggaagccctgagaccatacctgagcagcgaggaagatcggaagaagggaaagaaattcgctcggtaccagctgggcgacctgctgctgcacctggaaaagaagcacggcgaggactggggaaaggtgtacgacgaggcctgggagcggattgacaagaaagtggaaggcctgagcaagcacatcaagctggaagaggaacggagaagcgaggacgcccagagcaaggccgccctgaccgactggctgcgggctaaggccagcttcgtgatcgagggcctgaaggaggccgacaaggacgagttctgcagatgcgagctgaagctgcagaagtggtacggggacctgcggggaaagcccttcgccatcgaagccgagaacagcatcctggacatcagcggcttcagcaagcagtacaactgtgccttcatctggcagaaggacggcgtgaagaagctgaacctgtacctgatcatcaactacttcaagggcggcaagctgcggttcaagaagatcaaacctgaagccttcgaagccaacagattctacaccgtgatcaacaaaaagagcggcgagatcgtgcccatggaggtgaacttcaacttcgacgaccccaacctgatcatcctgcctctggcctttggcaagagacagggcagagaattcatctggaacgacctgctgtccctggaaaccggcagcctgaagctggccaacggaagagtgatcgagaagacactgtacaacagaagaacccggcaggatgagcctgccctgttcgtggccctgaccttcgagcggcgggaggtcctggactcctccaatatcaaaccaatgaacctgatcggcgtggcaagaggcgaaaacatccccgccgtgatcgccctgaccgaccccgagggctgcccactgagccggtttaaggatagcctgggaaacccaacccacatcctgagaatcggcgagagctataaggagaagcagcggaccatccaggccaagaaggaggtggagcagcggagagccggcggctacagccggaagtacgccagcaaagccaagaatctggcagacgatatggtgagaaacaccgctagagatctgctgtactacgccgtgacccaggatgccatgctgatcttcgccaacctgagccggggcttcggccggcagggcaagcggaccttcatggccgagagacagtacacacggatggaggactggctgaccgccaagctggcctacgagggcctgagcaagacctacctgtccaagacactggcccagtacacctccaagacatgcagcaactgtgggtttaccatcaccagcgccgactacgacagggtgctggagaagctgaagaagacagcaacaggctggatgaccacaattaacggcaaggagctgaaggtggagggccagattacctactacaacagatacaagagacagaacgtagtcaaggacctgtccgtcgagctggatagactgagcgaagaatctgtgaacaacgacatctcctcctggacaaagggcagaagcggagaagctctgagcctcctgaagaaaagattctcccatagacccgtgcaggagaagttcgtgtgcctgaactgcggcttcgagacacacgcagccgagcaagccgccctgaacatcgccagatcctggctgttcctgcggagccaggagtacaagaaataccagacaaacaagacaaccggcaacaccgataagagagccttcgtcgagacctggcagtccttttaccggaagaagcttaaggaggtgtggaaacctgccgtgcggtctggcggatctggcggaggctcccaccaggaggtggtgaccttcgaggacgtggccgtgtacttcacccagaccgagtgggccggcctgagccccgcccagagggccctgtacaggagcgtgatgctggagatctacggcaacctgaccagcctgggctaccccgtgcccaagcccgagctggtgagcctgctggagaggggcgacctgcccgtgggcctggagacccaggacaacccccccgcccagggcaccagggacatctacggcggcccaagcagcggcgcccctcctcccagcggcggcagcccagccggctccccaacctctaccgaggagggcacctctgagtccgccacccccgagagcggccctggcacctccaccgagcccagcgagggcagcgcacccggcagccctgccggcagccccacctccacagaggagggaaccagcaccgagcccagcgaaggcagcgccccaggcaccagcaccgagcctagtgagcaggagattaaacggatcaacaagatcagaagaagacttgtgaaagacagcaacaccaagaaggccggcaagacaggccccatgaaaaccctgctggttagagtgatgacacccgatctgagagagcggctggaaaacctgagaaagaagcctgaaaatatcccccagcccatcagcaatacatctagagccaacctgaataagctgctgaccgattacaccgaaatgaagaaggcgatcctgcatgtgtactgggaagagttccagaaggaccctgtgggcctgatgagccgggtggcccagcctgccagcaagaagatcgatcagaacaagctgaaacctgagatggacgagaagggcaacctgaccaccgccggctttgcctgctctcagtgtggccagcccctgttcgtgtacaagctggagcaggtgtctgagaagggcaaggcttacaccaactacttcggacggtgcaatgtggccgagcacgaaaagctgatcctgctggcccagctgaagcccgagaaggatagcgacgaagccgtgacatatagcctgggaaagtttgggcagagggccctggatttctacagcattcatgtgaccaaggagtccacccaccccgtgaagcccctggcccagatcgccggaaacagatacgcctccggacctgtgggaaaggccctgagcgacgcatgtatgggcacaatcgcctccttcctgtctaagtaccaggacatcatcatcgaacaccagaaggtggtgaagggcaaccagaagagactggagagcctgcgggagctggccggcaaggaaaacctggaataccctagcgtgaccctgccacctcagcctcacaccaaggagggcgttgatgcctacaacgaagtgatcgcccgggtgcgaatgtgggtgaacctgaacctgtggcagaagctgaagctaagcagagatgatgccaagcctctgctgagactgaagggattcccttcctttcctctggtcgagagacaggccaacgaagtggactggtgggacatggtgtgtaacgtgaagaagctgatcaacgagaaaaaggaggatggcaaggtgttttggcagaatctggctggctacaagagacaggaagccctgagaccatacctgagcagcgaggaagatcggaagaagggaaagaaattcgctcggtaccagctgggcgacctgctgctgcacctggaaaagaagcacggcgaggactggggaaaggtgtacgacgaggcctgggagcggattgacaagaaagtggaaggcctgagcaagcacatcaagctggaagaggaacggagaagcgaggacgcccagagcaaggccgccctgaccgactggctgcgggctaaggccagcttcgtgatcgagggcctgaaggaggccgacaaggacgagttctgcagatgcgagctgaagctgcagaagtggtacggggacctgcggggaaagcccttcgccatcgaagccgagaacagcatcctggacatcagcggcttcagcaagcagtacaactgtgccttcatctggcagaaggacggcgtgaagaagctgaacctgtacctgatcatcaactacttcaagggcggcaagctgcggttcaagaagatcaaacctgaagccttcgaagccaacagattctacaccgtgatcaacaaaaagagcggcgagatcgtgcccatggaggtgaacttcaacttcgacgaccccaacctgatcatcctgcctctggcctttggcaagagacagggcagagaattcatctggaacgacctgctgtccctggaaaccggcagcctgaagctggccaacggaagagtgatcgagaagacactgtacaacagaagaacccggcaggatgagcctgccctgttcgtggccctgaccttcgagcggcgggaggtcctggactcctccaatatcaaaccaatgaacctgatcggcgtggcaagaggcgaaaacatccccgccgtgatcgccctgaccgaccccgagggctgcccactgagccggtttaaggatagcctgggaaacccaacccacatcctgagaatcggcgagagctataaggagaagcagcggaccatccaggccaagaaggaggtggagcagcggagagccggcggctacagccggaagtacgccagcaaagccaagaatctggcagacgatatggtgagaaacaccgctagagatctgctgtactacgccgtgacccaggatgccatgctgatcttcgccaacctgagccggggcttcggccggcagggcaagcggaccttcatggccgagagacagtacacacggatggaggactggctgaccgccaagctggcctacgagggcctgagcaagacctacctgtccaagacactggcccagtacacctccaagacatgcagcaactgtgggtttaccatcaccagcgccgactacgacagggtgctggagaagctgaagaagacagcaacaggctggatgaccacaattaacggcaaggagctgaaggtggagggccagattacctactacaacagatacaagagacagaacgtagtcaaggacctgtccgtcgagctggatagactgagcgaagaatctgtgaacaacgacatctcctcctggacaaagggcagaagcggagaagctctgagcctcctgaagaaaagattctcccatagacccgtgcaggagaagttcgtgtgcctgaactgcggcttcgagacacacgcagccgagcaagccgccctgaacatcgccagatcctggctgttcctgcggagccaggagtacaagaaataccagacaaacaagacaaccggcaacaccgataagagagccttcgtcgagacctggcagtccttttaccggaagaagcttaaggaggtgtggaaacctgccgtgcggtctggcggatctggcggaggctcctcaccaggaggtggtgaccttcgaggacgtggccgtgtacttcacccagaccgagtgggccggcctgagccccgcccagagggccctgtacaggagcgtgatgctggagatctacggcaacctgaccagcctgggctaccccgtgcccaagcccgagctggtgagcctgctggagaggggcgacctgcccgtgggcctggagacccaggacaacccccccgcccagggcaccagggacatctacggatctggctccggcagcggccccaagaaaaagagaaaagtctaagctgccttctgcggggcttgccttctggccatgcccttcttctctcccttgcacctgtacctcttggtctttgaataaagcctgagtaggaaggctagcaaaaaaaaaaaaaaaaaaaaaaaaaaaaaaaaaaaaaaaaaaaaaaaaaaaaaaaaaaaaaaaaaaaaaaaaaaaaaaaa

SEQ ID NO: 16324 - RNA, 9485 nt, synthetic construct
  source 1..9485: mol_type = other RNA
aggaaataagagagaaaagaagagtaagaagaaatataagagccaccatggcccctaagaagaagcgtaaagtgagccggatggaacgcctcgtctacgaggtgcggcagaagtgcagaaacatcgaggacatctgcatctcctgcggatctctgaacgtgaccctggagcacccactgttcatcggcggcatgtgccagaactgtaaaaactgttttctggagtgtgcctatcaatacgacgatgacggctaccagagctactgcaccatctgttgcggcggaagagaggtgctgatgtgtggaaataacaactgctgccggtgcttctgcgtggaatgcgtggacctgctggtgggccccggcgccgcccaggccgctattaaggaagatccttggaactgctacatgtgcggccacaagggcacatacggcctgctgagacggagagaggactggcctagcagactgcagatgttcttcgccaataaccacgaccaggagttcgacccccctaaggtgtaccctcccgtccccgccgagaagagaaagcccatccgggtcctgagcctgttcgatggcatcgccaccggtctgctggtgctgaaggacctgggcatccaggtggataggtacattgcctccgaggtgtgcgaggactccatcaccgtgggaatggtgcgtcatcagggcaagatcatgtacgtgggcgacgtgcggagcgtgacacagaagcatatccaggagtggggccctttcgacctggtgatcggcggcagcccttgcaatgacctgagcatcgtgaacccagcccggaagggcctgtacgagggaaccggcagactgttcttcgagttttacagactgctgcacgacgcccggcctaaggaaggcgacgaccggcccttcttttggctgttcgagaatgtggtggccatgggagtcagcgacaagcgggatattagccggttcctggagagcaaccccgtgatgatcgatgccaaggaagtgagcgccgcccaccgggccagatacttctggggcaatctgcctggcatgaacagacccctggccagcaccgtgaacgacaagctggagctgcaggagtgcctggagcacggccggatcgccaagttcagcaaggtgagaaccatcaccacccgaagcaacagcatcaaacaaggcaaggaccagcactttcctgtgttcatgaacgagaaggaggacatcctgtggtgtaccgagatggagagagtgttcgggttcccagtccactacacagatgtcagcaacatgtctagactggccagacagagactgctgggaagaagctggtccgtccctgtgatcagacacctgttcgcccctctgaaggagtacttcgcctgcgtgagcagcggcaacagcaacgccaacagccggggccccagcttctctagcggcctggtgccactgtccctgagagggagccacatgggccccatggagatctacaaaaccgtgagcgcctggaagcggcagcctgtgcgcgtgctgagcctgtttcggaatatcgataaagtcctgaaaagcctgggattcctggagagcggctctggctccggcggtggcaccctgaagtacgtggaggatgtgacaaacgtggtcagacgggatgtggagaagtggggccccttcgatctggtgtacggcagcacccaacccctgggcagctcttgtgaccggtgccctggctggtacatgtttcagttccaccggatcctgcagtacgccctgccgagacaggagtcccagcggccattcttttggattttcatggacaacttgctgctgaccgaggatgaccaggaaactaccactcggttcctgcagaccgaagccgtgaccctgcaggacgtgagaggccgggactaccagaacgccatgcgggtgtggtccaacatccctggactgaaaagcaagcacgcacctctgacccctaaagaagaggagtacctgcaggcccaggtgcggagcagaagcaagctggacgcccctaaggtggatctgctggtgaagaattgcctcctgcccctgagagagtacttcaagtatttcagccagaatagtctgcccctgggaggcagcggcggcggcgccctggtgacatttgaggacgtcgccgtgcggttcacccaggaggaatgggctctgctggatccttctcagaaaatcctgtaccgggacgtgatgagagagacataccggaatctgacctccgtgggcatcaactgggaatgttgggaccttgaagcctgcttcagaagcctgggaagaaacctgagagtgcaggtggtgaagagaaagtgcgagctgaccaacagcggcccctgcgccgagggcggcccaagcagcggcgcccctcctcccagcggcggcagcccagccggctccccaacctctaccgaggagggcacctctgagtccgccacccccgagagcggccctggcacctccaccgagcccagcgagggcagcgcacccggcagccctgccggcagccccacctccacagaggagggaaccagcaccgagcccagcgaaggcagcgccccaggcaccagcaccgagcctagtgagcaggagattaaacggatcaacaagatcagaagaagacttgtgaaagacagcaacaccaagaaggccggcaagacaggccccatgaaaaccctgctggttagagtgatgacacccgatctgagagagcggctggaaaacctgagaaagaagcctgaaaatatcccccagcccatcagcaatacatctagagccaacctgaataagctgctgaccgattacaccgaaatgaagaaggcgatcctgcatgtgtactgggaagagttccagaaggaccctgtgggcctgatgagccgggtggcccagcctgccagcaagaagatcgatcagaacaagctgaaacctgagatggacgagaagggcaacctgaccaccgccggctttgcctgctctcagtgtggccagcccctgttcgtgtacaagctggagcaggtgtctgagaagggcaaggcttacaccaactacttcggacggtgcaatgtggccgagcacgaaaagctgatcctgctggcccagctgaagcccgagaaggatagcgacgaagccgtgacatatagcctgggaaagtttgggcagagggccctggatttctacagcattcatgtgaccaaggagtccacccaccccgtgaagcccctggcccagatcgccggaaacagatacgcctccggacctgtgggaaaggccctgagcgacgcatgtatgggcacaatcgcctccttcctgtctaagtaccaggacatcatcatcgaacaccagaaggtggtgaagggcaaccagaagagactggagagcctgcgggagctggccggcaaggaaaacctggaataccctagcgtgaccctgccacctcagcctcacaccaaggagggcgttgatgcctacaacgaagtgatcgcccgggtgcgaatgtgggtgaacctgaacctgtggcagaagctgaagctaagcagagatgatgccaagcctctgctgagactgaagggattcccttcctttcctctggtcgagagacaggccaacgaagtggactggtgggacatggtgtgtaacgtgaagaagctgatcaacgagaaaaaggaggatggcaaggtgttttggcagaatctggctggctacaagagacaggaagccctgagaccatacctgagcagcgaggaagatcggaagaagggaaagaaattcgctcggtaccagctgggcgacctgctgctgcacctggaaaagaagcacggcgaggactggggaaaggtgtacgacgaggcctgggagcggattgacaagaaagtggaaggcctgagcaagcacatcaagctggaagaggaacggagaagcgaggacgcccagagcaaggccgccctgaccgactggctgcgggctaaggccagcttcgtgatcgagggcctgaaggaggccgacaaggacgagttctgcagatgcgagctgaagctgcagaagtggtacggggacctgcggggaaagcccttcgccatcgaagccgagaacagcatcctggacatcagcggcttcagcaagcagtacaactgtgccttcatctggcagaaggacggcgtgaagaagctgaacctgtacctgatcatcaactacttcaagggcggcaagctgcggttcaagaagatcaaacctgaagccttcgaagccaacagattctacaccgtgatcaacaaaaagagcggcgagatcgtgcccatggaggtgaacttcaacttcgacgaccccaacctgatcatcctgcctctggcctttggcaagagacagggcagagaattcatctggaacgacctgctgtccctggaaaccggcagcctgaagctggccaacggaagagtgatcgagaagacactgtacaacagaagaacccggcaggatgagcctgccctgttcgtggccctgaccttcgagcggcgggaggtcctggactcctccaatatcaaaccaatgaacctgatcggcgtggcaagaggcgaaaacatccccgccgtgatcgccctgaccgaccccgagggctgcccactgagccggtttaaggatagcctgggaaacccaacccacatcctgagaatcggcgagagctataaggagaagcagcggaccatccaggccaagaaggaggtggagcagcggagagccggcggctacagccggaagtacgccagcaaagccaagaatctggcagacgatatggtgagaaacaccgctagagatctgctgtactacgccgtgacccaggatgccatgctgatcttcgccaacctgagccggggcttcggccggcagggcaagcggaccttcatggccgagagacagtacacacggatggaggactggctgaccgccaagctggcctacgagggcctgagcaagacctacctgtccaagacactggcccagtacacctccaagacatgcagcaactgtgggtttaccatcaccagcgccgactacgacagggtgctggagaagctgaagaagacagcaacaggctggatgaccacaattaacggcaaggagctgaaggtggagggccagattacctactacaacagatacaagagacagaacgtagtcaaggacctgtccgtcgagctggatagactgagcgaagaatctgtgaacaacgacatctcctcctggacaaagggcagaagcggagaagctctgagcctcctgaagaaaagattctcccatagacccgtgcaggagaagttcgtgtgcctgaactgcggcttcgagacacacgcagccgagcaagccgccctgaacatcgccagatcctggctgttcctgcggagccaggagtacaagaaataccagacaaacaagacaaccggcaacaccgataagagagccttcgtcgagacctggcagtccttttaccggaagaagcttaaggaggtgtggaaacctgccgtgcggtctggcggatctggcggaggctccagccacggccccctgagcttcgaggacgtggccatcgccttcaccaaggaggagtggcagcagctggaccccgcccagaggaccctgtacagggacgtgatgctggagaacttcagccacctggtgagcctgggccaccccgtgagcaagcccgacatcatcagcaggctggagcagggcgaggagccctggatcatcaagagggacatcagcgactggatctgccccgagagggagaccaggggcggcccaagcagcggcgcccctcctcccagcggcggcagcccagccggctccccaacctctaccgaggagggcacctctgagtccgccacccccgagagcggccctggcacctccaccgagcccagcgagggcagcgcacccggcagccctgccggcagccccacctccacagaggagggaaccagcaccgagcccagcgaaggcagcgccccaggcaccagcaccgagcctagtgagcaggagattaaacggatcaacaagatcagaagaagacttgtgaaagacagcaacaccaagaaggccggcaagacaggccccatgaaaaccctgctggttagagtgatgacacccgatctgagagagcggctggaaaacctgagaaagaagcctgaaaatatcccccagcccatcagcaatacatctagagccaacctgaataagctgctgaccgattacaccgaaatgaagaaggcgatcctgcatgtgtactgggaagagttccagaaggaccctgtgggcctgatgagccgggtggcccagcctgccagcaagaagatcgatcagaacaagctgaaacctgagatggacgagaagggcaacctgaccaccgccggctttgcctgctctcagtgtggccagcccctgttcgtgtacaagctggagcaggtgtctgagaagggcaaggcttacaccaactacttcggacggtgcaatgtggccgagcacgaaaagctgatcctgctggcccagctgaagcccgagaaggatagcgacgaagccgtgacatatagcctgggaaagtttgggcagagggccctggatttctacagcattcatgtgaccaaggagtccacccaccccgtgaagcccctggcccagatcgccggaaacagatacgcctccggacctgtgggaaaggccctgagcgacgcatgtatgggcacaatcgcctccttcctgtctaagtaccaggacatcatcatcgaacaccagaaggtggtgaagggcaaccagaagagactggagagcctgcgggagctggccggcaaggaaaacctggaataccctagcgtgaccctgccacctcagcctcacaccaaggagggcgttgatgcctacaacgaagtgatcgcccgggtgcgaatgtgggtgaacctgaacctgtggcagaagctgaagctaagcagagatgatgccaagcctctgctgagactgaagggattcccttcctttcctctggtcgagagacaggccaacgaagtggactggtgggacatggtgtgtaacgtgaagaagctgatcaacgagaaaaaggaggatggcaaggtgttttggcagaatctggctggctacaagagacaggaagccctgagaccatacctgagcagcgaggaagatcggaagaagggaaagaaattcgctcggtaccagctgggcgacctgctgctgcacctggaaaagaagcacggcgaggactggggaaaggtgtacgacgaggcctgggagcggattgacaagaaagtggaaggcctgagcaagcacatcaagctggaagaggaacggagaagcgaggacgcccagagcaaggccgccctgaccgactggctgcgggctaaggccagcttcgtgatcgagggcctgaaggaggccgacaaggacgagttctgcagatgcgagctgaagctgcagaagtggtacggggacctgcggggaaagcccttcgccatcgaagccgagaacagcatcctggacatcagcggcttcagcaagcagtacaactgtgccttcatctggcagaaggacggcgtgaagaagctgaacctgtacctgatcatcaactacttcaagggcggcaagctgcggttcaagaagatcaaacctgaagccttcgaagccaacagattctacaccgtgatcaacaaaaagagcggcgagatcgtgcccatggaggtgaacttcaacttcgacgaccccaacctgatcatcctgcctctggcctttggcaagagacagggcagagaattcatctggaacgacctgctgtccctggaaaccggcagcctgaagctggccaacggaagagtgatcgagaagacactgtacaacagaagaacccggcaggatgagcctgccctgttcgtggccctgaccttcgagcggcgggaggtcctggactcctccaatatcaaaccaatgaacctgatcggcgtggcaagaggcgaaaacatccccgccgtgatcgccctgaccgaccccgagggctgcccactgagccggtttaaggatagcctgggaaacccaacccacatcctgagaatcggcgagagctataaggagaagcagcggaccatccaggccaagaaggaggtggagcagcggagagccggcggctacagccggaagtacgccagcaaagccaagaatctggcagacgatatggtgagaaacaccgctagagatctgctgtactacgccgtgacccaggatgccatgctgatcttcgccaacctgagccggggcttcggccggcagggcaagcggaccttcatggccgagagacagtacacacggatggaggactggctgaccgccaagctggcctacgagggcctgagcaagacctacctgtccaagacactggcccagtacacctccaagacatgcagcaactgtgggtttaccatcaccagcgccgactacgacagggtgctggagaagctgaagaagacagcaacaggctggatgaccacaattaacggcaaggagctgaaggtggagggccagattacctactacaacagatacaagagacagaacgtagtcaaggacctgtccgtcgagctggatagactgagcgaagaatctgtgaacaacgacatctcctcctggacaaagggcagaagcggagaagctctgagcctcctgaagaaaagattctcccatagacccgtgcaggagaagttcgtgtgcctgaactgcggcttcgagacacacgcagccgagcaagccgccctgaacatcgccagatcctggctgttcctgcggagccaggagtacaagaaataccagacaaacaagacaaccggcaacaccgataagagagccttcgtcgagacctggcagtccttttaccggaagaagcttaaggaggtgtggaaacctgccgtgcggtctggcggatctggcggaggctcctagccacggccccctgagcttcgaggacgtggccatcgccttcaccaaggaggagtggcagcagctggaccccgcccagaggaccctgtacagggacgtgatgctggagaacttcagccacctggtgagcctgggccaccccgtgagcaagcccgacatcatcagcaggctggagcagggcgaggagccctggatcatcaagagggacatcagcgactggatctgccccgagagggagaccaggggatctggctccggcagcggccccaagaaaaagagaaaagtctaagctgccttctgcggggcttgccttctggccatgcccttcttctctcccttgcacctgtacctcttggtctttgaataaagcctgagtaggaaggctagcaaaaaaaaaaaaaaaaaaaaaaaaaaaaaaaaaaaaaaaaaaaaaaaaaaaaaaaaaaaaaaaaaaaaaaaaaaaaaaaa

SEQ ID NO: 16325 - RNA, 9485 nt, synthetic construct
  source 1..9485: mol_type = other RNA
aggaaataagagagaaaagaagagtaagaagaaatataagagccaccatggcccctaagaagaagcgtaaagtgagccggatggaacgcctcgtctacgaggtgcggcagaagtgcagaaacatcgaggacatctgcatctcctgcggatctctgaacgtgaccctggagcacccactgttcatcggcggcatgtgccagaactgtaaaaactgttttctggagtgtgcctatcaatacgacgatgacggctaccagagctactgcaccatctgttgcggcggaagagaggtgctgatgtgtggaaataacaactgctgccggtgcttctgcgtggaatgcgtggacctgctggtgggccccggcgccgcccaggccgctattaaggaagatccttggaactgctacatgtgcggccacaagggcacatacggcctgctgagacggagagaggactggcctagcagactgcagatgttcttcgccaataaccacgaccaggagttcgacccccctaaggtgtaccctcccgtccccgccgagaagagaaagcccatccgggtcctgagcctgttcgatggcatcgccaccggtctgctggtgctgaaggacctgggcatccaggtggataggtacattgcctccgaggtgtgcgaggactccatcaccgtgggaatggtgcgtcatcagggcaagatcatgtacgtgggcgacgtgcggagcgtgacacagaagcatatccaggagtggggccctttcgacctggtgatcggcggcagcccttgcaatgacctgagcatcgtgaacccagcccggaagggcctgtacgagggaaccggcagactgttcttcgagttttacagactgctgcacgacgcccggcctaaggaaggcgacgaccggcccttcttttggctgttcgagaatgtggtggccatgggagtcagcgacaagcgggatattagccggttcctggagagcaaccccgtgatgatcgatgccaaggaagtgagcgccgcccaccgggccagatacttctggggcaatctgcctggcatgaacagacccctggccagcaccgtgaacgacaagctggagctgcaggagtgcctggagcacggccggatcgccaagttcagcaaggtgagaaccatcaccacccgaagcaacagcatcaaacaaggcaaggaccagcactttcctgtgttcatgaacgagaaggaggacatcctgtggtgtaccgagatggagagagtgttcgggttcccagtccactacacagatgtcagcaacatgtctagactggccagacagagactgctgggaagaagctggtccgtccctgtgatcagacacctgttcgcccctctgaaggagtacttcgcctgcgtgagcagcggcaacagcaacgccaacagccggggccccagcttctctagcggcctggtgccactgtccctgagagggagccacatgggccccatggagatctacaaaaccgtgagcgcctggaagcggcagcctgtgcgcgtgctgagcctgtttcggaatatcgataaagtcctgaaaagcctgggattcctggagagcggctctggctccggcggtggcaccctgaagtacgtggaggatgtgacaaacgtggtcagacgggatgtggagaagtggggccccttcgatctggtgtacggcagcacccaacccctgggcagctcttgtgaccggtgccctggctggtacatgtttcagttccaccggatcctgcagtacgccctgccgagacaggagtcccagcggccattcttttggattttcatggacaacttgctgctgaccgaggatgaccaggaaactaccactcggttcctgcagaccgaagccgtgaccctgcaggacgtgagaggccgggactaccagaacgccatgcgggtgtggtccaacatccctggactgaaaagcaagcacgcacctctgacccctaaagaagaggagtacctgcaggcccaggtgcggagcagaagcaagctggacgcccctaaggtggatctgctggtgaagaattgcctcctgcccctgagagagtacttcaagtatttcagccagaatagtctgcccctgggaggcagcggcggcggcgccctggtgacatttgaggacgtcgccgtgcggttcacccaggaggaatgggctctgctggatccttctcagaaaatcctgtaccgggacgtgatgagagagacataccggaatctgacctccgtgggcatcaactgggaatgttgggaccttgaagcctgcttcagaagcctgggaagaaacctgagagtgcaggtggtgaagagaaagtgcgagctgaccaacagcggcccctgcgccgagggcggcccaagcagcggcgcccctcctcccagcggcggcagcccagccggctccccaacctctaccgaggagggcacctctgagtccgccacccccgagagcggccctggcacctccaccgagcccagcgagggcagcgcacccggcagccctgccggcagccccacctccacagaggagggaaccagcaccgagcccagcgaaggcagcgccccaggcaccagcaccgagcctagtgagcaggagattaaacggatcaacaagatcagaagaagacttgtgaaagacagcaacaccaagaaggccggcaagacaggccccatgaaaaccctgctggttagagtgatgacacccgatctgagagagcggctggaaaacctgagaaagaagcctgaaaatatcccccagcccatcagcaatacatctagagccaacctgaataagctgctgaccgattacaccgaaatgaagaaggcgatcctgcatgtgtactgggaagagttccagaaggaccctgtgggcctgatgagccgggtggcccagcctgccagcaagaagatcgatcagaacaagctgaaacctgagatggacgagaagggcaacctgaccaccgccggctttgcctgctctcagtgtggccagcccctgttcgtgtacaagctggagcaggtgtctgagaagggcaaggcttacaccaactacttcggacggtgcaatgtggccgagcacgaaaagctgatcctgctggcccagctgaagcccgagaaggatagcgacgaagccgtgacatatagcctgggaaagtttgggcagagggccctggatttctacagcattcatgtgaccaaggagtccacccaccccgtgaagcccctggcccagatcgccggaaacagatacgcctccggacctgtgggaaaggccctgagcgacgcatgtatgggcacaatcgcctccttcctgtctaagtaccaggacatcatcatcgaacaccagaaggtggtgaagggcaaccagaagagactggagagcctgcgggagctggccggcaaggaaaacctggaataccctagcgtgaccctgccacctcagcctcacaccaaggagggcgttgatgcctacaacgaagtgatcgcccgggtgcgaatgtgggtgaacctgaacctgtggcagaagctgaagctaagcagagatgatgccaagcctctgctgagactgaagggattcccttcctttcctctggtcgagagacaggccaacgaagtggactggtgggacatggtgtgtaacgtgaagaagctgatcaacgagaaaaaggaggatggcaaggtgttttggcagaatctggctggctacaagagacaggaagccctgagaccatacctgagcagcgaggaagatcggaagaagggaaagaaattcgctcggtaccagctgggcgacctgctgctgcacctggaaaagaagcacggcgaggactggggaaaggtgtacgacgaggcctgggagcggattgacaagaaagtggaaggcctgagcaagcacatcaagctggaagaggaacggagaagcgaggacgcccagagcaaggccgccctgaccgactggctgcgggctaaggccagcttcgtgatcgagggcctgaaggaggccgacaaggacgagttctgcagatgcgagctgaagctgcagaagtggtacggggacctgcggggaaagcccttcgccatcgaagccgagaacagcatcctggacatcagcggcttcagcaagcagtacaactgtgccttcatctggcagaaggacggcgtgaagaagctgaacctgtacctgatcatcaactacttcaagggcggcaagctgcggttcaagaagatcaaacctgaagccttcgaagccaacagattctacaccgtgatcaacaaaaagagcggcgagatcgtgcccatggaggtgaacttcaacttcgacgaccccaacctgatcatcctgcctctggcctttggcaagagacagggcagagaattcatctggaacgacctgctgtccctggaaaccggcagcctgaagctggccaacggaagagtgatcgagaagacactgtacaacagaagaacccggcaggatgagcctgccctgttcgtggccctgaccttcgagcggcgggaggtcctggactcctccaatatcaaaccaatgaacctgatcggcgtggcaagaggcgaaaacatccccgccgtgatcgccctgaccgaccccgagggctgcccactgagccggtttaaggatagcctgggaaacccaacccacatcctgagaatcggcgagagctataaggagaagcagcggaccatccaggccaagaaggaggtggagcagcggagagccggcggctacagccggaagtacgccagcaaagccaagaatctggcagacgatatggtgagaaacaccgctagagatctgctgtactacgccgtgacccaggatgccatgctgatcttcgccaacctgagccggggcttcggccggcagggcaagcggaccttcatggccgagagacagtacacacggatggaggactggctgaccgccaagctggcctacgagggcctgagcaagacctacctgtccaagacactggcccagtacacctccaagacatgcagcaactgtgggtttaccatcaccagcgccgactacgacagggtgctggagaagctgaagaagacagcaacaggctggatgaccacaattaacggcaaggagctgaaggtggagggccagattacctactacaacagatacaagagacagaacgtagtcaaggacctgtccgtcgagctggatagactgagcgaagaatctgtgaacaacgacatctcctcctggacaaagggcagaagcggagaagctctgagcctcctgaagaaaagattctcccatagacccgtgcaggagaagttcgtgtgcctgaactgcggcttcgagacacacgcagccgagcaagccgccctgaacatcgccagatcctggctgttcctgcggagccaggagtacaagaaataccagacaaacaagacaaccggcaacaccgataagagagccttcgtcgagacctggcagtccttttaccggaagaagcttaaggaggtgtggaaacctgccgtgcggtctggcggatctggcggaggctcccccgccgacagggacgccgtgacctacgacgacgtgcacatcggcttcacccaggaggagtgggtgctgctgaaccccagccagaagagcctgtacaaggacgtgatgctggacacctacaggaacctgaccgccatcggctacaggtggcaggaccacaacatcgaggagcactgcgagaacagcaggaggcacaggaggaagttcagctgcaccaccaagccctacgagagcctgcagaacggcggcccaagcagcggcgcccctcctcccagcggcggcagcccagccggctccccaacctctaccgaggagggcacctctgagtccgccacccccgagagcggccctggcacctccaccgagcccagcgagggcagcgcacccggcagccctgccggcagccccacctccacagaggagggaaccagcaccgagcccagcgaaggcagcgccccaggcaccagcaccgagcctagtgagcaggagattaaacggatcaacaagatcagaagaagacttgtgaaagacagcaacaccaagaaggccggcaagacaggccccatgaaaaccctgctggttagagtgatgacacccgatctgagagagcggctggaaaacctgagaaagaagcctgaaaatatcccccagcccatcagcaatacatctagagccaacctgaataagctgctgaccgattacaccgaaatgaagaaggcgatcctgcatgtgtactgggaagagttccagaaggaccctgtgggcctgatgagccgggtggcccagcctgccagcaagaagatcgatcagaacaagctgaaacctgagatggacgagaagggcaacctgaccaccgccggctttgcctgctctcagtgtggccagcccctgttcgtgtacaagctggagcaggtgtctgagaagggcaaggcttacaccaactacttcggacggtgcaatgtggccgagcacgaaaagctgatcctgctggcccagctgaagcccgagaaggatagcgacgaagccgtgacatatagcctgggaaagtttgggcagagggccctggatttctacagcattcatgtgaccaaggagtccacccaccccgtgaagcccctggcccagatcgccggaaacagatacgcctccggacctgtgggaaaggccctgagcgacgcatgtatgggcacaatcgcctccttcctgtctaagtaccaggacatcatcatcgaacaccagaaggtggtgaagggcaaccagaagagactggagagcctgcgggagctggccggcaaggaaaacctggaataccctagcgtgaccctgccacctcagcctcacaccaaggagggcgttgatgcctacaacgaagtgatcgcccgggtgcgaatgtgggtgaacctgaacctgtggcagaagctgaagctaagcagagatgatgccaagcctctgctgagactgaagggattcccttcctttcctctggtcgagagacaggccaacgaagtggactggtgggacatggtgtgtaacgtgaagaagctgatcaacgagaaaaaggaggatggcaaggtgttttggcagaatctggctggctacaagagacaggaagccctgagaccatacctgagcagcgaggaagatcggaagaagggaaagaaattcgctcggtaccagctgggcgacctgctgctgcacctggaaaagaagcacggcgaggactggggaaaggtgtacgacgaggcctgggagcggattgacaagaaagtggaaggcctgagcaagcacatcaagctggaagaggaacggagaagcgaggacgcccagagcaaggccgccctgaccgactggctgcgggctaaggccagcttcgtgatcgagggcctgaaggaggccgacaaggacgagttctgcagatgcgagctgaagctgcagaagtggtacggggacctgcggggaaagcccttcgccatcgaagccgagaacagcatcctggacatcagcggcttcagcaagcagtacaactgtgccttcatctggcagaaggacggcgtgaagaagctgaacctgtacctgatcatcaactacttcaagggcggcaagctgcggttcaagaagatcaaacctgaagccttcgaagccaacagattctacaccgtgatcaacaaaaagagcggcgagatcgtgcccatggaggtgaacttcaacttcgacgaccccaacctgatcatcctgcctctggcctttggcaagagacagggcagagaattcatctggaacgacctgctgtccctggaaaccggcagcctgaagctggccaacggaagagtgatcgagaagacactgtacaacagaagaacccggcaggatgagcctgccctgttcgtggccctgaccttcgagcggcgggaggtcctggactcctccaatatcaaaccaatgaacctgatcggcgtggcaagaggcgaaaacatccccgccgtgatcgccctgaccgaccccgagggctgcccactgagccggtttaaggatagcctgggaaacccaacccacatcctgagaatcggcgagagctataaggagaagcagcggaccatccaggccaagaaggaggtggagcagcggagagccggcggctacagccggaagtacgccagcaaagccaagaatctggcagacgatatggtgagaaacaccgctagagatctgctgtactacgccgtgacccaggatgccatgctgatcttcgccaacctgagccggggcttcggccggcagggcaagcggaccttcatggccgagagacagtacacacggatggaggactggctgaccgccaagctggcctacgagggcctgagcaagacctacctgtccaagacactggcccagtacacctccaagacatgcagcaactgtgggtttaccatcaccagcgccgactacgacagggtgctggagaagctgaagaagacagcaacaggctggatgaccacaattaacggcaaggagctgaaggtggagggccagattacctactacaacagatacaagagacagaacgtagtcaaggacctgtccgtcgagctggatagactgagcgaagaatctgtgaacaacgacatctcctcctggacaaagggcagaagcggagaagctctgagcctcctgaagaaaagattctcccatagacccgtgcaggagaagttcgtgtgcctgaactgcggcttcgagacacacgcagccgagcaagccgccctgaacatcgccagatcctggctgttcctgcggagccaggagtacaagaaataccagacaaacaagacaaccggcaacaccgataagagagccttcgtcgagacctggcagtccttttaccggaagaagcttaaggaggtgtggaaacctgccgtgcggtctggcggatctggcggaggctcctcccgccgacagggacgccgtgacctacgacgacgtgcacatcggcttcacccaggaggagtgggtgctgctgaaccccagccagaagagcctgtacaaggacgtgatgctggacacctacaggaacctgaccgccatcggctacaggtggcaggaccacaacatcgaggagcactgcgagaacagcaggaggcacaggaggaagttcagctgcaccaccaagccctacgagagcctgcagaacggatctggctccggcagcggccccaagaaaaagagaaaagtctaagctgccttctgcggggcttgccttctggccatgcccttcttctctcccttgcacctgtacctcttggtctttgaataaagcctgagtaggaaggctagcaaaaaaaaaaaaaaaaaaaaaaaaaaaaaaaaaaaaaaaaaaaaaaaaaaaaaaaaaaaaaaaaaaaaaaaaaaaaaaaa

SEQ ID NO: 16326 - RNA, 9485 nt, synthetic construct
  source 1..9485: mol_type = other RNA
aggaaataagagagaaaagaagagtaagaagaaatataagagccaccatggcccctaagaagaagcgtaaagtgagccggatggaacgcctcgtctacgaggtgcggcagaagtgcagaaacatcgaggacatctgcatctcctgcggatctctgaacgtgaccctggagcacccactgttcatcggcggcatgtgccagaactgtaaaaactgttttctggagtgtgcctatcaatacgacgatgacggctaccagagctactgcaccatctgttgcggcggaagagaggtgctgatgtgtggaaataacaactgctgccggtgcttctgcgtggaatgcgtggacctgctggtgggccccggcgccgcccaggccgctattaaggaagatccttggaactgctacatgtgcggccacaagggcacatacggcctgctgagacggagagaggactggcctagcagactgcagatgttcttcgccaataaccacgaccaggagttcgacccccctaaggtgtaccctcccgtccccgccgagaagagaaagcccatccgggtcctgagcctgttcgatggcatcgccaccggtctgctggtgctgaaggacctgggcatccaggtggataggtacattgcctccgaggtgtgcgaggactccatcaccgtgggaatggtgcgtcatcagggcaagatcatgtacgtgggcgacgtgcggagcgtgacacagaagcatatccaggagtggggccctttcgacctggtgatcggcggcagcccttgcaatgacctgagcatcgtgaacccagcccggaagggcctgtacgagggaaccggcagactgttcttcgagttttacagactgctgcacgacgcccggcctaaggaaggcgacgaccggcccttcttttggctgttcgagaatgtggtggccatgggagtcagcgacaagcgggatattagccggttcctggagagcaaccccgtgatgatcgatgccaaggaagtgagcgccgcccaccgggccagatacttctggggcaatctgcctggcatgaacagacccctggccagcaccgtgaacgacaagctggagctgcaggagtgcctggagcacggccggatcgccaagttcagcaaggtgagaaccatcaccacccgaagcaacagcatcaaacaaggcaaggaccagcactttcctgtgttcatgaacgagaaggaggacatcctgtggtgtaccgagatggagagagtgttcgggttcccagtccactacacagatgtcagcaacatgtctagactggccagacagagactgctgggaagaagctggtccgtccctgtgatcagacacctgttcgcccctctgaaggagtacttcgcctgcgtgagcagcggcaacagcaacgccaacagccggggccccagcttctctagcggcctggtgccactgtccctgagagggagccacatgggccccatggagatctacaaaaccgtgagcgcctggaagcggcagcctgtgcgcgtgctgagcctgtttcggaatatcgataaagtcctgaaaagcctgggattcctggagagcggctctggctccggcggtggcaccctgaagtacgtggaggatgtgacaaacgtggtcagacgggatgtggagaagtggggccccttcgatctggtgtacggcagcacccaacccctgggcagctcttgtgaccggtgccctggctggtacatgtttcagttccaccggatcctgcagtacgccctgccgagacaggagtcccagcggccattcttttggattttcatggacaacttgctgctgaccgaggatgaccaggaaactaccactcggttcctgcagaccgaagccgtgaccctgcaggacgtgagaggccgggactaccagaacgccatgcgggtgtggtccaacatccctggactgaaaagcaagcacgcacctctgacccctaaagaagaggagtacctgcaggcccaggtgcggagcagaagcaagctggacgcccctaaggtggatctgctggtgaagaattgcctcctgcccctgagagagtacttcaagtatttcagccagaatagtctgcccctgggaggcagcggcggcggcgccctggtgacatttgaggacgtcgccgtgcggttcacccaggaggaatgggctctgctggatccttctcagaaaatcctgtaccgggacgtgatgagagagacataccggaatctgacctccgtgggcatcaactgggaatgttgggaccttgaagcctgcttcagaagcctgggaagaaacctgagagtgcaggtggtgaagagaaagtgcgagctgaccaacagcggcccctgcgccgagggcggcccaagcagcggcgcccctcctcccagcggcggcagcccagccggctccccaacctctaccgaggagggcacctctgagtccgccacccccgagagcggccctggcacctccaccgagcccagcgagggcagcgcacccggcagccctgccggcagccccacctccacagaggagggaaccagcaccgagcccagcgaaggcagcgccccaggcaccagcaccgagcctagtgagcaggagattaaacggatcaacaagatcagaagaagacttgtgaaagacagcaacaccaagaaggccggcaagacaggccccatgaaaaccctgctggttagagtgatgacacccgatctgagagagcggctggaaaacctgagaaagaagcctgaaaatatcccccagcccatcagcaatacatctagagccaacctgaataagctgctgaccgattacaccgaaatgaagaaggcgatcctgcatgtgtactgggaagagttccagaaggaccctgtgggcctgatgagccgggtggcccagcctgccagcaagaagatcgatcagaacaagctgaaacctgagatggacgagaagggcaacctgaccaccgccggctttgcctgctctcagtgtggccagcccctgttcgtgtacaagctggagcaggtgtctgagaagggcaaggcttacaccaactacttcggacggtgcaatgtggccgagcacgaaaagctgatcctgctggcccagctgaagcccgagaaggatagcgacgaagccgtgacatatagcctgggaaagtttgggcagagggccctggatttctacagcattcatgtgaccaaggagtccacccaccccgtgaagcccctggcccagatcgccggaaacagatacgcctccggacctgtgggaaaggccctgagcgacgcatgtatgggcacaatcgcctccttcctgtctaagtaccaggacatcatcatcgaacaccagaaggtggtgaagggcaaccagaagagactggagagcctgcgggagctggccggcaaggaaaacctggaataccctagcgtgaccctgccacctcagcctcacaccaaggagggcgttgatgcctacaacgaagtgatcgcccgggtgcgaatgtgggtgaacctgaacctgtggcagaagctgaagctaagcagagatgatgccaagcctctgctgagactgaagggattcccttcctttcctctggtcgagagacaggccaacgaagtggactggtgggacatggtgtgtaacgtgaagaagctgatcaacgagaaaaaggaggatggcaaggtgttttggcagaatctggctggctacaagagacaggaagccctgagaccatacctgagcagcgaggaagatcggaagaagggaaagaaattcgctcggtaccagctgggcgacctgctgctgcacctggaaaagaagcacggcgaggactggggaaaggtgtacgacgaggcctgggagcggattgacaagaaagtggaaggcctgagcaagcacatcaagctggaagaggaacggagaagcgaggacgcccagagcaaggccgccctgaccgactggctgcgggctaaggccagcttcgtgatcgagggcctgaaggaggccgacaaggacgagttctgcagatgcgagctgaagctgcagaagtggtacggggacctgcggggaaagcccttcgccatcgaagccgagaacagcatcctggacatcagcggcttcagcaagcagtacaactgtgccttcatctggcagaaggacggcgtgaagaagctgaacctgtacctgatcatcaactacttcaagggcggcaagctgcggttcaagaagatcaaacctgaagccttcgaagccaacagattctacaccgtgatcaacaaaaagagcggcgagatcgtgcccatggaggtgaacttcaacttcgacgaccccaacctgatcatcctgcctctggcctttggcaagagacagggcagagaattcatctggaacgacctgctgtccctggaaaccggcagcctgaagctggccaacggaagagtgatcgagaagacactgtacaacagaagaacccggcaggatgagcctgccctgttcgtggccctgaccttcgagcggcgggaggtcctggactcctccaatatcaaaccaatgaacctgatcggcgtggcaagaggcgaaaacatccccgccgtgatcgccctgaccgaccccgagggctgcccactgagccggtttaaggatagcctgggaaacccaacccacatcctgagaatcggcgagagctataaggagaagcagcggaccatccaggccaagaaggaggtggagcagcggagagccggcggctacagccggaagtacgccagcaaagccaagaatctggcagacgatatggtgagaaacaccgctagagatctgctgtactacgccgtgacccaggatgccatgctgatcttcgccaacctgagccggggcttcggccggcagggcaagcggaccttcatggccgagagacagtacacacggatggaggactggctgaccgccaagctggcctacgagggcctgagcaagacctacctgtccaagacactggcccagtacacctccaagacatgcagcaactgtgggtttaccatcaccagcgccgactacgacagggtgctggagaagctgaagaagacagcaacaggctggatgaccacaattaacggcaaggagctgaaggtggagggccagattacctactacaacagatacaagagacagaacgtagtcaaggacctgtccgtcgagctggatagactgagcgaagaatctgtgaacaacgacatctcctcctggacaaagggcagaagcggagaagctctgagcctcctgaagaaaagattctcccatagacccgtgcaggagaagttcgtgtgcctgaactgcggcttcgagacacacgcagccgagcaagccgccctgaacatcgccagatcctggctgttcctgcggagccaggagtacaagaaataccagacaaacaagacaaccggcaacaccgataagagagccttcgtcgagacctggcagtccttttaccggaagaagcttaaggaggtgtggaaacctgccgtgcggtctggcggatctggcggaggctccagccaggagctgctgaccttcaaggacatcagcgtggacttcacccaggaggagtggggccagctgcccctggcccacaggaacctgtacagggaggtgatgctggagaactacggcaacctggtgagcgtggccggctaccagctgagcaagcccagcgtgatcagccagctggagaagggccaggagccctggatgaccgagaaggaggtgcccgaggaccccagcagcgacctgaggaccggcggcccaagcagcggcgcccctcctcccagcggcggcagcccagccggctccccaacctctaccgaggagggcacctctgagtccgccacccccgagagcggccctggcacctccaccgagcccagcgagggcagcgcacccggcagccctgccggcagccccacctccacagaggagggaaccagcaccgagcccagcgaaggcagcgccccaggcaccagcaccgagcctagtgagcaggagattaaacggatcaacaagatcagaagaagacttgtgaaagacagcaacaccaagaaggccggcaagacaggccccatgaaaaccctgctggttagagtgatgacacccgatctgagagagcggctggaaaacctgagaaagaagcctgaaaatatcccccagcccatcagcaatacatctagagccaacctgaataagctgctgaccgattacaccgaaatgaagaaggcgatcctgcatgtgtactgggaagagttccagaaggaccctgtgggcctgatgagccgggtggcccagcctgccagcaagaagatcgatcagaacaagctgaaacctgagatggacgagaagggcaacctgaccaccgccggctttgcctgctctcagtgtggccagcccctgttcgtgtacaagctggagcaggtgtctgagaagggcaaggcttacaccaactacttcggacggtgcaatgtggccgagcacgaaaagctgatcctgctggcccagctgaagcccgagaaggatagcgacgaagccgtgacatatagcctgggaaagtttgggcagagggccctggatttctacagcattcatgtgaccaaggagtccacccaccccgtgaagcccctggcccagatcgccggaaacagatacgcctccggacctgtgggaaaggccctgagcgacgcatgtatgggcacaatcgcctccttcctgtctaagtaccaggacatcatcatcgaacaccagaaggtggtgaagggcaaccagaagagactggagagcctgcgggagctggccggcaaggaaaacctggaataccctagcgtgaccctgccacctcagcctcacaccaaggagggcgttgatgcctacaacgaagtgatcgcccgggtgcgaatgtgggtgaacctgaacctgtggcagaagctgaagctaagcagagatgatgccaagcctctgctgagactgaagggattcccttcctttcctctggtcgagagacaggccaacgaagtggactggtgggacatggtgtgtaacgtgaagaagctgatcaacgagaaaaaggaggatggcaaggtgttttggcagaatctggctggctacaagagacaggaagccctgagaccatacctgagcagcgaggaagatcggaagaagggaaagaaattcgctcggtaccagctgggcgacctgctgctgcacctggaaaagaagcacggcgaggactggggaaaggtgtacgacgaggcctgggagcggattgacaagaaagtggaaggcctgagcaagcacatcaagctggaagaggaacggagaagcgaggacgcccagagcaaggccgccctgaccgactggctgcgggctaaggccagcttcgtgatcgagggcctgaaggaggccgacaaggacgagttctgcagatgcgagctgaagctgcagaagtggtacggggacctgcggggaaagcccttcgccatcgaagccgagaacagcatcctggacatcagcggcttcagcaagcagtacaactgtgccttcatctggcagaaggacggcgtgaagaagctgaacctgtacctgatcatcaactacttcaagggcggcaagctgcggttcaagaagatcaaacctgaagccttcgaagccaacagattctacaccgtgatcaacaaaaagagcggcgagatcgtgcccatggaggtgaacttcaacttcgacgaccccaacctgatcatcctgcctctggcctttggcaagagacagggcagagaattcatctggaacgacctgctgtccctggaaaccggcagcctgaagctggccaacggaagagtgatcgagaagacactgtacaacagaagaacccggcaggatgagcctgccctgttcgtggccctgaccttcgagcggcgggaggtcctggactcctccaatatcaaaccaatgaacctgatcggcgtggcaagaggcgaaaacatccccgccgtgatcgccctgaccgaccccgagggctgcccactgagccggtttaaggatagcctgggaaacccaacccacatcctgagaatcggcgagagctataaggagaagcagcggaccatccaggccaagaaggaggtggagcagcggagagccggcggctacagccggaagtacgccagcaaagccaagaatctggcagacgatatggtgagaaacaccgctagagatctgctgtactacgccgtgacccaggatgccatgctgatcttcgccaacctgagccggggcttcggccggcagggcaagcggaccttcatggccgagagacagtacacacggatggaggactggctgaccgccaagctggcctacgagggcctgagcaagacctacctgtccaagacactggcccagtacacctccaagacatgcagcaactgtgggtttaccatcaccagcgccgactacgacagggtgctggagaagctgaagaagacagcaacaggctggatgaccacaattaacggcaaggagctgaaggtggagggccagattacctactacaacagatacaagagacagaacgtagtcaaggacctgtccgtcgagctggatagactgagcgaagaatctgtgaacaacgacatctcctcctggacaaagggcagaagcggagaagctctgagcctcctgaagaaaagattctcccatagacccgtgcaggagaagttcgtgtgcctgaactgcggcttcgagacacacgcagccgagcaagccgccctgaacatcgccagatcctggctgttcctgcggagccaggagtacaagaaataccagacaaacaagacaaccggcaacaccgataagagagccttcgtcgagacctggcagtccttttaccggaagaagcttaaggaggtgtggaaacctgccgtgcggtctggcggatctggcggaggctcctagccaggagctgctgaccttcaaggacatcagcgtggacttcacccaggaggagtggggccagctgcccctggcccacaggaacctgtacagggaggtgatgctggagaactacggcaacctggtgagcgtggccggctaccagctgagcaagcccagcgtgatcagccagctggagaagggccaggagccctggatgaccgagaaggaggtgcccgaggaccccagcagcgacctgaggaccggatctggctccggcagcggccccaagaaaaagagaaaagtctaagctgccttctgcggggcttgccttctggccatgcccttcttctctcccttgcacctgtacctcttggtctttgaataaagcctgagtaggaaggctagcaaaaaaaaaaaaaaaaaaaaaaaaaaaaaaaaaaaaaaaaaaaaaaaaaaaaaaaaaaaaaaaaaaaaaaaaaaaaaaaa

SEQ ID NO: 16327 - RNA, 9485 nt, synthetic construct
  source 1..9485: mol_type = other RNA
aggaaataagagagaaaagaagagtaagaagaaatataagagccaccatggcccctaagaagaagcgtaaagtgagccggatggaacgcctcgtctacgaggtgcggcagaagtgcagaaacatcgaggacatctgcatctcctgcggatctctgaacgtgaccctggagcacccactgttcatcggcggcatgtgccagaactgtaaaaactgttttctggagtgtgcctatcaatacgacgatgacggctaccagagctactgcaccatctgttgcggcggaagagaggtgctgatgtgtggaaataacaactgctgccggtgcttctgcgtggaatgcgtggacctgctggtgggccccggcgccgcccaggccgctattaaggaagatccttggaactgctacatgtgcggccacaagggcacatacggcctgctgagacggagagaggactggcctagcagactgcagatgttcttcgccaataaccacgaccaggagttcgacccccctaaggtgtaccctcccgtccccgccgagaagagaaagcccatccgggtcctgagcctgttcgatggcatcgccaccggtctgctggtgctgaaggacctgggcatccaggtggataggtacattgcctccgaggtgtgcgaggactccatcaccgtgggaatggtgcgtcatcagggcaagatcatgtacgtgggcgacgtgcggagcgtgacacagaagcatatccaggagtggggccctttcgacctggtgatcggcggcagcccttgcaatgacctgagcatcgtgaacccagcccggaagggcctgtacgagggaaccggcagactgttcttcgagttttacagactgctgcacgacgcccggcctaaggaaggcgacgaccggcccttcttttggctgttcgagaatgtggtggccatgggagtcagcgacaagcgggatattagccggttcctggagagcaaccccgtgatgatcgatgccaaggaagtgagcgccgcccaccgggccagatacttctggggcaatctgcctggcatgaacagacccctggccagcaccgtgaacgacaagctggagctgcaggagtgcctggagcacggccggatcgccaagttcagcaaggtgagaaccatcaccacccgaagcaacagcatcaaacaaggcaaggaccagcactttcctgtgttcatgaacgagaaggaggacatcctgtggtgtaccgagatggagagagtgttcgggttcccagtccactacacagatgtcagcaacatgtctagactggccagacagagactgctgggaagaagctggtccgtccctgtgatcagacacctgttcgcccctctgaaggagtacttcgcctgcgtgagcagcggcaacagcaacgccaacagccggggccccagcttctctagcggcctggtgccactgtccctgagagggagccacatgggccccatggagatctacaaaaccgtgagcgcctggaagcggcagcctgtgcgcgtgctgagcctgtttcggaatatcgataaagtcctgaaaagcctgggattcctggagagcggctctggctccggcggtggcaccctgaagtacgtggaggatgtgacaaacgtggtcagacgggatgtggagaagtggggccccttcgatctggtgtacggcagcacccaacccctgggcagctcttgtgaccggtgccctggctggtacatgtttcagttccaccggatcctgcagtacgccctgccgagacaggagtcccagcggccattcttttggattttcatggacaacttgctgctgaccgaggatgaccaggaaactaccactcggttcctgcagaccgaagccgtgaccctgcaggacgtgagaggccgggactaccagaacgccatgcgggtgtggtccaacatccctggactgaaaagcaagcacgcacctctgacccctaaagaagaggagtacctgcaggcccaggtgcggagcagaagcaagctggacgcccctaaggtggatctgctggtgaagaattgcctcctgcccctgagagagtacttcaagtatttcagccagaatagtctgcccctgggaggcagcggcggcggcgccctggtgacatttgaggacgtcgccgtgcggttcacccaggaggaatgggctctgctggatccttctcagaaaatcctgtaccgggacgtgatgagagagacataccggaatctgacctccgtgggcatcaactgggaatgttgggaccttgaagcctgcttcagaagcctgggaagaaacctgagagtgcaggtggtgaagagaaagtgcgagctgaccaacagcggcccctgcgccgagggcggcccaagcagcggcgcccctcctcccagcggcggcagcccagccggctccccaacctctaccgaggagggcacctctgagtccgccacccccgagagcggccctggcacctccaccgagcccagcgagggcagcgcacccggcagccctgccggcagccccacctccacagaggagggaaccagcaccgagcccagcgaaggcagcgccccaggcaccagcaccgagcctagtgagcaggagattaaacggatcaacaagatcagaagaagacttgtgaaagacagcaacaccaagaaggccggcaagacaggccccatgaaaaccctgctggttagagtgatgacacccgatctgagagagcggctggaaaacctgagaaagaagcctgaaaatatcccccagcccatcagcaatacatctagagccaacctgaataagctgctgaccgattacaccgaaatgaagaaggcgatcctgcatgtgtactgggaagagttccagaaggaccctgtgggcctgatgagccgggtggcccagcctgccagcaagaagatcgatcagaacaagctgaaacctgagatggacgagaagggcaacctgaccaccgccggctttgcctgctctcagtgtggccagcccctgttcgtgtacaagctggagcaggtgtctgagaagggcaaggcttacaccaactacttcggacggtgcaatgtggccgagcacgaaaagctgatcctgctggcccagctgaagcccgagaaggatagcgacgaagccgtgacatatagcctgggaaagtttgggcagagggccctggatttctacagcattcatgtgaccaaggagtccacccaccccgtgaagcccctggcccagatcgccggaaacagatacgcctccggacctgtgggaaaggccctgagcgacgcatgtatgggcacaatcgcctccttcctgtctaagtaccaggacatcatcatcgaacaccagaaggtggtgaagggcaaccagaagagactggagagcctgcgggagctggccggcaaggaaaacctggaataccctagcgtgaccctgccacctcagcctcacaccaaggagggcgttgatgcctacaacgaagtgatcgcccgggtgcgaatgtgggtgaacctgaacctgtggcagaagctgaagctaagcagagatgatgccaagcctctgctgagactgaagggattcccttcctttcctctggtcgagagacaggccaacgaagtggactggtgggacatggtgtgtaacgtgaagaagctgatcaacgagaaaaaggaggatggcaaggtgttttggcagaatctggctggctacaagagacaggaagccctgagaccatacctgagcagcgaggaagatcggaagaagggaaagaaattcgctcggtaccagctgggcgacctgctgctgcacctggaaaagaagcacggcgaggactggggaaaggtgtacgacgaggcctgggagcggattgacaagaaagtggaaggcctgagcaagcacatcaagctggaagaggaacggagaagcgaggacgcccagagcaaggccgccctgaccgactggctgcgggctaaggccagcttcgtgatcgagggcctgaaggaggccgacaaggacgagttctgcagatgcgagctgaagctgcagaagtggtacggggacctgcggggaaagcccttcgccatcgaagccgagaacagcatcctggacatcagcggcttcagcaagcagtacaactgtgccttcatctggcagaaggacggcgtgaagaagctgaacctgtacctgatcatcaactacttcaagggcggcaagctgcggttcaagaagatcaaacctgaagccttcgaagccaacagattctacaccgtgatcaacaaaaagagcggcgagatcgtgcccatggaggtgaacttcaacttcgacgaccccaacctgatcatcctgcctctggcctttggcaagagacagggcagagaattcatctggaacgacctgctgtccctggaaaccggcagcctgaagctggccaacggaagagtgatcgagaagacactgtacaacagaagaacccggcaggatgagcctgccctgttcgtggccctgaccttcgagcggcgggaggtcctggactcctccaatatcaaaccaatgaacctgatcggcgtggcaagaggcgaaaacatccccgccgtgatcgccctgaccgaccccgagggctgcccactgagccggtttaaggatagcctgggaaacccaacccacatcctgagaatcggcgagagctataaggagaagcagcggaccatccaggccaagaaggaggtggagcagcggagagccggcggctacagccggaagtacgccagcaaagccaagaatctggcagacgatatggtgagaaacaccgctagagatctgctgtactacgccgtgacccaggatgccatgctgatcttcgccaacctgagccggggcttcggccggcagggcaagcggaccttcatggccgagagacagtacacacggatggaggactggctgaccgccaagctggcctacgagggcctgagcaagacctacctgtccaagacactggcccagtacacctccaagacatgcagcaactgtgggtttaccatcaccagcgccgactacgacagggtgctggagaagctgaagaagacagcaacaggctggatgaccacaattaacggcaaggagctgaaggtggagggccagattacctactacaacagatacaagagacagaacgtagtcaaggacctgtccgtcgagctggatagactgagcgaagaatctgtgaacaacgacatctcctcctggacaaagggcagaagcggagaagctctgagcctcctgaagaaaagattctcccatagacccgtgcaggagaagttcgtgtgcctgaactgcggcttcgagacacacgcagccgagcaagccgccctgaacatcgccagatcctggctgttcctgcggagccaggagtacaagaaataccagacaaacaagacaaccggcaacaccgataagagagccttcgtcgagacctggcagtccttttaccggaagaagcttaaggaggtgtggaaacctgccgtgcggtctggcggatctggcggaggctccgcccaggagctggtgaccttccaggacgtggccgtggacttcaccgaggaggagtggggcctgctggaccacagccagaaggagctgtacaaggaggtgatgctggagaacgcccagaacctgctgagcctgggcctgcccgtgaccagggaggacctgatcagcttcttccagaagggcgaggccccctggatcctggagcccaagggcccctggaacttctgccccgacgccgtgaccaggggcggcccaagcagcggcgcccctcctcccagcggcggcagcccagccggctccccaacctctaccgaggagggcacctctgagtccgccacccccgagagcggccctggcacctccaccgagcccagcgagggcagcgcacccggcagccctgccggcagccccacctccacagaggagggaaccagcaccgagcccagcgaaggcagcgccccaggcaccagcaccgagcctagtgagcaggagattaaacggatcaacaagatcagaagaagacttgtgaaagacagcaacaccaagaaggccggcaagacaggccccatgaaaaccctgctggttagagtgatgacacccgatctgagagagcggctggaaaacctgagaaagaagcctgaaaatatcccccagcccatcagcaatacatctagagccaacctgaataagctgctgaccgattacaccgaaatgaagaaggcgatcctgcatgtgtactgggaagagttccagaaggaccctgtgggcctgatgagccgggtggcccagcctgccagcaagaagatcgatcagaacaagctgaaacctgagatggacgagaagggcaacctgaccaccgccggctttgcctgctctcagtgtggccagcccctgttcgtgtacaagctggagcaggtgtctgagaagggcaaggcttacaccaactacttcggacggtgcaatgtggccgagcacgaaaagctgatcctgctggcccagctgaagcccgagaaggatagcgacgaagccgtgacatatagcctgggaaagtttgggcagagggccctggatttctacagcattcatgtgaccaaggagtccacccaccccgtgaagcccctggcccagatcgccggaaacagatacgcctccggacctgtgggaaaggccctgagcgacgcatgtatgggcacaatcgcctccttcctgtctaagtaccaggacatcatcatcgaacaccagaaggtggtgaagggcaaccagaagagactggagagcctgcgggagctggccggcaaggaaaacctggaataccctagcgtgaccctgccacctcagcctcacaccaaggagggcgttgatgcctacaacgaagtgatcgcccgggtgcgaatgtgggtgaacctgaacctgtggcagaagctgaagctaagcagagatgatgccaagcctctgctgagactgaagggattcccttcctttcctctggtcgagagacaggccaacgaagtggactggtgggacatggtgtgtaacgtgaagaagctgatcaacgagaaaaaggaggatggcaaggtgttttggcagaatctggctggctacaagagacaggaagccctgagaccatacctgagcagcgaggaagatcggaagaagggaaagaaattcgctcggtaccagctgggcgacctgctgctgcacctggaaaagaagcacggcgaggactggggaaaggtgtacgacgaggcctgggagcggattgacaagaaagtggaaggcctgagcaagcacatcaagctggaagaggaacggagaagcgaggacgcccagagcaaggccgccctgaccgactggctgcgggctaaggccagcttcgtgatcgagggcctgaaggaggccgacaaggacgagttctgcagatgcgagctgaagctgcagaagtggtacggggacctgcggggaaagcccttcgccatcgaagccgagaacagcatcctggacatcagcggcttcagcaagcagtacaactgtgccttcatctggcagaaggacggcgtgaagaagctgaacctgtacctgatcatcaactacttcaagggcggcaagctgcggttcaagaagatcaaacctgaagccttcgaagccaacagattctacaccgtgatcaacaaaaagagcggcgagatcgtgcccatggaggtgaacttcaacttcgacgaccccaacctgatcatcctgcctctggcctttggcaagagacagggcagagaattcatctggaacgacctgctgtccctggaaaccggcagcctgaagctggccaacggaagagtgatcgagaagacactgtacaacagaagaacccggcaggatgagcctgccctgttcgtggccctgaccttcgagcggcgggaggtcctggactcctccaatatcaaaccaatgaacctgatcggcgtggcaagaggcgaaaacatccccgccgtgatcgccctgaccgaccccgagggctgcccactgagccggtttaaggatagcctgggaaacccaacccacatcctgagaatcggcgagagctataaggagaagcagcggaccatccaggccaagaaggaggtggagcagcggagagccggcggctacagccggaagtacgccagcaaagccaagaatctggcagacgatatggtgagaaacaccgctagagatctgctgtactacgccgtgacccaggatgccatgctgatcttcgccaacctgagccggggcttcggccggcagggcaagcggaccttcatggccgagagacagtacacacggatggaggactggctgaccgccaagctggcctacgagggcctgagcaagacctacctgtccaagacactggcccagtacacctccaagacatgcagcaactgtgggtttaccatcaccagcgccgactacgacagggtgctggagaagctgaagaagacagcaacaggctggatgaccacaattaacggcaaggagctgaaggtggagggccagattacctactacaacagatacaagagacagaacgtagtcaaggacctgtccgtcgagctggatagactgagcgaagaatctgtgaacaacgacatctcctcctggacaaagggcagaagcggagaagctctgagcctcctgaagaaaagattctcccatagacccgtgcaggagaagttcgtgtgcctgaactgcggcttcgagacacacgcagccgagcaagccgccctgaacatcgccagatcctggctgttcctgcggagccaggagtacaagaaataccagacaaacaagacaaccggcaacaccgataagagagccttcgtcgagacctggcagtccttttaccggaagaagcttaaggaggtgtggaaacctgccgtgcggtctggcggatctggcggaggctcctgcccaggagctggtgaccttccaggacgtggccgtggacttcaccgaggaggagtggggcctgctggaccacagccagaaggagctgtacaaggaggtgatgctggagaacgcccagaacctgctgagcctgggcctgcccgtgaccagggaggacctgatcagcttcttccagaagggcgaggccccctggatcctggagcccaagggcccctggaacttctgccccgacgccgtgaccaggggatctggctccggcagcggccccaagaaaaagagaaaagtctaagctgccttctgcggggcttgccttctggccatgcccttcttctctcccttgcacctgtacctcttggtctttgaataaagcctgagtaggaaggctagcaaaaaaaaaaaaaaaaaaaaaaaaaaaaaaaaaaaaaaaaaaaaaaaaaaaaaaaaaaaaaaaaaaaaaaaaaaaaaaaa

SEQ ID NO: 16328 - RNA, 9485 nt, synthetic construct
  source 1..9485: mol_type = other RNA
aggaaataagagagaaaagaagagtaagaagaaatataagagccaccatggcccctaagaagaagcgtaaagtgagccggatggaacgcctcgtctacgaggtgcggcagaagtgcagaaacatcgaggacatctgcatctcctgcggatctctgaacgtgaccctggagcacccactgttcatcggcggcatgtgccagaactgtaaaaactgttttctggagtgtgcctatcaatacgacgatgacggctaccagagctactgcaccatctgttgcggcggaagagaggtgctgatgtgtggaaataacaactgctgccggtgcttctgcgtggaatgcgtggacctgctggtgggccccggcgccgcccaggccgctattaaggaagatccttggaactgctacatgtgcggccacaagggcacatacggcctgctgagacggagagaggactggcctagcagactgcagatgttcttcgccaataaccacgaccaggagttcgacccccctaaggtgtaccctcccgtccccgccgagaagagaaagcccatccgggtcctgagcctgttcgatggcatcgccaccggtctgctggtgctgaaggacctgggcatccaggtggataggtacattgcctccgaggtgtgcgaggactccatcaccgtgggaatggtgcgtcatcagggcaagatcatgtacgtgggcgacgtgcggagcgtgacacagaagcatatccaggagtggggccctttcgacctggtgatcggcggcagcccttgcaatgacctgagcatcgtgaacccagcccggaagggcctgtacgagggaaccggcagactgttcttcgagttttacagactgctgcacgacgcccggcctaaggaaggcgacgaccggcccttcttttggctgttcgagaatgtggtggccatgggagtcagcgacaagcgggatattagccggttcctggagagcaaccccgtgatgatcgatgccaaggaagtgagcgccgcccaccgggccagatacttctggggcaatctgcctggcatgaacagacccctggccagcaccgtgaacgacaagctggagctgcaggagtgcctggagcacggccggatcgccaagttcagcaaggtgagaaccatcaccacccgaagcaacagcatcaaacaaggcaaggaccagcactttcctgtgttcatgaacgagaaggaggacatcctgtggtgtaccgagatggagagagtgttcgggttcccagtccactacacagatgtcagcaacatgtctagactggccagacagagactgctgggaagaagctggtccgtccctgtgatcagacacctgttcgcccctctgaaggagtacttcgcctgcgtgagcagcggcaacagcaacgccaacagccggggccccagcttctctagcggcctggtgccactgtccctgagagggagccacatgggccccatggagatctacaaaaccgtgagcgcctggaagcggcagcctgtgcgcgtgctgagcctgtttcggaatatcgataaagtcctgaaaagcctgggattcctggagagcggctctggctccggcggtggcaccctgaagtacgtggaggatgtgacaaacgtggtcagacgggatgtggagaagtggggccccttcgatctggtgtacggcagcacccaacccctgggcagctcttgtgaccggtgccctggctggtacatgtttcagttccaccggatcctgcagtacgccctgccgagacaggagtcccagcggccattcttttggattttcatggacaacttgctgctgaccgaggatgaccaggaaactaccactcggttcctgcagaccgaagccgtgaccctgcaggacgtgagaggccgggactaccagaacgccatgcgggtgtggtccaacatccctggactgaaaagcaagcacgcacctctgacccctaaagaagaggagtacctgcaggcccaggtgcggagcagaagcaagctggacgcccctaaggtggatctgctggtgaagaattgcctcctgcccctgagagagtacttcaagtatttcagccagaatagtctgcccctgggaggcagcggcggcggcgccctggtgacatttgaggacgtcgccgtgcggttcacccaggaggaatgggctctgctggatccttctcagaaaatcctgtaccgggacgtgatgagagagacataccggaatctgacctccgtgggcatcaactgggaatgttgggaccttgaagcctgcttcagaagcctgggaagaaacctgagagtgcaggtggtgaagagaaagtgcgagctgaccaacagcggcccctgcgccgagggcggcccaagcagcggcgcccctcctcccagcggcggcagcccagccggctccccaacctctaccgaggagggcacctctgagtccgccacccccgagagcggccctggcacctccaccgagcccagcgagggcagcgcacccggcagccctgccggcagccccacctccacagaggagggaaccagcaccgagcccagcgaaggcagcgccccaggcaccagcaccgagcctagtgagcaggagattaaacggatcaacaagatcagaagaagacttgtgaaagacagcaacaccaagaaggccggcaagacaggccccatgaaaaccctgctggttagagtgatgacacccgatctgagagagcggctggaaaacctgagaaagaagcctgaaaatatcccccagcccatcagcaatacatctagagccaacctgaataagctgctgaccgattacaccgaaatgaagaaggcgatcctgcatgtgtactgggaagagttccagaaggaccctgtgggcctgatgagccgggtggcccagcctgccagcaagaagatcgatcagaacaagctgaaacctgagatggacgagaagggcaacctgaccaccgccggctttgcctgctctcagtgtggccagcccctgttcgtgtacaagctggagcaggtgtctgagaagggcaaggcttacaccaactacttcggacggtgcaatgtggccgagcacgaaaagctgatcctgctggcccagctgaagcccgagaaggatagcgacgaagccgtgacatatagcctgggaaagtttgggcagagggccctggatttctacagcattcatgtgaccaaggagtccacccaccccgtgaagcccctggcccagatcgccggaaacagatacgcctccggacctgtgggaaaggccctgagcgacgcatgtatgggcacaatcgcctccttcctgtctaagtaccaggacatcatcatcgaacaccagaaggtggtgaagggcaaccagaagagactggagagcctgcgggagctggccggcaaggaaaacctggaataccctagcgtgaccctgccacctcagcctcacaccaaggagggcgttgatgcctacaacgaagtgatcgcccgggtgcgaatgtgggtgaacctgaacctgtggcagaagctgaagctaagcagagatgatgccaagcctctgctgagactgaagggattcccttcctttcctctggtcgagagacaggccaacgaagtggactggtgggacatggtgtgtaacgtgaagaagctgatcaacgagaaaaaggaggatggcaaggtgttttggcagaatctggctggctacaagagacaggaagccctgagaccatacctgagcagcgaggaagatcggaagaagggaaagaaattcgctcggtaccagctgggcgacctgctgctgcacctggaaaagaagcacggcgaggactggggaaaggtgtacgacgaggcctgggagcggattgacaagaaagtggaaggcctgagcaagcacatcaagctggaagaggaacggagaagcgaggacgcccagagcaaggccgccctgaccgactggctgcgggctaaggccagcttcgtgatcgagggcctgaaggaggccgacaaggacgagttctgcagatgcgagctgaagctgcagaagtggtacggggacctgcggggaaagcccttcgccatcgaagccgagaacagcatcctggacatcagcggcttcagcaagcagtacaactgtgccttcatctggcagaaggacggcgtgaagaagctgaacctgtacctgatcatcaactacttcaagggcggcaagctgcggttcaagaagatcaaacctgaagccttcgaagccaacagattctacaccgtgatcaacaaaaagagcggcgagatcgtgcccatggaggtgaacttcaacttcgacgaccccaacctgatcatcctgcctctggcctttggcaagagacagggcagagaattcatctggaacgacctgctgtccctggaaaccggcagcctgaagctggccaacggaagagtgatcgagaagacactgtacaacagaagaacccggcaggatgagcctgccctgttcgtggccctgaccttcgagcggcgggaggtcctggactcctccaatatcaaaccaatgaacctgatcggcgtggcaagaggcgaaaacatccccgccgtgatcgccctgaccgaccccgagggctgcccactgagccggtttaaggatagcctgggaaacccaacccacatcctgagaatcggcgagagctataaggagaagcagcggaccatccaggccaagaaggaggtggagcagcggagagccggcggctacagccggaagtacgccagcaaagccaagaatctggcagacgatatggtgagaaacaccgctagagatctgctgtactacgccgtgacccaggatgccatgctgatcttcgccaacctgagccggggcttcggccggcagggcaagcggaccttcatggccgagagacagtacacacggatggaggactggctgaccgccaagctggcctacgagggcctgagcaagacctacctgtccaagacactggcccagtacacctccaagacatgcagcaactgtgggtttaccatcaccagcgccgactacgacagggtgctggagaagctgaagaagacagcaacaggctggatgaccacaattaacggcaaggagctgaaggtggagggccagattacctactacaacagatacaagagacagaacgtagtcaaggacctgtccgtcgagctggatagactgagcgaagaatctgtgaacaacgacatctcctcctggacaaagggcagaagcggagaagctctgagcctcctgaagaaaagattctcccatagacccgtgcaggagaagttcgtgtgcctgaactgcggcttcgagacacacgcagccgagcaagccgccctgaacatcgccagatcctggctgttcctgcggagccaggagtacaagaaataccagacaaacaagacaaccggcaacaccgataagagagccttcgtcgagacctggcagtccttttaccggaagaagcttaaggaggtgtggaaacctgccgtgcggtctggcggatctggcggaggctccgccctgaggagcgtgatgttcagcgacgtgagcatcgacttcagccccgaggagtgggagtacctggacctggagcagaaggacctgtacagggacgtgatgctggagaactacagcaacctggtgagcctgggctgcttcatcagcaagcccgacgtgatcagcagcctggagcagggcaaggagccctggaaggtggtgaggaagggcaggaggcagtaccccgacctggagaccaagtacggcggcccaagcagcggcgcccctcctcccagcggcggcagcccagccggctccccaacctctaccgaggagggcacctctgagtccgccacccccgagagcggccctggcacctccaccgagcccagcgagggcagcgcacccggcagccctgccggcagccccacctccacagaggagggaaccagcaccgagcccagcgaaggcagcgccccaggcaccagcaccgagcctagtgagcaggagattaaacggatcaacaagatcagaagaagacttgtgaaagacagcaacaccaagaaggccggcaagacaggccccatgaaaaccctgctggttagagtgatgacacccgatctgagagagcggctggaaaacctgagaaagaagcctgaaaatatcccccagcccatcagcaatacatctagagccaacctgaataagctgctgaccgattacaccgaaatgaagaaggcgatcctgcatgtgtactgggaagagttccagaaggaccctgtgggcctgatgagccgggtggcccagcctgccagcaagaagatcgatcagaacaagctgaaacctgagatggacgagaagggcaacctgaccaccgccggctttgcctgctctcagtgtggccagcccctgttcgtgtacaagctggagcaggtgtctgagaagggcaaggcttacaccaactacttcggacggtgcaatgtggccgagcacgaaaagctgatcctgctggcccagctgaagcccgagaaggatagcgacgaagccgtgacatatagcctgggaaagtttgggcagagggccctggatttctacagcattcatgtgaccaaggagtccacccaccccgtgaagcccctggcccagatcgccggaaacagatacgcctccggacctgtgggaaaggccctgagcgacgcatgtatgggcacaatcgcctccttcctgtctaagtaccaggacatcatcatcgaacaccagaaggtggtgaagggcaaccagaagagactggagagcctgcgggagctggccggcaaggaaaacctggaataccctagcgtgaccctgccacctcagcctcacaccaaggagggcgttgatgcctacaacgaagtgatcgcccgggtgcgaatgtgggtgaacctgaacctgtggcagaagctgaagctaagcagagatgatgccaagcctctgctgagactgaagggattcccttcctttcctctggtcgagagacaggccaacgaagtggactggtgggacatggtgtgtaacgtgaagaagctgatcaacgagaaaaaggaggatggcaaggtgttttggcagaatctggctggctacaagagacaggaagccctgagaccatacctgagcagcgaggaagatcggaagaagggaaagaaattcgctcggtaccagctgggcgacctgctgctgcacctggaaaagaagcacggcgaggactggggaaaggtgtacgacgaggcctgggagcggattgacaagaaagtggaaggcctgagcaagcacatcaagctggaagaggaacggagaagcgaggacgcccagagcaaggccgccctgaccgactggctgcgggctaaggccagcttcgtgatcgagggcctgaaggaggccgacaaggacgagttctgcagatgcgagctgaagctgcagaagtggtacggggacctgcggggaaagcccttcgccatcgaagccgagaacagcatcctggacatcagcggcttcagcaagcagtacaactgtgccttcatctggcagaaggacggcgtgaagaagctgaacctgtacctgatcatcaactacttcaagggcggcaagctgcggttcaagaagatcaaacctgaagccttcgaagccaacagattctacaccgtgatcaacaaaaagagcggcgagatcgtgcccatggaggtgaacttcaacttcgacgaccccaacctgatcatcctgcctctggcctttggcaagagacagggcagagaattcatctggaacgacctgctgtccctggaaaccggcagcctgaagctggccaacggaagagtgatcgagaagacactgtacaacagaagaacccggcaggatgagcctgccctgttcgtggccctgaccttcgagcggcgggaggtcctggactcctccaatatcaaaccaatgaacctgatcggcgtggcaagaggcgaaaacatccccgccgtgatcgccctgaccgaccccgagggctgcccactgagccggtttaaggatagcctgggaaacccaacccacatcctgagaatcggcgagagctataaggagaagcagcggaccatccaggccaagaaggaggtggagcagcggagagccggcggctacagccggaagtacgccagcaaagccaagaatctggcagacgatatggtgagaaacaccgctagagatctgctgtactacgccgtgacccaggatgccatgctgatcttcgccaacctgagccggggcttcggccggcagggcaagcggaccttcatggccgagagacagtacacacggatggaggactggctgaccgccaagctggcctacgagggcctgagcaagacctacctgtccaagacactggcccagtacacctccaagacatgcagcaactgtgggtttaccatcaccagcgccgactacgacagggtgctggagaagctgaagaagacagcaacaggctggatgaccacaattaacggcaaggagctgaaggtggagggccagattacctactacaacagatacaagagacagaacgtagtcaaggacctgtccgtcgagctggatagactgagcgaagaatctgtgaacaacgacatctcctcctggacaaagggcagaagcggagaagctctgagcctcctgaagaaaagattctcccatagacccgtgcaggagaagttcgtgtgcctgaactgcggcttcgagacacacgcagccgagcaagccgccctgaacatcgccagatcctggctgttcctgcggagccaggagtacaagaaataccagacaaacaagacaaccggcaacaccgataagagagccttcgtcgagacctggcagtccttttaccggaagaagcttaaggaggtgtggaaacctgccgtgcggtctggcggatctggcggaggctcctgccctgaggagcgtgatgttcagcgacgtgagcatcgacttcagccccgaggagtgggagtacctggacctggagcagaaggacctgtacagggacgtgatgctggagaactacagcaacctggtgagcctgggctgcttcatcagcaagcccgacgtgatcagcagcctggagcagggcaaggagccctggaaggtggtgaggaagggcaggaggcagtaccccgacctggagaccaagtacggatctggctccggcagcggccccaagaaaaagagaaaagtctaagctgccttctgcggggcttgccttctggccatgcccttcttctctcccttgcacctgtacctcttggtctttgaataaagcctgagtaggaaggctagcaaaaaaaaaaaaaaaaaaaaaaaaaaaaaaaaaaaaaaaaaaaaaaaaaaaaaaaaaaaaaaaaaaaaaaaaaaaaaaaa

SEQ ID NO: 16329 - RNA, 9485 nt, synthetic construct
  source 1..9485: mol_type = other RNA
aggaaataagagagaaaagaagagtaagaagaaatataagagccaccatggcccctaagaagaagcgtaaagtgagccggatggaacgcctcgtctacgaggtgcggcagaagtgcagaaacatcgaggacatctgcatctcctgcggatctctgaacgtgaccctggagcacccactgttcatcggcggcatgtgccagaactgtaaaaactgttttctggagtgtgcctatcaatacgacgatgacggctaccagagctactgcaccatctgttgcggcggaagagaggtgctgatgtgtggaaataacaactgctgccggtgcttctgcgtggaatgcgtggacctgctggtgggccccggcgccgcccaggccgctattaaggaagatccttggaactgctacatgtgcggccacaagggcacatacggcctgctgagacggagagaggactggcctagcagactgcagatgttcttcgccaataaccacgaccaggagttcgacccccctaaggtgtaccctcccgtccccgccgagaagagaaagcccatccgggtcctgagcctgttcgatggcatcgccaccggtctgctggtgctgaaggacctgggcatccaggtggataggtacattgcctccgaggtgtgcgaggactccatcaccgtgggaatggtgcgtcatcagggcaagatcatgtacgtgggcgacgtgcggagcgtgacacagaagcatatccaggagtggggccctttcgacctggtgatcggcggcagcccttgcaatgacctgagcatcgtgaacccagcccggaagggcctgtacgagggaaccggcagactgttcttcgagttttacagactgctgcacgacgcccggcctaaggaaggcgacgaccggcccttcttttggctgttcgagaatgtggtggccatgggagtcagcgacaagcgggatattagccggttcctggagagcaaccccgtgatgatcgatgccaaggaagtgagcgccgcccaccgggccagatacttctggggcaatctgcctggcatgaacagacccctggccagcaccgtgaacgacaagctggagctgcaggagtgcctggagcacggccggatcgccaagttcagcaaggtgagaaccatcaccacccgaagcaacagcatcaaacaaggcaaggaccagcactttcctgtgttcatgaacgagaaggaggacatcctgtggtgtaccgagatggagagagtgttcgggttcccagtccactacacagatgtcagcaacatgtctagactggccagacagagactgctgggaagaagctggtccgtccctgtgatcagacacctgttcgcccctctgaaggagtacttcgcctgcgtgagcagcggcaacagcaacgccaacagccggggccccagcttctctagcggcctggtgccactgtccctgagagggagccacatgggccccatggagatctacaaaaccgtgagcgcctggaagcggcagcctgtgcgcgtgctgagcctgtttcggaatatcgataaagtcctgaaaagcctgggattcctggagagcggctctggctccggcggtggcaccctgaagtacgtggaggatgtgacaaacgtggtcagacgggatgtggagaagtggggccccttcgatctggtgtacggcagcacccaacccctgggcagctcttgtgaccggtgccctggctggtacatgtttcagttccaccggatcctgcagtacgccctgccgagacaggagtcccagcggccattcttttggattttcatggacaacttgctgctgaccgaggatgaccaggaaactaccactcggttcctgcagaccgaagccgtgaccctgcaggacgtgagaggccgggactaccagaacgccatgcgggtgtggtccaacatccctggactgaaaagcaagcacgcacctctgacccctaaagaagaggagtacctgcaggcccaggtgcggagcagaagcaagctggacgcccctaaggtggatctgctggtgaagaattgcctcctgcccctgagagagtacttcaagtatttcagccagaatagtctgcccctgggaggcagcggcggcggcgccctggtgacatttgaggacgtcgccgtgcggttcacccaggaggaatgggctctgctggatccttctcagaaaatcctgtaccgggacgtgatgagagagacataccggaatctgacctccgtgggcatcaactgggaatgttgggaccttgaagcctgcttcagaagcctgggaagaaacctgagagtgcaggtggtgaagagaaagtgcgagctgaccaacagcggcccctgcgccgagggcggcccaagcagcggcgcccctcctcccagcggcggcagcccagccggctccccaacctctaccgaggagggcacctctgagtccgccacccccgagagcggccctggcacctccaccgagcccagcgagggcagcgcacccggcagccctgccggcagccccacctccacagaggagggaaccagcaccgagcccagcgaaggcagcgccccaggcaccagcaccgagcctagtgagcaggagattaaacggatcaacaagatcagaagaagacttgtgaaagacagcaacaccaagaaggccggcaagacaggccccatgaaaaccctgctggttagagtgatgacacccgatctgagagagcggctggaaaacctgagaaagaagcctgaaaatatcccccagcccatcagcaatacatctagagccaacctgaataagctgctgaccgattacaccgaaatgaagaaggcgatcctgcatgtgtactgggaagagttccagaaggaccctgtgggcctgatgagccgggtggcccagcctgccagcaagaagatcgatcagaacaagctgaaacctgagatggacgagaagggcaacctgaccaccgccggctttgcctgctctcagtgtggccagcccctgttcgtgtacaagctggagcaggtgtctgagaagggcaaggcttacaccaactacttcggacggtgcaatgtggccgagcacgaaaagctgatcctgctggcccagctgaagcccgagaaggatagcgacgaagccgtgacatatagcctgggaaagtttgggcagagggccctggatttctacagcattcatgtgaccaaggagtccacccaccccgtgaagcccctggcccagatcgccggaaacagatacgcctccggacctgtgggaaaggccctgagcgacgcatgtatgggcacaatcgcctccttcctgtctaagtaccaggacatcatcatcgaacaccagaaggtggtgaagggcaaccagaagagactggagagcctgcgggagctggccggcaaggaaaacctggaataccctagcgtgaccctgccacctcagcctcacaccaaggagggcgttgatgcctacaacgaagtgatcgcccgggtgcgaatgtgggtgaacctgaacctgtggcagaagctgaagctaagcagagatgatgccaagcctctgctgagactgaagggattcccttcctttcctctggtcgagagacaggccaacgaagtggactggtgggacatggtgtgtaacgtgaagaagctgatcaacgagaaaaaggaggatggcaaggtgttttggcagaatctggctggctacaagagacaggaagccctgagaccatacctgagcagcgaggaagatcggaagaagggaaagaaattcgctcggtaccagctgggcgacctgctgctgcacctggaaaagaagcacggcgaggactggggaaaggtgtacgacgaggcctgggagcggattgacaagaaagtggaaggcctgagcaagcacatcaagctggaagaggaacggagaagcgaggacgcccagagcaaggccgccctgaccgactggctgcgggctaaggccagcttcgtgatcgagggcctgaaggaggccgacaaggacgagttctgcagatgcgagctgaagctgcagaagtggtacggggacctgcggggaaagcccttcgccatcgaagccgagaacagcatcctggacatcagcggcttcagcaagcagtacaactgtgccttcatctggcagaaggacggcgtgaagaagctgaacctgtacctgatcatcaactacttcaagggcggcaagctgcggttcaagaagatcaaacctgaagccttcgaagccaacagattctacaccgtgatcaacaaaaagagcggcgagatcgtgcccatggaggtgaacttcaacttcgacgaccccaacctgatcatcctgcctctggcctttggcaagagacagggcagagaattcatctggaacgacctgctgtccctggaaaccggcagcctgaagctggccaacggaagagtgatcgagaagacactgtacaacagaagaacccggcaggatgagcctgccctgttcgtggccctgaccttcgagcggcgggaggtcctggactcctccaatatcaaaccaatgaacctgatcggcgtggcaagaggcgaaaacatccccgccgtgatcgccctgaccgaccccgagggctgcccactgagccggtttaaggatagcctgggaaacccaacccacatcctgagaatcggcgagagctataaggagaagcagcggaccatccaggccaagaaggaggtggagcagcggagagccggcggctacagccggaagtacgccagcaaagccaagaatctggcagacgatatggtgagaaacaccgctagagatctgctgtactacgccgtgacccaggatgccatgctgatcttcgccaacctgagccggggcttcggccggcagggcaagcggaccttcatggccgagagacagtacacacggatggaggactggctgaccgccaagctggcctacgagggcctgagcaagacctacctgtccaagacactggcccagtacacctccaagacatgcagcaactgtgggtttaccatcaccagcgccgactacgacagggtgctggagaagctgaagaagacagcaacaggctggatgaccacaattaacggcaaggagctgaaggtggagggccagattacctactacaacagatacaagagacagaacgtagtcaaggacctgtccgtcgagctggatagactgagcgaagaatctgtgaacaacgacatctcctcctggacaaagggcagaagcggagaagctctgagcctcctgaagaaaagattctcccatagacccgtgcaggagaagttcgtgtgcctgaactgcggcttcgagacacacgcagccgagcaagccgccctgaacatcgccagatcctggctgttcctgcggagccaggagtacaagaaataccagacaaacaagacaaccggcaacaccgataagagagccttcgtcgagacctggcagtccttttaccggaagaagcttaaggaggtgtggaaacctgccgtgcggtctggcggatctggcggaggctccgtgaccttcgaggaggtggccgtgtacttcagcgaggaggagtgggccctgctggaccccggccagagggccctgtacagggacgtgatgcaggagaactacgagaccgtgatcagcctgggcaaggacttctgccccctgagccccgagcaggtggccctgtgcggcatgctgtgcggcaggagcgagggccacgtgagccagagccccgagcagagggagacctgcaagaggcagcacaagggcggcccaagcagcggcgcccctcctcccagcggcggcagcccagccggctccccaacctctaccgaggagggcacctctgagtccgccacccccgagagcggccctggcacctccaccgagcccagcgagggcagcgcacccggcagccctgccggcagccccacctccacagaggagggaaccagcaccgagcccagcgaaggcagcgccccaggcaccagcaccgagcctagtgagcaggagattaaacggatcaacaagatcagaagaagacttgtgaaagacagcaacaccaagaaggccggcaagacaggccccatgaaaaccctgctggttagagtgatgacacccgatctgagagagcggctggaaaacctgagaaagaagcctgaaaatatcccccagcccatcagcaatacatctagagccaacctgaataagctgctgaccgattacaccgaaatgaagaaggcgatcctgcatgtgtactgggaagagttccagaaggaccctgtgggcctgatgagccgggtggcccagcctgccagcaagaagatcgatcagaacaagctgaaacctgagatggacgagaagggcaacctgaccaccgccggctttgcctgctctcagtgtggccagcccctgttcgtgtacaagctggagcaggtgtctgagaagggcaaggcttacaccaactacttcggacggtgcaatgtggccgagcacgaaaagctgatcctgctggcccagctgaagcccgagaaggatagcgacgaagccgtgacatatagcctgggaaagtttgggcagagggccctggatttctacagcattcatgtgaccaaggagtccacccaccccgtgaagcccctggcccagatcgccggaaacagatacgcctccggacctgtgggaaaggccctgagcgacgcatgtatgggcacaatcgcctccttcctgtctaagtaccaggacatcatcatcgaacaccagaaggtggtgaagggcaaccagaagagactggagagcctgcgggagctggccggcaaggaaaacctggaataccctagcgtgaccctgccacctcagcctcacaccaaggagggcgttgatgcctacaacgaagtgatcgcccgggtgcgaatgtgggtgaacctgaacctgtggcagaagctgaagctaagcagagatgatgccaagcctctgctgagactgaagggattcccttcctttcctctggtcgagagacaggccaacgaagtggactggtgggacatggtgtgtaacgtgaagaagctgatcaacgagaaaaaggaggatggcaaggtgttttggcagaatctggctggctacaagagacaggaagccctgagaccatacctgagcagcgaggaagatcggaagaagggaaagaaattcgctcggtaccagctgggcgacctgctgctgcacctggaaaagaagcacggcgaggactggggaaaggtgtacgacgaggcctgggagcggattgacaagaaagtggaaggcctgagcaagcacatcaagctggaagaggaacggagaagcgaggacgcccagagcaaggccgccctgaccgactggctgcgggctaaggccagcttcgtgatcgagggcctgaaggaggccgacaaggacgagttctgcagatgcgagctgaagctgcagaagtggtacggggacctgcggggaaagcccttcgccatcgaagccgagaacagcatcctggacatcagcggcttcagcaagcagtacaactgtgccttcatctggcagaaggacggcgtgaagaagctgaacctgtacctgatcatcaactacttcaagggcggcaagctgcggttcaagaagatcaaacctgaagccttcgaagccaacagattctacaccgtgatcaacaaaaagagcggcgagatcgtgcccatggaggtgaacttcaacttcgacgaccccaacctgatcatcctgcctctggcctttggcaagagacagggcagagaattcatctggaacgacctgctgtccctggaaaccggcagcctgaagctggccaacggaagagtgatcgagaagacactgtacaacagaagaacccggcaggatgagcctgccctgttcgtggccctgaccttcgagcggcgggaggtcctggactcctccaatatcaaaccaatgaacctgatcggcgtggcaagaggcgaaaacatccccgccgtgatcgccctgaccgaccccgagggctgcccactgagccggtttaaggatagcctgggaaacccaacccacatcctgagaatcggcgagagctataaggagaagcagcggaccatccaggccaagaaggaggtggagcagcggagagccggcggctacagccggaagtacgccagcaaagccaagaatctggcagacgatatggtgagaaacaccgctagagatctgctgtactacgccgtgacccaggatgccatgctgatcttcgccaacctgagccggggcttcggccggcagggcaagcggaccttcatggccgagagacagtacacacggatggaggactggctgaccgccaagctggcctacgagggcctgagcaagacctacctgtccaagacactggcccagtacacctccaagacatgcagcaactgtgggtttaccatcaccagcgccgactacgacagggtgctggagaagctgaagaagacagcaacaggctggatgaccacaattaacggcaaggagctgaaggtggagggccagattacctactacaacagatacaagagacagaacgtagtcaaggacctgtccgtcgagctggatagactgagcgaagaatctgtgaacaacgacatctcctcctggacaaagggcagaagcggagaagctctgagcctcctgaagaaaagattctcccatagacccgtgcaggagaagttcgtgtgcctgaactgcggcttcgagacacacgcagccgagcaagccgccctgaacatcgccagatcctggctgttcctgcggagccaggagtacaagaaataccagacaaacaagacaaccggcaacaccgataagagagccttcgtcgagacctggcagtccttttaccggaagaagcttaaggaggtgtggaaacctgccgtgcggtctggcggatctggcggaggctcctgtgaccttcgaggaggtggccgtgtacttcagcgaggaggagtgggccctgctggaccccggccagagggccctgtacagggacgtgatgcaggagaactacgagaccgtgatcagcctgggcaaggacttctgccccctgagccccgagcaggtggccctgtgcggcatgctgtgcggcaggagcgagggccacgtgagccagagccccgagcagagggagacctgcaagaggcagcacaagggatctggctccggcagcggccccaagaaaaagagaaaagtctaagctgccttctgcggggcttgccttctggccatgcccttcttctctcccttgcacctgtacctcttggtctttgaataaagcctgagtaggaaggctagcaaaaaaaaaaaaaaaaaaaaaaaaaaaaaaaaaaaaaaaaaaaaaaaaaaaaaaaaaaaaaaaaaaaaaaaaaaaaaaaa

SEQ ID NO: 16330 - RNA, 9485 nt, synthetic construct
  source 1..9485: mol_type = other RNA
aggaaataagagagaaaagaagagtaagaagaaatataagagccaccatggcccctaagaagaagcgtaaagtgagccggatggaacgcctcgtctacgaggtgcggcagaagtgcagaaacatcgaggacatctgcatctcctgcggatctctgaacgtgaccctggagcacccactgttcatcggcggcatgtgccagaactgtaaaaactgttttctggagtgtgcctatcaatacgacgatgacggctaccagagctactgcaccatctgttgcggcggaagagaggtgctgatgtgtggaaataacaactgctgccggtgcttctgcgtggaatgcgtggacctgctggtgggccccggcgccgcccaggccgctattaaggaagatccttggaactgctacatgtgcggccacaagggcacatacggcctgctgagacggagagaggactggcctagcagactgcagatgttcttcgccaataaccacgaccaggagttcgacccccctaaggtgtaccctcccgtccccgccgagaagagaaagcccatccgggtcctgagcctgttcgatggcatcgccaccggtctgctggtgctgaaggacctgggcatccaggtggataggtacattgcctccgaggtgtgcgaggactccatcaccgtgggaatggtgcgtcatcagggcaagatcatgtacgtgggcgacgtgcggagcgtgacacagaagcatatccaggagtggggccctttcgacctggtgatcggcggcagcccttgcaatgacctgagcatcgtgaacccagcccggaagggcctgtacgagggaaccggcagactgttcttcgagttttacagactgctgcacgacgcccggcctaaggaaggcgacgaccggcccttcttttggctgttcgagaatgtggtggccatgggagtcagcgacaagcgggatattagccggttcctggagagcaaccccgtgatgatcgatgccaaggaagtgagcgccgcccaccgggccagatacttctggggcaatctgcctggcatgaacagacccctggccagcaccgtgaacgacaagctggagctgcaggagtgcctggagcacggccggatcgccaagttcagcaaggtgagaaccatcaccacccgaagcaacagcatcaaacaaggcaaggaccagcactttcctgtgttcatgaacgagaaggaggacatcctgtggtgtaccgagatggagagagtgttcgggttcccagtccactacacagatgtcagcaacatgtctagactggccagacagagactgctgggaagaagctggtccgtccctgtgatcagacacctgttcgcccctctgaaggagtacttcgcctgcgtgagcagcggcaacagcaacgccaacagccggggccccagcttctctagcggcctggtgccactgtccctgagagggagccacatgggccccatggagatctacaaaaccgtgagcgcctggaagcggcagcctgtgcgcgtgctgagcctgtttcggaatatcgataaagtcctgaaaagcctgggattcctggagagcggctctggctccggcggtggcaccctgaagtacgtggaggatgtgacaaacgtggtcagacgggatgtggagaagtggggccccttcgatctggtgtacggcagcacccaacccctgggcagctcttgtgaccggtgccctggctggtacatgtttcagttccaccggatcctgcagtacgccctgccgagacaggagtcccagcggccattcttttggattttcatggacaacttgctgctgaccgaggatgaccaggaaactaccactcggttcctgcagaccgaagccgtgaccctgcaggacgtgagaggccgggactaccagaacgccatgcgggtgtggtccaacatccctggactgaaaagcaagcacgcacctctgacccctaaagaagaggagtacctgcaggcccaggtgcggagcagaagcaagctggacgcccctaaggtggatctgctggtgaagaattgcctcctgcccctgagagagtacttcaagtatttcagccagaatagtctgcccctgggaggcagcggcggcggcgccctggtgacatttgaggacgtcgccgtgcggttcacccaggaggaatgggctctgctggatccttctcagaaaatcctgtaccgggacgtgatgagagagacataccggaatctgacctccgtgggcatcaactgggaatgttgggaccttgaagcctgcttcagaagcctgggaagaaacctgagagtgcaggtggtgaagagaaagtgcgagctgaccaacagcggcccctgcgccgagggcggcccaagcagcggcgcccctcctcccagcggcggcagcccagccggctccccaacctctaccgaggagggcacctctgagtccgccacccccgagagcggccctggcacctccaccgagcccagcgagggcagcgcacccggcagccctgccggcagccccacctccacagaggagggaaccagcaccgagcccagcgaaggcagcgccccaggcaccagcaccgagcctagtgagcaggagattaaacggatcaacaagatcagaagaagacttgtgaaagacagcaacaccaagaaggccggcaagacaggccccatgaaaaccctgctggttagagtgatgacacccgatctgagagagcggctggaaaacctgagaaagaagcctgaaaatatcccccagcccatcagcaatacatctagagccaacctgaataagctgctgaccgattacaccgaaatgaagaaggcgatcctgcatgtgtactgggaagagttccagaaggaccctgtgggcctgatgagccgggtggcccagcctgccagcaagaagatcgatcagaacaagctgaaacctgagatggacgagaagggcaacctgaccaccgccggctttgcctgctctcagtgtggccagcccctgttcgtgtacaagctggagcaggtgtctgagaagggcaaggcttacaccaactacttcggacggtgcaatgtggccgagcacgaaaagctgatcctgctggcccagctgaagcccgagaaggatagcgacgaagccgtgacatatagcctgggaaagtttgggcagagggccctggatttctacagcattcatgtgaccaaggagtccacccaccccgtgaagcccctggcccagatcgccggaaacagatacgcctccggacctgtgggaaaggccctgagcgacgcatgtatgggcacaatcgcctccttcctgtctaagtaccaggacatcatcatcgaacaccagaaggtggtgaagggcaaccagaagagactggagagcctgcgggagctggccggcaaggaaaacctggaataccctagcgtgaccctgccacctcagcctcacaccaaggagggcgttgatgcctacaacgaagtgatcgcccgggtgcgaatgtgggtgaacctgaacctgtggcagaagctgaagctaagcagagatgatgccaagcctctgctgagactgaagggattcccttcctttcctctggtcgagagacaggccaacgaagtggactggtgggacatggtgtgtaacgtgaagaagctgatcaacgagaaaaaggaggatggcaaggtgttttggcagaatctggctggctacaagagacaggaagccctgagaccatacctgagcagcgaggaagatcggaagaagggaaagaaattcgctcggtaccagctgggcgacctgctgctgcacctggaaaagaagcacggcgaggactggggaaaggtgtacgacgaggcctgggagcggattgacaagaaagtggaaggcctgagcaagcacatcaagctggaagaggaacggagaagcgaggacgcccagagcaaggccgccctgaccgactggctgcgggctaaggccagcttcgtgatcgagggcctgaaggaggccgacaaggacgagttctgcagatgcgagctgaagctgcagaagtggtacggggacctgcggggaaagcccttcgccatcgaagccgagaacagcatcctggacatcagcggcttcagcaagcagtacaactgtgccttcatctggcagaaggacggcgtgaagaagctgaacctgtacctgatcatcaactacttcaagggcggcaagctgcggttcaagaagatcaaacctgaagccttcgaagccaacagattctacaccgtgatcaacaaaaagagcggcgagatcgtgcccatggaggtgaacttcaacttcgacgaccccaacctgatcatcctgcctctggcctttggcaagagacagggcagagaattcatctggaacgacctgctgtccctggaaaccggcagcctgaagctggccaacggaagagtgatcgagaagacactgtacaacagaagaacccggcaggatgagcctgccctgttcgtggccctgaccttcgagcggcgggaggtcctggactcctccaatatcaaaccaatgaacctgatcggcgtggcaagaggcgaaaacatccccgccgtgatcgccctgaccgaccccgagggctgcccactgagccggtttaaggatagcctgggaaacccaacccacatcctgagaatcggcgagagctataaggagaagcagcggaccatccaggccaagaaggaggtggagcagcggagagccggcggctacagccggaagtacgccagcaaagccaagaatctggcagacgatatggtgagaaacaccgctagagatctgctgtactacgccgtgacccaggatgccatgctgatcttcgccaacctgagccggggcttcggccggcagggcaagcggaccttcatggccgagagacagtacacacggatggaggactggctgaccgccaagctggcctacgagggcctgagcaagacctacctgtccaagacactggcccagtacacctccaagacatgcagcaactgtgggtttaccatcaccagcgccgactacgacagggtgctggagaagctgaagaagacagcaacaggctggatgaccacaattaacggcaaggagctgaaggtggagggccagattacctactacaacagatacaagagacagaacgtagtcaaggacctgtccgtcgagctggatagactgagcgaagaatctgtgaacaacgacatctcctcctggacaaagggcagaagcggagaagctctgagcctcctgaagaaaagattctcccatagacccgtgcaggagaagttcgtgtgcctgaactgcggcttcgagacacacgcagccgagcaagccgccctgaacatcgccagatcctggctgttcctgcggagccaggagtacaagaaataccagacaaacaagacaaccggcaacaccgataagagagccttcgtcgagacctggcagtccttttaccggaagaagcttaaggaggtgtggaaacctgccgtgcggtctggcggatctggcggaggctccgtgcaggagagcgtgaccttcaaggacgtggccgtgctgttcacccaggacgagtgggcccagctgagccccgcccagagggccctgtacagggacgtgatgctggagaactacagcaacctggtgagcctgggcctgctgggccccaagcccgacgtgttcagccagctgggcaagggcgaggagtggatgcccgaggacagcctgggcggcttctgcctggactggatgaccacccccgtgggcggcccaagcagcggcgcccctcctcccagcggcggcagcccagccggctccccaacctctaccgaggagggcacctctgagtccgccacccccgagagcggccctggcacctccaccgagcccagcgagggcagcgcacccggcagccctgccggcagccccacctccacagaggagggaaccagcaccgagcccagcgaaggcagcgccccaggcaccagcaccgagcctagtgagcaggagattaaacggatcaacaagatcagaagaagacttgtgaaagacagcaacaccaagaaggccggcaagacaggccccatgaaaaccctgctggttagagtgatgacacccgatctgagagagcggctggaaaacctgagaaagaagcctgaaaatatcccccagcccatcagcaatacatctagagccaacctgaataagctgctgaccgattacaccgaaatgaagaaggcgatcctgcatgtgtactgggaagagttccagaaggaccctgtgggcctgatgagccgggtggcccagcctgccagcaagaagatcgatcagaacaagctgaaacctgagatggacgagaagggcaacctgaccaccgccggctttgcctgctctcagtgtggccagcccctgttcgtgtacaagctggagcaggtgtctgagaagggcaaggcttacaccaactacttcggacggtgcaatgtggccgagcacgaaaagctgatcctgctggcccagctgaagcccgagaaggatagcgacgaagccgtgacatatagcctgggaaagtttgggcagagggccctggatttctacagcattcatgtgaccaaggagtccacccaccccgtgaagcccctggcccagatcgccggaaacagatacgcctccggacctgtgggaaaggccctgagcgacgcatgtatgggcacaatcgcctccttcctgtctaagtaccaggacatcatcatcgaacaccagaaggtggtgaagggcaaccagaagagactggagagcctgcgggagctggccggcaaggaaaacctggaataccctagcgtgaccctgccacctcagcctcacaccaaggagggcgttgatgcctacaacgaagtgatcgcccgggtgcgaatgtgggtgaacctgaacctgtggcagaagctgaagctaagcagagatgatgccaagcctctgctgagactgaagggattcccttcctttcctctggtcgagagacaggccaacgaagtggactggtgggacatggtgtgtaacgtgaagaagctgatcaacgagaaaaaggaggatggcaaggtgttttggcagaatctggctggctacaagagacaggaagccctgagaccatacctgagcagcgaggaagatcggaagaagggaaagaaattcgctcggtaccagctgggcgacctgctgctgcacctggaaaagaagcacggcgaggactggggaaaggtgtacgacgaggcctgggagcggattgacaagaaagtggaaggcctgagcaagcacatcaagctggaagaggaacggagaagcgaggacgcccagagcaaggccgccctgaccgactggctgcgggctaaggccagcttcgtgatcgagggcctgaaggaggccgacaaggacgagttctgcagatgcgagctgaagctgcagaagtggtacggggacctgcggggaaagcccttcgccatcgaagccgagaacagcatcctggacatcagcggcttcagcaagcagtacaactgtgccttcatctggcagaaggacggcgtgaagaagctgaacctgtacctgatcatcaactacttcaagggcggcaagctgcggttcaagaagatcaaacctgaagccttcgaagccaacagattctacaccgtgatcaacaaaaagagcggcgagatcgtgcccatggaggtgaacttcaacttcgacgaccccaacctgatcatcctgcctctggcctttggcaagagacagggcagagaattcatctggaacgacctgctgtccctggaaaccggcagcctgaagctggccaacggaagagtgatcgagaagacactgtacaacagaagaacccggcaggatgagcctgccctgttcgtggccctgaccttcgagcggcgggaggtcctggactcctccaatatcaaaccaatgaacctgatcggcgtggcaagaggcgaaaacatccccgccgtgatcgccctgaccgaccccgagggctgcccactgagccggtttaaggatagcctgggaaacccaacccacatcctgagaatcggcgagagctataaggagaagcagcggaccatccaggccaagaaggaggtggagcagcggagagccggcggctacagccggaagtacgccagcaaagccaagaatctggcagacgatatggtgagaaacaccgctagagatctgctgtactacgccgtgacccaggatgccatgctgatcttcgccaacctgagccggggcttcggccggcagggcaagcggaccttcatggccgagagacagtacacacggatggaggactggctgaccgccaagctggcctacgagggcctgagcaagacctacctgtccaagacactggcccagtacacctccaagacatgcagcaactgtgggtttaccatcaccagcgccgactacgacagggtgctggagaagctgaagaagacagcaacaggctggatgaccacaattaacggcaaggagctgaaggtggagggccagattacctactacaacagatacaagagacagaacgtagtcaaggacctgtccgtcgagctggatagactgagcgaagaatctgtgaacaacgacatctcctcctggacaaagggcagaagcggagaagctctgagcctcctgaagaaaagattctcccatagacccgtgcaggagaagttcgtgtgcctgaactgcggcttcgagacacacgcagccgagcaagccgccctgaacatcgccagatcctggctgttcctgcggagccaggagtacaagaaataccagacaaacaagacaaccggcaacaccgataagagagccttcgtcgagacctggcagtccttttaccggaagaagcttaaggaggtgtggaaacctgccgtgcggtctggcggatctggcggaggctcctgtgcaggagagcgtgaccttcaaggacgtggccgtgctgttcacccaggacgagtgggcccagctgagccccgcccagagggccctgtacagggacgtgatgctggagaactacagcaacctggtgagcctgggcctgctgggccccaagcccgacgtgttcagccagctgggcaagggcgaggagtggatgcccgaggacagcctgggcggcttctgcctggactggatgaccacccccgtgggatctggctccggcagcggccccaagaaaaagagaaaagtctaagctgccttctgcggggcttgccttctggccatgcccttcttctctcccttgcacctgtacctcttggtctttgaataaagcctgagtaggaaggctagcaaaaaaaaaaaaaaaaaaaaaaaaaaaaaaaaaaaaaaaaaaaaaaaaaaaaaaaaaaaaaaaaaaaaaaaaaaaaaaaa

SEQ ID NO: 16331 - RNA, 9485 nt, synthetic construct
  source 1..9485: mol_type = other RNA
aggaaataagagagaaaagaagagtaagaagaaatataagagccaccatggcccctaagaagaagcgtaaagtgagccggatggaacgcctcgtctacgaggtgcggcagaagtgcagaaacatcgaggacatctgcatctcctgcggatctctgaacgtgaccctggagcacccactgttcatcggcggcatgtgccagaactgtaaaaactgttttctggagtgtgcctatcaatacgacgatgacggctaccagagctactgcaccatctgttgcggcggaagagaggtgctgatgtgtggaaataacaactgctgccggtgcttctgcgtggaatgcgtggacctgctggtgggccccggcgccgcccaggccgctattaaggaagatccttggaactgctacatgtgcggccacaagggcacatacggcctgctgagacggagagaggactggcctagcagactgcagatgttcttcgccaataaccacgaccaggagttcgacccccctaaggtgtaccctcccgtccccgccgagaagagaaagcccatccgggtcctgagcctgttcgatggcatcgccaccggtctgctggtgctgaaggacctgggcatccaggtggataggtacattgcctccgaggtgtgcgaggactccatcaccgtgggaatggtgcgtcatcagggcaagatcatgtacgtgggcgacgtgcggagcgtgacacagaagcatatccaggagtggggccctttcgacctggtgatcggcggcagcccttgcaatgacctgagcatcgtgaacccagcccggaagggcctgtacgagggaaccggcagactgttcttcgagttttacagactgctgcacgacgcccggcctaaggaaggcgacgaccggcccttcttttggctgttcgagaatgtggtggccatgggagtcagcgacaagcgggatattagccggttcctggagagcaaccccgtgatgatcgatgccaaggaagtgagcgccgcccaccgggccagatacttctggggcaatctgcctggcatgaacagacccctggccagcaccgtgaacgacaagctggagctgcaggagtgcctggagcacggccggatcgccaagttcagcaaggtgagaaccatcaccacccgaagcaacagcatcaaacaaggcaaggaccagcactttcctgtgttcatgaacgagaaggaggacatcctgtggtgtaccgagatggagagagtgttcgggttcccagtccactacacagatgtcagcaacatgtctagactggccagacagagactgctgggaagaagctggtccgtccctgtgatcagacacctgttcgcccctctgaaggagtacttcgcctgcgtgagcagcggcaacagcaacgccaacagccggggccccagcttctctagcggcctggtgccactgtccctgagagggagccacatgggccccatggagatctacaaaaccgtgagcgcctggaagcggcagcctgtgcgcgtgctgagcctgtttcggaatatcgataaagtcctgaaaagcctgggattcctggagagcggctctggctccggcggtggcaccctgaagtacgtggaggatgtgacaaacgtggtcagacgggatgtggagaagtggggccccttcgatctggtgtacggcagcacccaacccctgggcagctcttgtgaccggtgccctggctggtacatgtttcagttccaccggatcctgcagtacgccctgccgagacaggagtcccagcggccattcttttggattttcatggacaacttgctgctgaccgaggatgaccaggaaactaccactcggttcctgcagaccgaagccgtgaccctgcaggacgtgagaggccgggactaccagaacgccatgcgggtgtggtccaacatccctggactgaaaagcaagcacgcacctctgacccctaaagaagaggagtacctgcaggcccaggtgcggagcagaagcaagctggacgcccctaaggtggatctgctggtgaagaattgcctcctgcccctgagagagtacttcaagtatttcagccagaatagtctgcccctgggaggcagcggcggcggcgccctggtgacatttgaggacgtcgccgtgcggttcacccaggaggaatgggctctgctggatccttctcagaaaatcctgtaccgggacgtgatgagagagacataccggaatctgacctccgtgggcatcaactgggaatgttgggaccttgaagcctgcttcagaagcctgggaagaaacctgagagtgcaggtggtgaagagaaagtgcgagctgaccaacagcggcccctgcgccgagggcggcccaagcagcggcgcccctcctcccagcggcggcagcccagccggctccccaacctctaccgaggagggcacctctgagtccgccacccccgagagcggccctggcacctccaccgagcccagcgagggcagcgcacccggcagccctgccggcagccccacctccacagaggagggaaccagcaccgagcccagcgaaggcagcgccccaggcaccagcaccgagcctagtgagcaggagattaaacggatcaacaagatcagaagaagacttgtgaaagacagcaacaccaagaaggccggcaagacaggccccatgaaaaccctgctggttagagtgatgacacccgatctgagagagcggctggaaaacctgagaaagaagcctgaaaatatcccccagcccatcagcaatacatctagagccaacctgaataagctgctgaccgattacaccgaaatgaagaaggcgatcctgcatgtgtactgggaagagttccagaaggaccctgtgggcctgatgagccgggtggcccagcctgccagcaagaagatcgatcagaacaagctgaaacctgagatggacgagaagggcaacctgaccaccgccggctttgcctgctctcagtgtggccagcccctgttcgtgtacaagctggagcaggtgtctgagaagggcaaggcttacaccaactacttcggacggtgcaatgtggccgagcacgaaaagctgatcctgctggcccagctgaagcccgagaaggatagcgacgaagccgtgacatatagcctgggaaagtttgggcagagggccctggatttctacagcattcatgtgaccaaggagtccacccaccccgtgaagcccctggcccagatcgccggaaacagatacgcctccggacctgtgggaaaggccctgagcgacgcatgtatgggcacaatcgcctccttcctgtctaagtaccaggacatcatcatcgaacaccagaaggtggtgaagggcaaccagaagagactggagagcctgcgggagctggccggcaaggaaaacctggaataccctagcgtgaccctgccacctcagcctcacaccaaggagggcgttgatgcctacaacgaagtgatcgcccgggtgcgaatgtgggtgaacctgaacctgtggcagaagctgaagctaagcagagatgatgccaagcctctgctgagactgaagggattcccttcctttcctctggtcgagagacaggccaacgaagtggactggtgggacatggtgtgtaacgtgaagaagctgatcaacgagaaaaaggaggatggcaaggtgttttggcagaatctggctggctacaagagacaggaagccctgagaccatacctgagcagcgaggaagatcggaagaagggaaagaaattcgctcggtaccagctgggcgacctgctgctgcacctggaaaagaagcacggcgaggactggggaaaggtgtacgacgaggcctgggagcggattgacaagaaagtggaaggcctgagcaagcacatcaagctggaagaggaacggagaagcgaggacgcccagagcaaggccgccctgaccgactggctgcgggctaaggccagcttcgtgatcgagggcctgaaggaggccgacaaggacgagttctgcagatgcgagctgaagctgcagaagtggtacggggacctgcggggaaagcccttcgccatcgaagccgagaacagcatcctggacatcagcggcttcagcaagcagtacaactgtgccttcatctggcagaaggacggcgtgaagaagctgaacctgtacctgatcatcaactacttcaagggcggcaagctgcggttcaagaagatcaaacctgaagccttcgaagccaacagattctacaccgtgatcaacaaaaagagcggcgagatcgtgcccatggaggtgaacttcaacttcgacgaccccaacctgatcatcctgcctctggcctttggcaagagacagggcagagaattcatctggaacgacctgctgtccctggaaaccggcagcctgaagctggccaacggaagagtgatcgagaagacactgtacaacagaagaacccggcaggatgagcctgccctgttcgtggccctgaccttcgagcggcgggaggtcctggactcctccaatatcaaaccaatgaacctgatcggcgtggcaagaggcgaaaacatccccgccgtgatcgccctgaccgaccccgagggctgcccactgagccggtttaaggatagcctgggaaacccaacccacatcctgagaatcggcgagagctataaggagaagcagcggaccatccaggccaagaaggaggtggagcagcggagagccggcggctacagccggaagtacgccagcaaagccaagaatctggcagacgatatggtgagaaacaccgctagagatctgctgtactacgccgtgacccaggatgccatgctgatcttcgccaacctgagccggggcttcggccggcagggcaagcggaccttcatggccgagagacagtacacacggatggaggactggctgaccgccaagctggcctacgagggcctgagcaagacctacctgtccaagacactggcccagtacacctccaagacatgcagcaactgtgggtttaccatcaccagcgccgactacgacagggtgctggagaagctgaagaagacagcaacaggctggatgaccacaattaacggcaaggagctgaaggtggagggccagattacctactacaacagatacaagagacagaacgtagtcaaggacctgtccgtcgagctggatagactgagcgaagaatctgtgaacaacgacatctcctcctggacaaagggcagaagcggagaagctctgagcctcctgaagaaaagattctcccatagacccgtgcaggagaagttcgtgtgcctgaactgcggcttcgagacacacgcagccgagcaagccgccctgaacatcgccagatcctggctgttcctgcggagccaggagtacaagaaataccagacaaacaagacaaccggcaacaccgataagagagccttcgtcgagacctggcagtccttttaccggaagaagcttaaggaggtgtggaaacctgccgtgcggtctggcggatctggcggaggctccttccagggcagcgtgagcttcgaggacgtgaccgtgggcttcagccaggaggagtggcagcacctggaccccagccagagggccctgtacagggacgtgatgctggagaactacagcaacctggtgagcgtgggctactgcgtgcacaagcccgaggtgatcttcaggctggagcagggcgaggagccctggaggctggaggaggagttccccagccagagcttccccgaggtgtggaccgccggcggcccaagcagcggcgcccctcctcccagcggcggcagcccagccggctccccaacctctaccgaggagggcacctctgagtccgccacccccgagagcggccctggcacctccaccgagcccagcgagggcagcgcacccggcagccctgccggcagccccacctccacagaggagggaaccagcaccgagcccagcgaaggcagcgccccaggcaccagcaccgagcctagtgagcaggagattaaacggatcaacaagatcagaagaagacttgtgaaagacagcaacaccaagaaggccggcaagacaggccccatgaaaaccctgctggttagagtgatgacacccgatctgagagagcggctggaaaacctgagaaagaagcctgaaaatatcccccagcccatcagcaatacatctagagccaacctgaataagctgctgaccgattacaccgaaatgaagaaggcgatcctgcatgtgtactgggaagagttccagaaggaccctgtgggcctgatgagccgggtggcccagcctgccagcaagaagatcgatcagaacaagctgaaacctgagatggacgagaagggcaacctgaccaccgccggctttgcctgctctcagtgtggccagcccctgttcgtgtacaagctggagcaggtgtctgagaagggcaaggcttacaccaactacttcggacggtgcaatgtggccgagcacgaaaagctgatcctgctggcccagctgaagcccgagaaggatagcgacgaagccgtgacatatagcctgggaaagtttgggcagagggccctggatttctacagcattcatgtgaccaaggagtccacccaccccgtgaagcccctggcccagatcgccggaaacagatacgcctccggacctgtgggaaaggccctgagcgacgcatgtatgggcacaatcgcctccttcctgtctaagtaccaggacatcatcatcgaacaccagaaggtggtgaagggcaaccagaagagactggagagcctgcgggagctggccggcaaggaaaacctggaataccctagcgtgaccctgccacctcagcctcacaccaaggagggcgttgatgcctacaacgaagtgatcgcccgggtgcgaatgtgggtgaacctgaacctgtggcagaagctgaagctaagcagagatgatgccaagcctctgctgagactgaagggattcccttcctttcctctggtcgagagacaggccaacgaagtggactggtgggacatggtgtgtaacgtgaagaagctgatcaacgagaaaaaggaggatggcaaggtgttttggcagaatctggctggctacaagagacaggaagccctgagaccatacctgagcagcgaggaagatcggaagaagggaaagaaattcgctcggtaccagctgggcgacctgctgctgcacctggaaaagaagcacggcgaggactggggaaaggtgtacgacgaggcctgggagcggattgacaagaaagtggaaggcctgagcaagcacatcaagctggaagaggaacggagaagcgaggacgcccagagcaaggccgccctgaccgactggctgcgggctaaggccagcttcgtgatcgagggcctgaaggaggccgacaaggacgagttctgcagatgcgagctgaagctgcagaagtggtacggggacctgcggggaaagcccttcgccatcgaagccgagaacagcatcctggacatcagcggcttcagcaagcagtacaactgtgccttcatctggcagaaggacggcgtgaagaagctgaacctgtacctgatcatcaactacttcaagggcggcaagctgcggttcaagaagatcaaacctgaagccttcgaagccaacagattctacaccgtgatcaacaaaaagagcggcgagatcgtgcccatggaggtgaacttcaacttcgacgaccccaacctgatcatcctgcctctggcctttggcaagagacagggcagagaattcatctggaacgacctgctgtccctggaaaccggcagcctgaagctggccaacggaagagtgatcgagaagacactgtacaacagaagaacccggcaggatgagcctgccctgttcgtggccctgaccttcgagcggcgggaggtcctggactcctccaatatcaaaccaatgaacctgatcggcgtggcaagaggcgaaaacatccccgccgtgatcgccctgaccgaccccgagggctgcccactgagccggtttaaggatagcctgggaaacccaacccacatcctgagaatcggcgagagctataaggagaagcagcggaccatccaggccaagaaggaggtggagcagcggagagccggcggctacagccggaagtacgccagcaaagccaagaatctggcagacgatatggtgagaaacaccgctagagatctgctgtactacgccgtgacccaggatgccatgctgatcttcgccaacctgagccggggcttcggccggcagggcaagcggaccttcatggccgagagacagtacacacggatggaggactggctgaccgccaagctggcctacgagggcctgagcaagacctacctgtccaagacactggcccagtacacctccaagacatgcagcaactgtgggtttaccatcaccagcgccgactacgacagggtgctggagaagctgaagaagacagcaacaggctggatgaccacaattaacggcaaggagctgaaggtggagggccagattacctactacaacagatacaagagacagaacgtagtcaaggacctgtccgtcgagctggatagactgagcgaagaatctgtgaacaacgacatctcctcctggacaaagggcagaagcggagaagctctgagcctcctgaagaaaagattctcccatagacccgtgcaggagaagttcgtgtgcctgaactgcggcttcgagacacacgcagccgagcaagccgccctgaacatcgccagatcctggctgttcctgcggagccaggagtacaagaaataccagacaaacaagacaaccggcaacaccgataagagagccttcgtcgagacctggcagtccttttaccggaagaagcttaaggaggtgtggaaacctgccgtgcggtctggcggatctggcggaggctcctttccagggcagcgtgagcttcgaggacgtgaccgtgggcttcagccaggaggagtggcagcacctggaccccagccagagggccctgtacagggacgtgatgctggagaactacagcaacctggtgagcgtgggctactgcgtgcacaagcccgaggtgatcttcaggctggagcagggcgaggagccctggaggctggaggaggagttccccagccagagcttccccgaggtgtggaccgccggatctggctccggcagcggccccaagaaaaagagaaaagtctaagctgccttctgcggggcttgccttctggccatgcccttcttctctcccttgcacctgtacctcttggtctttgaataaagcctgagtaggaaggctagcaaaaaaaaaaaaaaaaaaaaaaaaaaaaaaaaaaaaaaaaaaaaaaaaaaaaaaaaaaaaaaaaaaaaaaaaaaaaaaaa

SEQ ID NO: 16332 - RNA, 9485 nt, synthetic construct
  source 1..9485: mol_type = other RNA
aggaaataagagagaaaagaagagtaagaagaaatataagagccaccatggcccctaagaagaagcgtaaagtgagccggatggaacgcctcgtctacgaggtgcggcagaagtgcagaaacatcgaggacatctgcatctcctgcggatctctgaacgtgaccctggagcacccactgttcatcggcggcatgtgccagaactgtaaaaactgttttctggagtgtgcctatcaatacgacgatgacggctaccagagctactgcaccatctgttgcggcggaagagaggtgctgatgtgtggaaataacaactgctgccggtgcttctgcgtggaatgcgtggacctgctggtgggccccggcgccgcccaggccgctattaaggaagatccttggaactgctacatgtgcggccacaagggcacatacggcctgctgagacggagagaggactggcctagcagactgcagatgttcttcgccaataaccacgaccaggagttcgacccccctaaggtgtaccctcccgtccccgccgagaagagaaagcccatccgggtcctgagcctgttcgatggcatcgccaccggtctgctggtgctgaaggacctgggcatccaggtggataggtacattgcctccgaggtgtgcgaggactccatcaccgtgggaatggtgcgtcatcagggcaagatcatgtacgtgggcgacgtgcggagcgtgacacagaagcatatccaggagtggggccctttcgacctggtgatcggcggcagcccttgcaatgacctgagcatcgtgaacccagcccggaagggcctgtacgagggaaccggcagactgttcttcgagttttacagactgctgcacgacgcccggcctaaggaaggcgacgaccggcccttcttttggctgttcgagaatgtggtggccatgggagtcagcgacaagcgggatattagccggttcctggagagcaaccccgtgatgatcgatgccaaggaagtgagcgccgcccaccgggccagatacttctggggcaatctgcctggcatgaacagacccctggccagcaccgtgaacgacaagctggagctgcaggagtgcctggagcacggccggatcgccaagttcagcaaggtgagaaccatcaccacccgaagcaacagcatcaaacaaggcaaggaccagcactttcctgtgttcatgaacgagaaggaggacatcctgtggtgtaccgagatggagagagtgttcgggttcccagtccactacacagatgtcagcaacatgtctagactggccagacagagactgctgggaagaagctggtccgtccctgtgatcagacacctgttcgcccctctgaaggagtacttcgcctgcgtgagcagcggcaacagcaacgccaacagccggggccccagcttctctagcggcctggtgccactgtccctgagagggagccacatgggccccatggagatctacaaaaccgtgagcgcctggaagcggcagcctgtgcgcgtgctgagcctgtttcggaatatcgataaagtcctgaaaagcctgggattcctggagagcggctctggctccggcggtggcaccctgaagtacgtggaggatgtgacaaacgtggtcagacgggatgtggagaagtggggccccttcgatctggtgtacggcagcacccaacccctgggcagctcttgtgaccggtgccctggctggtacatgtttcagttccaccggatcctgcagtacgccctgccgagacaggagtcccagcggccattcttttggattttcatggacaacttgctgctgaccgaggatgaccaggaaactaccactcggttcctgcagaccgaagccgtgaccctgcaggacgtgagaggccgggactaccagaacgccatgcgggtgtggtccaacatccctggactgaaaagcaagcacgcacctctgacccctaaagaagaggagtacctgcaggcccaggtgcggagcagaagcaagctggacgcccctaaggtggatctgctggtgaagaattgcctcctgcccctgagagagtacttcaagtatttcagccagaatagtctgcccctgggaggcagcggcggcggcgccctggtgacatttgaggacgtcgccgtgcggttcacccaggaggaatgggctctgctggatccttctcagaaaatcctgtaccgggacgtgatgagagagacataccggaatctgacctccgtgggcatcaactgggaatgttgggaccttgaagcctgcttcagaagcctgggaagaaacctgagagtgcaggtggtgaagagaaagtgcgagctgaccaacagcggcccctgcgccgagggcggcccaagcagcggcgcccctcctcccagcggcggcagcccagccggctccccaacctctaccgaggagggcacctctgagtccgccacccccgagagcggccctggcacctccaccgagcccagcgagggcagcgcacccggcagccctgccggcagccccacctccacagaggagggaaccagcaccgagcccagcgaaggcagcgccccaggcaccagcaccgagcctagtgagcaggagattaaacggatcaacaagatcagaagaagacttgtgaaagacagcaacaccaagaaggccggcaagacaggccccatgaaaaccctgctggttagagtgatgacacccgatctgagagagcggctggaaaacctgagaaagaagcctgaaaatatcccccagcccatcagcaatacatctagagccaacctgaataagctgctgaccgattacaccgaaatgaagaaggcgatcctgcatgtgtactgggaagagttccagaaggaccctgtgggcctgatgagccgggtggcccagcctgccagcaagaagatcgatcagaacaagctgaaacctgagatggacgagaagggcaacctgaccaccgccggctttgcctgctctcagtgtggccagcccctgttcgtgtacaagctggagcaggtgtctgagaagggcaaggcttacaccaactacttcggacggtgcaatgtggccgagcacgaaaagctgatcctgctggcccagctgaagcccgagaaggatagcgacgaagccgtgacatatagcctgggaaagtttgggcagagggccctggatttctacagcattcatgtgaccaaggagtccacccaccccgtgaagcccctggcccagatcgccggaaacagatacgcctccggacctgtgggaaaggccctgagcgacgcatgtatgggcacaatcgcctccttcctgtctaagtaccaggacatcatcatcgaacaccagaaggtggtgaagggcaaccagaagagactggagagcctgcgggagctggccggcaaggaaaacctggaataccctagcgtgaccctgccacctcagcctcacaccaaggagggcgttgatgcctacaacgaagtgatcgcccgggtgcgaatgtgggtgaacctgaacctgtggcagaagctgaagctaagcagagatgatgccaagcctctgctgagactgaagggattcccttcctttcctctggtcgagagacaggccaacgaagtggactggtgggacatggtgtgtaacgtgaagaagctgatcaacgagaaaaaggaggatggcaaggtgttttggcagaatctggctggctacaagagacaggaagccctgagaccatacctgagcagcgaggaagatcggaagaagggaaagaaattcgctcggtaccagctgggcgacctgctgctgcacctggaaaagaagcacggcgaggactggggaaaggtgtacgacgaggcctgggagcggattgacaagaaagtggaaggcctgagcaagcacatcaagctggaagaggaacggagaagcgaggacgcccagagcaaggccgccctgaccgactggctgcgggctaaggccagcttcgtgatcgagggcctgaaggaggccgacaaggacgagttctgcagatgcgagctgaagctgcagaagtggtacggggacctgcggggaaagcccttcgccatcgaagccgagaacagcatcctggacatcagcggcttcagcaagcagtacaactgtgccttcatctggcagaaggacggcgtgaagaagctgaacctgtacctgatcatcaactacttcaagggcggcaagctgcggttcaagaagatcaaacctgaagccttcgaagccaacagattctacaccgtgatcaacaaaaagagcggcgagatcgtgcccatggaggtgaacttcaacttcgacgaccccaacctgatcatcctgcctctggcctttggcaagagacagggcagagaattcatctggaacgacctgctgtccctggaaaccggcagcctgaagctggccaacggaagagtgatcgagaagacactgtacaacagaagaacccggcaggatgagcctgccctgttcgtggccctgaccttcgagcggcgggaggtcctggactcctccaatatcaaaccaatgaacctgatcggcgtggcaagaggcgaaaacatccccgccgtgatcgccctgaccgaccccgagggctgcccactgagccggtttaaggatagcctgggaaacccaacccacatcctgagaatcggcgagagctataaggagaagcagcggaccatccaggccaagaaggaggtggagcagcggagagccggcggctacagccggaagtacgccagcaaagccaagaatctggcagacgatatggtgagaaacaccgctagagatctgctgtactacgccgtgacccaggatgccatgctgatcttcgccaacctgagccggggcttcggccggcagggcaagcggaccttcatggccgagagacagtacacacggatggaggactggctgaccgccaagctggcctacgagggcctgagcaagacctacctgtccaagacactggcccagtacacctccaagacatgcagcaactgtgggtttaccatcaccagcgccgactacgacagggtgctggagaagctgaagaagacagcaacaggctggatgaccacaattaacggcaaggagctgaaggtggagggccagattacctactacaacagatacaagagacagaacgtagtcaaggacctgtccgtcgagctggatagactgagcgaagaatctgtgaacaacgacatctcctcctggacaaagggcagaagcggagaagctctgagcctcctgaagaaaagattctcccatagacccgtgcaggagaagttcgtgtgcctgaactgcggcttcgagacacacgcagccgagcaagccgccctgaacatcgccagatcctggctgttcctgcggagccaggagtacaagaaataccagacaaacaagacaaccggcaacaccgataagagagccttcgtcgagacctggcagtccttttaccggaagaagcttaaggaggtgtggaaacctgccgtgcggtctggcggatctggcggaggctccgacagcgtggccttcgaggacgtggccatcaacttcacctgcgaggagtgggccctgctgggccccagccagaagagcctgtacagggacgtgatgcaggagaccatcaggaacctggactgcatcggcatgaagtggcagaacctggacatcgaggaggacgagtacaagaaccccggcaggaacctgaggtgcttcatggtggagaggagctgcgagatcaaggacaacagccagtgcggcggcggcccaagcagcggcgcccctcctcccagcggcggcagcccagccggctccccaacctctaccgaggagggcacctctgagtccgccacccccgagagcggccctggcacctccaccgagcccagcgagggcagcgcacccggcagccctgccggcagccccacctccacagaggagggaaccagcaccgagcccagcgaaggcagcgccccaggcaccagcaccgagcctagtgagcaggagattaaacggatcaacaagatcagaagaagacttgtgaaagacagcaacaccaagaaggccggcaagacaggccccatgaaaaccctgctggttagagtgatgacacccgatctgagagagcggctggaaaacctgagaaagaagcctgaaaatatcccccagcccatcagcaatacatctagagccaacctgaataagctgctgaccgattacaccgaaatgaagaaggcgatcctgcatgtgtactgggaagagttccagaaggaccctgtgggcctgatgagccgggtggcccagcctgccagcaagaagatcgatcagaacaagctgaaacctgagatggacgagaagggcaacctgaccaccgccggctttgcctgctctcagtgtggccagcccctgttcgtgtacaagctggagcaggtgtctgagaagggcaaggcttacaccaactacttcggacggtgcaatgtggccgagcacgaaaagctgatcctgctggcccagctgaagcccgagaaggatagcgacgaagccgtgacatatagcctgggaaagtttgggcagagggccctggatttctacagcattcatgtgaccaaggagtccacccaccccgtgaagcccctggcccagatcgccggaaacagatacgcctccggacctgtgggaaaggccctgagcgacgcatgtatgggcacaatcgcctccttcctgtctaagtaccaggacatcatcatcgaacaccagaaggtggtgaagggcaaccagaagagactggagagcctgcgggagctggccggcaaggaaaacctggaataccctagcgtgaccctgccacctcagcctcacaccaaggagggcgttgatgcctacaacgaagtgatcgcccgggtgcgaatgtgggtgaacctgaacctgtggcagaagctgaagctaagcagagatgatgccaagcctctgctgagactgaagggattcccttcctttcctctggtcgagagacaggccaacgaagtggactggtgggacatggtgtgtaacgtgaagaagctgatcaacgagaaaaaggaggatggcaaggtgttttggcagaatctggctggctacaagagacaggaagccctgagaccatacctgagcagcgaggaagatcggaagaagggaaagaaattcgctcggtaccagctgggcgacctgctgctgcacctggaaaagaagcacggcgaggactggggaaaggtgtacgacgaggcctgggagcggattgacaagaaagtggaaggcctgagcaagcacatcaagctggaagaggaacggagaagcgaggacgcccagagcaaggccgccctgaccgactggctgcgggctaaggccagcttcgtgatcgagggcctgaaggaggccgacaaggacgagttctgcagatgcgagctgaagctgcagaagtggtacggggacctgcggggaaagcccttcgccatcgaagccgagaacagcatcctggacatcagcggcttcagcaagcagtacaactgtgccttcatctggcagaaggacggcgtgaagaagctgaacctgtacctgatcatcaactacttcaagggcggcaagctgcggttcaagaagatcaaacctgaagccttcgaagccaacagattctacaccgtgatcaacaaaaagagcggcgagatcgtgcccatggaggtgaacttcaacttcgacgaccccaacctgatcatcctgcctctggcctttggcaagagacagggcagagaattcatctggaacgacctgctgtccctggaaaccggcagcctgaagctggccaacggaagagtgatcgagaagacactgtacaacagaagaacccggcaggatgagcctgccctgttcgtggccctgaccttcgagcggcgggaggtcctggactcctccaatatcaaaccaatgaacctgatcggcgtggcaagaggcgaaaacatccccgccgtgatcgccctgaccgaccccgagggctgcccactgagccggtttaaggatagcctgggaaacccaacccacatcctgagaatcggcgagagctataaggagaagcagcggaccatccaggccaagaaggaggtggagcagcggagagccggcggctacagccggaagtacgccagcaaagccaagaatctggcagacgatatggtgagaaacaccgctagagatctgctgtactacgccgtgacccaggatgccatgctgatcttcgccaacctgagccggggcttcggccggcagggcaagcggaccttcatggccgagagacagtacacacggatggaggactggctgaccgccaagctggcctacgagggcctgagcaagacctacctgtccaagacactggcccagtacacctccaagacatgcagcaactgtgggtttaccatcaccagcgccgactacgacagggtgctggagaagctgaagaagacagcaacaggctggatgaccacaattaacggcaaggagctgaaggtggagggccagattacctactacaacagatacaagagacagaacgtagtcaaggacctgtccgtcgagctggatagactgagcgaagaatctgtgaacaacgacatctcctcctggacaaagggcagaagcggagaagctctgagcctcctgaagaaaagattctcccatagacccgtgcaggagaagttcgtgtgcctgaactgcggcttcgagacacacgcagccgagcaagccgccctgaacatcgccagatcctggctgttcctgcggagccaggagtacaagaaataccagacaaacaagacaaccggcaacaccgataagagagccttcgtcgagacctggcagtccttttaccggaagaagcttaaggaggtgtggaaacctgccgtgcggtctggcggatctggcggaggctcctgacagcgtggccttcgaggacgtggccatcaacttcacctgcgaggagtgggccctgctgggccccagccagaagagcctgtacagggacgtgatgcaggagaccatcaggaacctggactgcatcggcatgaagtggcagaacctggacatcgaggaggacgagtacaagaaccccggcaggaacctgaggtgcttcatggtggagaggagctgcgagatcaaggacaacagccagtgcggcggatctggctccggcagcggccccaagaaaaagagaaaagtctaagctgccttctgcggggcttgccttctggccatgcccttcttctctcccttgcacctgtacctcttggtctttgaataaagcctgagtaggaaggctagcaaaaaaaaaaaaaaaaaaaaaaaaaaaaaaaaaaaaaaaaaaaaaaaaaaaaaaaaaaaaaaaaaaaaaaaaaaaaaaaa

SEQ ID NO: 16333 - RNA, 9485 nt, synthetic construct
  source 1..9485: mol_type = other RNA
aggaaataagagagaaaagaagagtaagaagaaatataagagccaccatggcccctaagaagaagcgtaaagtgagccggatggaacgcctcgtctacgaggtgcggcagaagtgcagaaacatcgaggacatctgcatctcctgcggatctctgaacgtgaccctggagcacccactgttcatcggcggcatgtgccagaactgtaaaaactgttttctggagtgtgcctatcaatacgacgatgacggctaccagagctactgcaccatctgttgcggcggaagagaggtgctgatgtgtggaaataacaactgctgccggtgcttctgcgtggaatgcgtggacctgctggtgggccccggcgccgcccaggccgctattaaggaagatccttggaactgctacatgtgcggccacaagggcacatacggcctgctgagacggagagaggactggcctagcagactgcagatgttcttcgccaataaccacgaccaggagttcgacccccctaaggtgtaccctcccgtccccgccgagaagagaaagcccatccgggtcctgagcctgttcgatggcatcgccaccggtctgctggtgctgaaggacctgggcatccaggtggataggtacattgcctccgaggtgtgcgaggactccatcaccgtgggaatggtgcgtcatcagggcaagatcatgtacgtgggcgacgtgcggagcgtgacacagaagcatatccaggagtggggccctttcgacctggtgatcggcggcagcccttgcaatgacctgagcatcgtgaacccagcccggaagggcctgtacgagggaaccggcagactgttcttcgagttttacagactgctgcacgacgcccggcctaaggaaggcgacgaccggcccttcttttggctgttcgagaatgtggtggccatgggagtcagcgacaagcgggatattagccggttcctggagagcaaccccgtgatgatcgatgccaaggaagtgagcgccgcccaccgggccagatacttctggggcaatctgcctggcatgaacagacccctggccagcaccgtgaacgacaagctggagctgcaggagtgcctggagcacggccggatcgccaagttcagcaaggtgagaaccatcaccacccgaagcaacagcatcaaacaaggcaaggaccagcactttcctgtgttcatgaacgagaaggaggacatcctgtggtgtaccgagatggagagagtgttcgggttcccagtccactacacagatgtcagcaacatgtctagactggccagacagagactgctgggaagaagctggtccgtccctgtgatcagacacctgttcgcccctctgaaggagtacttcgcctgcgtgagcagcggcaacagcaacgccaacagccggggccccagcttctctagcggcctggtgccactgtccctgagagggagccacatgggccccatggagatctacaaaaccgtgagcgcctggaagcggcagcctgtgcgcgtgctgagcctgtttcggaatatcgataaagtcctgaaaagcctgggattcctggagagcggctctggctccggcggtggcaccctgaagtacgtggaggatgtgacaaacgtggtcagacgggatgtggagaagtggggccccttcgatctggtgtacggcagcacccaacccctgggcagctcttgtgaccggtgccctggctggtacatgtttcagttccaccggatcctgcagtacgccctgccgagacaggagtcccagcggccattcttttggattttcatggacaacttgctgctgaccgaggatgaccaggaaactaccactcggttcctgcagaccgaagccgtgaccctgcaggacgtgagaggccgggactaccagaacgccatgcgggtgtggtccaacatccctggactgaaaagcaagcacgcacctctgacccctaaagaagaggagtacctgcaggcccaggtgcggagcagaagcaagctggacgcccctaaggtggatctgctggtgaagaattgcctcctgcccctgagagagtacttcaagtatttcagccagaatagtctgcccctgggaggcagcggcggcggcgccctggtgacatttgaggacgtcgccgtgcggttcacccaggaggaatgggctctgctggatccttctcagaaaatcctgtaccgggacgtgatgagagagacataccggaatctgacctccgtgggcatcaactgggaatgttgggaccttgaagcctgcttcagaagcctgggaagaaacctgagagtgcaggtggtgaagagaaagtgcgagctgaccaacagcggcccctgcgccgagggcggcccaagcagcggcgcccctcctcccagcggcggcagcccagccggctccccaacctctaccgaggagggcacctctgagtccgccacccccgagagcggccctggcacctccaccgagcccagcgagggcagcgcacccggcagccctgccggcagccccacctccacagaggagggaaccagcaccgagcccagcgaaggcagcgccccaggcaccagcaccgagcctagtgagcaggagattaaacggatcaacaagatcagaagaagacttgtgaaagacagcaacaccaagaaggccggcaagacaggccccatgaaaaccctgctggttagagtgatgacacccgatctgagagagcggctggaaaacctgagaaagaagcctgaaaatatcccccagcccatcagcaatacatctagagccaacctgaataagctgctgaccgattacaccgaaatgaagaaggcgatcctgcatgtgtactgggaagagttccagaaggaccctgtgggcctgatgagccgggtggcccagcctgccagcaagaagatcgatcagaacaagctgaaacctgagatggacgagaagggcaacctgaccaccgccggctttgcctgctctcagtgtggccagcccctgttcgtgtacaagctggagcaggtgtctgagaagggcaaggcttacaccaactacttcggacggtgcaatgtggccgagcacgaaaagctgatcctgctggcccagctgaagcccgagaaggatagcgacgaagccgtgacatatagcctgggaaagtttgggcagagggccctggatttctacagcattcatgtgaccaaggagtccacccaccccgtgaagcccctggcccagatcgccggaaacagatacgcctccggacctgtgggaaaggccctgagcgacgcatgtatgggcacaatcgcctccttcctgtctaagtaccaggacatcatcatcgaacaccagaaggtggtgaagggcaaccagaagagactggagagcctgcgggagctggccggcaaggaaaacctggaataccctagcgtgaccctgccacctcagcctcacaccaaggagggcgttgatgcctacaacgaagtgatcgcccgggtgcgaatgtgggtgaacctgaacctgtggcagaagctgaagctaagcagagatgatgccaagcctctgctgagactgaagggattcccttcctttcctctggtcgagagacaggccaacgaagtggactggtgggacatggtgtgtaacgtgaagaagctgatcaacgagaaaaaggaggatggcaaggtgttttggcagaatctggctggctacaagagacaggaagccctgagaccatacctgagcagcgaggaagatcggaagaagggaaagaaattcgctcggtaccagctgggcgacctgctgctgcacctggaaaagaagcacggcgaggactggggaaaggtgtacgacgaggcctgggagcggattgacaagaaagtggaaggcctgagcaagcacatcaagctggaagaggaacggagaagcgaggacgcccagagcaaggccgccctgaccgactggctgcgggctaaggccagcttcgtgatcgagggcctgaaggaggccgacaaggacgagttctgcagatgcgagctgaagctgcagaagtggtacggggacctgcggggaaagcccttcgccatcgaagccgagaacagcatcctggacatcagcggcttcagcaagcagtacaactgtgccttcatctggcagaaggacggcgtgaagaagctgaacctgtacctgatcatcaactacttcaagggcggcaagctgcggttcaagaagatcaaacctgaagccttcgaagccaacagattctacaccgtgatcaacaaaaagagcggcgagatcgtgcccatggaggtgaacttcaacttcgacgaccccaacctgatcatcctgcctctggcctttggcaagagacagggcagagaattcatctggaacgacctgctgtccctggaaaccggcagcctgaagctggccaacggaagagtgatcgagaagacactgtacaacagaagaacccggcaggatgagcctgccctgttcgtggccctgaccttcgagcggcgggaggtcctggactcctccaatatcaaaccaatgaacctgatcggcgtggcaagaggcgaaaacatccccgccgtgatcgccctgaccgaccccgagggctgcccactgagccggtttaaggatagcctgggaaacccaacccacatcctgagaatcggcgagagctataaggagaagcagcggaccatccaggccaagaaggaggtggagcagcggagagccggcggctacagccggaagtacgccagcaaagccaagaatctggcagacgatatggtgagaaacaccgctagagatctgctgtactacgccgtgacccaggatgccatgctgatcttcgccaacctgagccggggcttcggccggcagggcaagcggaccttcatggccgagagacagtacacacggatggaggactggctgaccgccaagctggcctacgagggcctgagcaagacctacctgtccaagacactggcccagtacacctccaagacatgcagcaactgtgggtttaccatcaccagcgccgactacgacagggtgctggagaagctgaagaagacagcaacaggctggatgaccacaattaacggcaaggagctgaaggtggagggccagattacctactacaacagatacaagagacagaacgtagtcaaggacctgtccgtcgagctggatagactgagcgaagaatctgtgaacaacgacatctcctcctggacaaagggcagaagcggagaagctctgagcctcctgaagaaaagattctcccatagacccgtgcaggagaagttcgtgtgcctgaactgcggcttcgagacacacgcagccgagcaagccgccctgaacatcgccagatcctggctgttcctgcggagccaggagtacaagaaataccagacaaacaagacaaccggcaacaccgataagagagccttcgtcgagacctggcagtccttttaccggaagaagcttaaggaggtgtggaaacctgccgtgcggtctggcggatctggcggaggctcccacggcagcagctacgagggcagcgtgagcttcagggacgtggccatcaacttcagcagggaggagtggaggcacctggacctgagccagaggaacctgtactgggacgtgatgctggagacctacagccacctgctgagcgtgggctaccagttccccaagcccgaggtggtgatgctggagcagggcaacgagccctgggccctgcagggcgagaggcccaggcacagctgccccggcgagggcggcccaagcagcggcgcccctcctcccagcggcggcagcccagccggctccccaacctctaccgaggagggcacctctgagtccgccacccccgagagcggccctggcacctccaccgagcccagcgagggcagcgcacccggcagccctgccggcagccccacctccacagaggagggaaccagcaccgagcccagcgaaggcagcgccccaggcaccagcaccgagcctagtgagcaggagattaaacggatcaacaagatcagaagaagacttgtgaaagacagcaacaccaagaaggccggcaagacaggccccatgaaaaccctgctggttagagtgatgacacccgatctgagagagcggctggaaaacctgagaaagaagcctgaaaatatcccccagcccatcagcaatacatctagagccaacctgaataagctgctgaccgattacaccgaaatgaagaaggcgatcctgcatgtgtactgggaagagttccagaaggaccctgtgggcctgatgagccgggtggcccagcctgccagcaagaagatcgatcagaacaagctgaaacctgagatggacgagaagggcaacctgaccaccgccggctttgcctgctctcagtgtggccagcccctgttcgtgtacaagctggagcaggtgtctgagaagggcaaggcttacaccaactacttcggacggtgcaatgtggccgagcacgaaaagctgatcctgctggcccagctgaagcccgagaaggatagcgacgaagccgtgacatatagcctgggaaagtttgggcagagggccctggatttctacagcattcatgtgaccaaggagtccacccaccccgtgaagcccctggcccagatcgccggaaacagatacgcctccggacctgtgggaaaggccctgagcgacgcatgtatgggcacaatcgcctccttcctgtctaagtaccaggacatcatcatcgaacaccagaaggtggtgaagggcaaccagaagagactggagagcctgcgggagctggccggcaaggaaaacctggaataccctagcgtgaccctgccacctcagcctcacaccaaggagggcgttgatgcctacaacgaagtgatcgcccgggtgcgaatgtgggtgaacctgaacctgtggcagaagctgaagctaagcagagatgatgccaagcctctgctgagactgaagggattcccttcctttcctctggtcgagagacaggccaacgaagtggactggtgggacatggtgtgtaacgtgaagaagctgatcaacgagaaaaaggaggatggcaaggtgttttggcagaatctggctggctacaagagacaggaagccctgagaccatacctgagcagcgaggaagatcggaagaagggaaagaaattcgctcggtaccagctgggcgacctgctgctgcacctggaaaagaagcacggcgaggactggggaaaggtgtacgacgaggcctgggagcggattgacaagaaagtggaaggcctgagcaagcacatcaagctggaagaggaacggagaagcgaggacgcccagagcaaggccgccctgaccgactggctgcgggctaaggccagcttcgtgatcgagggcctgaaggaggccgacaaggacgagttctgcagatgcgagctgaagctgcagaagtggtacggggacctgcggggaaagcccttcgccatcgaagccgagaacagcatcctggacatcagcggcttcagcaagcagtacaactgtgccttcatctggcagaaggacggcgtgaagaagctgaacctgtacctgatcatcaactacttcaagggcggcaagctgcggttcaagaagatcaaacctgaagccttcgaagccaacagattctacaccgtgatcaacaaaaagagcggcgagatcgtgcccatggaggtgaacttcaacttcgacgaccccaacctgatcatcctgcctctggcctttggcaagagacagggcagagaattcatctggaacgacctgctgtccctggaaaccggcagcctgaagctggccaacggaagagtgatcgagaagacactgtacaacagaagaacccggcaggatgagcctgccctgttcgtggccctgaccttcgagcggcgggaggtcctggactcctccaatatcaaaccaatgaacctgatcggcgtggcaagaggcgaaaacatccccgccgtgatcgccctgaccgaccccgagggctgcccactgagccggtttaaggatagcctgggaaacccaacccacatcctgagaatcggcgagagctataaggagaagcagcggaccatccaggccaagaaggaggtggagcagcggagagccggcggctacagccggaagtacgccagcaaagccaagaatctggcagacgatatggtgagaaacaccgctagagatctgctgtactacgccgtgacccaggatgccatgctgatcttcgccaacctgagccggggcttcggccggcagggcaagcggaccttcatggccgagagacagtacacacggatggaggactggctgaccgccaagctggcctacgagggcctgagcaagacctacctgtccaagacactggcccagtacacctccaagacatgcagcaactgtgggtttaccatcaccagcgccgactacgacagggtgctggagaagctgaagaagacagcaacaggctggatgaccacaattaacggcaaggagctgaaggtggagggccagattacctactacaacagatacaagagacagaacgtagtcaaggacctgtccgtcgagctggatagactgagcgaagaatctgtgaacaacgacatctcctcctggacaaagggcagaagcggagaagctctgagcctcctgaagaaaagattctcccatagacccgtgcaggagaagttcgtgtgcctgaactgcggcttcgagacacacgcagccgagcaagccgccctgaacatcgccagatcctggctgttcctgcggagccaggagtacaagaaataccagacaaacaagacaaccggcaacaccgataagagagccttcgtcgagacctggcagtccttttaccggaagaagcttaaggaggtgtggaaacctgccgtgcggtctggcggatctggcggaggctcctcacggcagcagctacgagggcagcgtgagcttcagggacgtggccatcaacttcagcagggaggagtggaggcacctggacctgagccagaggaacctgtactgggacgtgatgctggagacctacagccacctgctgagcgtgggctaccagttccccaagcccgaggtggtgatgctggagcagggcaacgagccctgggccctgcagggcgagaggcccaggcacagctgccccggcgagggatctggctccggcagcggccccaagaaaaagagaaaagtctaagctgccttctgcggggcttgccttctggccatgcccttcttctctcccttgcacctgtacctcttggtctttgaataaagcctgagtaggaaggctagcaaaaaaaaaaaaaaaaaaaaaaaaaaaaaaaaaaaaaaaaaaaaaaaaaaaaaaaaaaaaaaaaaaaaaaaaaaaaaaaa

SEQ ID NO: 16334 - RNA, 9485 nt, synthetic construct
  source 1..9485: mol_type = other RNA
aggaaataagagagaaaagaagagtaagaagaaatataagagccaccatggcccctaagaagaagcgtaaagtgagccggatggaacgcctcgtctacgaggtgcggcagaagtgcagaaacatcgaggacatctgcatctcctgcggatctctgaacgtgaccctggagcacccactgttcatcggcggcatgtgccagaactgtaaaaactgttttctggagtgtgcctatcaatacgacgatgacggctaccagagctactgcaccatctgttgcggcggaagagaggtgctgatgtgtggaaataacaactgctgccggtgcttctgcgtggaatgcgtggacctgctggtgggccccggcgccgcccaggccgctattaaggaagatccttggaactgctacatgtgcggccacaagggcacatacggcctgctgagacggagagaggactggcctagcagactgcagatgttcttcgccaataaccacgaccaggagttcgacccccctaaggtgtaccctcccgtccccgccgagaagagaaagcccatccgggtcctgagcctgttcgatggcatcgccaccggtctgctggtgctgaaggacctgggcatccaggtggataggtacattgcctccgaggtgtgcgaggactccatcaccgtgggaatggtgcgtcatcagggcaagatcatgtacgtgggcgacgtgcggagcgtgacacagaagcatatccaggagtggggccctttcgacctggtgatcggcggcagcccttgcaatgacctgagcatcgtgaacccagcccggaagggcctgtacgagggaaccggcagactgttcttcgagttttacagactgctgcacgacgcccggcctaaggaaggcgacgaccggcccttcttttggctgttcgagaatgtggtggccatgggagtcagcgacaagcgggatattagccggttcctggagagcaaccccgtgatgatcgatgccaaggaagtgagcgccgcccaccgggccagatacttctggggcaatctgcctggcatgaacagacccctggccagcaccgtgaacgacaagctggagctgcaggagtgcctggagcacggccggatcgccaagttcagcaaggtgagaaccatcaccacccgaagcaacagcatcaaacaaggcaaggaccagcactttcctgtgttcatgaacgagaaggaggacatcctgtggtgtaccgagatggagagagtgttcgggttcccagtccactacacagatgtcagcaacatgtctagactggccagacagagactgctgggaagaagctggtccgtccctgtgatcagacacctgttcgcccctctgaaggagtacttcgcctgcgtgagcagcggcaacagcaacgccaacagccggggccccagcttctctagcggcctggtgccactgtccctgagagggagccacatgggccccatggagatctacaaaaccgtgagcgcctggaagcggcagcctgtgcgcgtgctgagcctgtttcggaatatcgataaagtcctgaaaagcctgggattcctggagagcggctctggctccggcggtggcaccctgaagtacgtggaggatgtgacaaacgtggtcagacgggatgtggagaagtggggccccttcgatctggtgtacggcagcacccaacccctgggcagctcttgtgaccggtgccctggctggtacatgtttcagttccaccggatcctgcagtacgccctgccgagacaggagtcccagcggccattcttttggattttcatggacaacttgctgctgaccgaggatgaccaggaaactaccactcggttcctgcagaccgaagccgtgaccctgcaggacgtgagaggccgggactaccagaacgccatgcgggtgtggtccaacatccctggactgaaaagcaagcacgcacctctgacccctaaagaagaggagtacctgcaggcccaggtgcggagcagaagcaagctggacgcccctaaggtggatctgctggtgaagaattgcctcctgcccctgagagagtacttcaagtatttcagccagaatagtctgcccctgggaggcagcggcggcggcgccctggtgacatttgaggacgtcgccgtgcggttcacccaggaggaatgggctctgctggatccttctcagaaaatcctgtaccgggacgtgatgagagagacataccggaatctgacctccgtgggcatcaactgggaatgttgggaccttgaagcctgcttcagaagcctgggaagaaacctgagagtgcaggtggtgaagagaaagtgcgagctgaccaacagcggcccctgcgccgagggcggcccaagcagcggcgcccctcctcccagcggcggcagcccagccggctccccaacctctaccgaggagggcacctctgagtccgccacccccgagagcggccctggcacctccaccgagcccagcgagggcagcgcacccggcagccctgccggcagccccacctccacagaggagggaaccagcaccgagcccagcgaaggcagcgccccaggcaccagcaccgagcctagtgagcaggagattaaacggatcaacaagatcagaagaagacttgtgaaagacagcaacaccaagaaggccggcaagacaggccccatgaaaaccctgctggttagagtgatgacacccgatctgagagagcggctggaaaacctgagaaagaagcctgaaaatatcccccagcccatcagcaatacatctagagccaacctgaataagctgctgaccgattacaccgaaatgaagaaggcgatcctgcatgtgtactgggaagagttccagaaggaccctgtgggcctgatgagccgggtggcccagcctgccagcaagaagatcgatcagaacaagctgaaacctgagatggacgagaagggcaacctgaccaccgccggctttgcctgctctcagtgtggccagcccctgttcgtgtacaagctggagcaggtgtctgagaagggcaaggcttacaccaactacttcggacggtgcaatgtggccgagcacgaaaagctgatcctgctggcccagctgaagcccgagaaggatagcgacgaagccgtgacatatagcctgggaaagtttgggcagagggccctggatttctacagcattcatgtgaccaaggagtccacccaccccgtgaagcccctggcccagatcgccggaaacagatacgcctccggacctgtgggaaaggccctgagcgacgcatgtatgggcacaatcgcctccttcctgtctaagtaccaggacatcatcatcgaacaccagaaggtggtgaagggcaaccagaagagactggagagcctgcgggagctggccggcaaggaaaacctggaataccctagcgtgaccctgccacctcagcctcacaccaaggagggcgttgatgcctacaacgaagtgatcgcccgggtgcgaatgtgggtgaacctgaacctgtggcagaagctgaagctaagcagagatgatgccaagcctctgctgagactgaagggattcccttcctttcctctggtcgagagacaggccaacgaagtggactggtgggacatggtgtgtaacgtgaagaagctgatcaacgagaaaaaggaggatggcaaggtgttttggcagaatctggctggctacaagagacaggaagccctgagaccatacctgagcagcgaggaagatcggaagaagggaaagaaattcgctcggtaccagctgggcgacctgctgctgcacctggaaaagaagcacggcgaggactggggaaaggtgtacgacgaggcctgggagcggattgacaagaaagtggaaggcctgagcaagcacatcaagctggaagaggaacggagaagcgaggacgcccagagcaaggccgccctgaccgactggctgcgggctaaggccagcttcgtgatcgagggcctgaaggaggccgacaaggacgagttctgcagatgcgagctgaagctgcagaagtggtacggggacctgcggggaaagcccttcgccatcgaagccgagaacagcatcctggacatcagcggcttcagcaagcagtacaactgtgccttcatctggcagaaggacggcgtgaagaagctgaacctgtacctgatcatcaactacttcaagggcggcaagctgcggttcaagaagatcaaacctgaagccttcgaagccaacagattctacaccgtgatcaacaaaaagagcggcgagatcgtgcccatggaggtgaacttcaacttcgacgaccccaacctgatcatcctgcctctggcctttggcaagagacagggcagagaattcatctggaacgacctgctgtccctggaaaccggcagcctgaagctggccaacggaagagtgatcgagaagacactgtacaacagaagaacccggcaggatgagcctgccctgttcgtggccctgaccttcgagcggcgggaggtcctggactcctccaatatcaaaccaatgaacctgatcggcgtggcaagaggcgaaaacatccccgccgtgatcgccctgaccgaccccgagggctgcccactgagccggtttaaggatagcctgggaaacccaacccacatcctgagaatcggcgagagctataaggagaagcagcggaccatccaggccaagaaggaggtggagcagcggagagccggcggctacagccggaagtacgccagcaaagccaagaatctggcagacgatatggtgagaaacaccgctagagatctgctgtactacgccgtgacccaggatgccatgctgatcttcgccaacctgagccggggcttcggccggcagggcaagcggaccttcatggccgagagacagtacacacggatggaggactggctgaccgccaagctggcctacgagggcctgagcaagacctacctgtccaagacactggcccagtacacctccaagacatgcagcaactgtgggtttaccatcaccagcgccgactacgacagggtgctggagaagctgaagaagacagcaacaggctggatgaccacaattaacggcaaggagctgaaggtggagggccagattacctactacaacagatacaagagacagaacgtagtcaaggacctgtccgtcgagctggatagactgagcgaagaatctgtgaacaacgacatctcctcctggacaaagggcagaagcggagaagctctgagcctcctgaagaaaagattctcccatagacccgtgcaggagaagttcgtgtgcctgaactgcggcttcgagacacacgcagccgagcaagccgccctgaacatcgccagatcctggctgttcctgcggagccaggagtacaagaaataccagacaaacaagacaaccggcaacaccgataagagagccttcgtcgagacctggcagtccttttaccggaagaagcttaaggaggtgtggaaacctgccgtgcggtctggcggatctggcggaggctcccagcccggcgccgtgaggttcgccgacgtggccgtgtacttcagccccgaggagtggggctgcctgaggcccgtgcagagggccctgtacagggacgtgatgagggagacctacagccacctggtggccctgggcgtgggcggcaccaagcccaagctgatcagctgggtggaggaggaggccgagctgtggggccccgaggcccaggacctggagggcgccaagtgcctgaccgaggccaacggcggcccaagcagcggcgcccctcctcccagcggcggcagcccagccggctccccaacctctaccgaggagggcacctctgagtccgccacccccgagagcggccctggcacctccaccgagcccagcgagggcagcgcacccggcagccctgccggcagccccacctccacagaggagggaaccagcaccgagcccagcgaaggcagcgccccaggcaccagcaccgagcctagtgagcaggagattaaacggatcaacaagatcagaagaagacttgtgaaagacagcaacaccaagaaggccggcaagacaggccccatgaaaaccctgctggttagagtgatgacacccgatctgagagagcggctggaaaacctgagaaagaagcctgaaaatatcccccagcccatcagcaatacatctagagccaacctgaataagctgctgaccgattacaccgaaatgaagaaggcgatcctgcatgtgtactgggaagagttccagaaggaccctgtgggcctgatgagccgggtggcccagcctgccagcaagaagatcgatcagaacaagctgaaacctgagatggacgagaagggcaacctgaccaccgccggctttgcctgctctcagtgtggccagcccctgttcgtgtacaagctggagcaggtgtctgagaagggcaaggcttacaccaactacttcggacggtgcaatgtggccgagcacgaaaagctgatcctgctggcccagctgaagcccgagaaggatagcgacgaagccgtgacatatagcctgggaaagtttgggcagagggccctggatttctacagcattcatgtgaccaaggagtccacccaccccgtgaagcccctggcccagatcgccggaaacagatacgcctccggacctgtgggaaaggccctgagcgacgcatgtatgggcacaatcgcctccttcctgtctaagtaccaggacatcatcatcgaacaccagaaggtggtgaagggcaaccagaagagactggagagcctgcgggagctggccggcaaggaaaacctggaataccctagcgtgaccctgccacctcagcctcacaccaaggagggcgttgatgcctacaacgaagtgatcgcccgggtgcgaatgtgggtgaacctgaacctgtggcagaagctgaagctaagcagagatgatgccaagcctctgctgagactgaagggattcccttcctttcctctggtcgagagacaggccaacgaagtggactggtgggacatggtgtgtaacgtgaagaagctgatcaacgagaaaaaggaggatggcaaggtgttttggcagaatctggctggctacaagagacaggaagccctgagaccatacctgagcagcgaggaagatcggaagaagggaaagaaattcgctcggtaccagctgggcgacctgctgctgcacctggaaaagaagcacggcgaggactggggaaaggtgtacgacgaggcctgggagcggattgacaagaaagtggaaggcctgagcaagcacatcaagctggaagaggaacggagaagcgaggacgcccagagcaaggccgccctgaccgactggctgcgggctaaggccagcttcgtgatcgagggcctgaaggaggccgacaaggacgagttctgcagatgcgagctgaagctgcagaagtggtacggggacctgcggggaaagcccttcgccatcgaagccgagaacagcatcctggacatcagcggcttcagcaagcagtacaactgtgccttcatctggcagaaggacggcgtgaagaagctgaacctgtacctgatcatcaactacttcaagggcggcaagctgcggttcaagaagatcaaacctgaagccttcgaagccaacagattctacaccgtgatcaacaaaaagagcggcgagatcgtgcccatggaggtgaacttcaacttcgacgaccccaacctgatcatcctgcctctggcctttggcaagagacagggcagagaattcatctggaacgacctgctgtccctggaaaccggcagcctgaagctggccaacggaagagtgatcgagaagacactgtacaacagaagaacccggcaggatgagcctgccctgttcgtggccctgaccttcgagcggcgggaggtcctggactcctccaatatcaaaccaatgaacctgatcggcgtggcaagaggcgaaaacatccccgccgtgatcgccctgaccgaccccgagggctgcccactgagccggtttaaggatagcctgggaaacccaacccacatcctgagaatcggcgagagctataaggagaagcagcggaccatccaggccaagaaggaggtggagcagcggagagccggcggctacagccggaagtacgccagcaaagccaagaatctggcagacgatatggtgagaaacaccgctagagatctgctgtactacgccgtgacccaggatgccatgctgatcttcgccaacctgagccggggcttcggccggcagggcaagcggaccttcatggccgagagacagtacacacggatggaggactggctgaccgccaagctggcctacgagggcctgagcaagacctacctgtccaagacactggcccagtacacctccaagacatgcagcaactgtgggtttaccatcaccagcgccgactacgacagggtgctggagaagctgaagaagacagcaacaggctggatgaccacaattaacggcaaggagctgaaggtggagggccagattacctactacaacagatacaagagacagaacgtagtcaaggacctgtccgtcgagctggatagactgagcgaagaatctgtgaacaacgacatctcctcctggacaaagggcagaagcggagaagctctgagcctcctgaagaaaagattctcccatagacccgtgcaggagaagttcgtgtgcctgaactgcggcttcgagacacacgcagccgagcaagccgccctgaacatcgccagatcctggctgttcctgcggagccaggagtacaagaaataccagacaaacaagacaaccggcaacaccgataagagagccttcgtcgagacctggcagtccttttaccggaagaagcttaaggaggtgtggaaacctgccgtgcggtctggcggatctggcggaggctcctcagcccggcgccgtgaggttcgccgacgtggccgtgtacttcagccccgaggagtggggctgcctgaggcccgtgcagagggccctgtacagggacgtgatgagggagacctacagccacctggtggccctgggcgtgggcggcaccaagcccaagctgatcagctgggtggaggaggaggccgagctgtggggccccgaggcccaggacctggagggcgccaagtgcctgaccgaggccaacggatctggctccggcagcggccccaagaaaaagagaaaagtctaagctgccttctgcggggcttgccttctggccatgcccttcttctctcccttgcacctgtacctcttggtctttgaataaagcctgagtaggaaggctagcaaaaaaaaaaaaaaaaaaaaaaaaaaaaaaaaaaaaaaaaaaaaaaaaaaaaaaaaaaaaaaaaaaaaaaaaaaaaaaaa

SEQ ID NO: 16335 - RNA, 9485 nt, synthetic construct
  source 1..9485: mol_type = other RNA
aggaaataagagagaaaagaagagtaagaagaaatataagagccaccatggcccctaagaagaagcgtaaagtgagccggatggaacgcctcgtctacgaggtgcggcagaagtgcagaaacatcgaggacatctgcatctcctgcggatctctgaacgtgaccctggagcacccactgttcatcggcggcatgtgccagaactgtaaaaactgttttctggagtgtgcctatcaatacgacgatgacggctaccagagctactgcaccatctgttgcggcggaagagaggtgctgatgtgtggaaataacaactgctgccggtgcttctgcgtggaatgcgtggacctgctggtgggccccggcgccgcccaggccgctattaaggaagatccttggaactgctacatgtgcggccacaagggcacatacggcctgctgagacggagagaggactggcctagcagactgcagatgttcttcgccaataaccacgaccaggagttcgacccccctaaggtgtaccctcccgtccccgccgagaagagaaagcccatccgggtcctgagcctgttcgatggcatcgccaccggtctgctggtgctgaaggacctgggcatccaggtggataggtacattgcctccgaggtgtgcgaggactccatcaccgtgggaatggtgcgtcatcagggcaagatcatgtacgtgggcgacgtgcggagcgtgacacagaagcatatccaggagtggggccctttcgacctggtgatcggcggcagcccttgcaatgacctgagcatcgtgaacccagcccggaagggcctgtacgagggaaccggcagactgttcttcgagttttacagactgctgcacgacgcccggcctaaggaaggcgacgaccggcccttcttttggctgttcgagaatgtggtggccatgggagtcagcgacaagcgggatattagccggttcctggagagcaaccccgtgatgatcgatgccaaggaagtgagcgccgcccaccgggccagatacttctggggcaatctgcctggcatgaacagacccctggccagcaccgtgaacgacaagctggagctgcaggagtgcctggagcacggccggatcgccaagttcagcaaggtgagaaccatcaccacccgaagcaacagcatcaaacaaggcaaggaccagcactttcctgtgttcatgaacgagaaggaggacatcctgtggtgtaccgagatggagagagtgttcgggttcccagtccactacacagatgtcagcaacatgtctagactggccagacagagactgctgggaagaagctggtccgtccctgtgatcagacacctgttcgcccctctgaaggagtacttcgcctgcgtgagcagcggcaacagcaacgccaacagccggggccccagcttctctagcggcctggtgccactgtccctgagagggagccacatgggccccatggagatctacaaaaccgtgagcgcctggaagcggcagcctgtgcgcgtgctgagcctgtttcggaatatcgataaagtcctgaaaagcctgggattcctggagagcggctctggctccggcggtggcaccctgaagtacgtggaggatgtgacaaacgtggtcagacgggatgtggagaagtggggccccttcgatctggtgtacggcagcacccaacccctgggcagctcttgtgaccggtgccctggctggtacatgtttcagttccaccggatcctgcagtacgccctgccgagacaggagtcccagcggccattcttttggattttcatggacaacttgctgctgaccgaggatgaccaggaaactaccactcggttcctgcagaccgaagccgtgaccctgcaggacgtgagaggccgggactaccagaacgccatgcgggtgtggtccaacatccctggactgaaaagcaagcacgcacctctgacccctaaagaagaggagtacctgcaggcccaggtgcggagcagaagcaagctggacgcccctaaggtggatctgctggtgaagaattgcctcctgcccctgagagagtacttcaagtatttcagccagaatagtctgcccctgggaggcagcggcggcggcgccctggtgacatttgaggacgtcgccgtgcggttcacccaggaggaatgggctctgctggatccttctcagaaaatcctgtaccgggacgtgatgagagagacataccggaatctgacctccgtgggcatcaactgggaatgttgggaccttgaagcctgcttcagaagcctgggaagaaacctgagagtgcaggtggtgaagagaaagtgcgagctgaccaacagcggcccctgcgccgagggcggcccaagcagcggcgcccctcctcccagcggcggcagcccagccggctccccaacctctaccgaggagggcacctctgagtccgccacccccgagagcggccctggcacctccaccgagcccagcgagggcagcgcacccggcagccctgccggcagccccacctccacagaggagggaaccagcaccgagcccagcgaaggcagcgccccaggcaccagcaccgagcctagtgagcaggagattaaacggatcaacaagatcagaagaagacttgtgaaagacagcaacaccaagaaggccggcaagacaggccccatgaaaaccctgctggttagagtgatgacacccgatctgagagagcggctggaaaacctgagaaagaagcctgaaaatatcccccagcccatcagcaatacatctagagccaacctgaataagctgctgaccgattacaccgaaatgaagaaggcgatcctgcatgtgtactgggaagagttccagaaggaccctgtgggcctgatgagccgggtggcccagcctgccagcaagaagatcgatcagaacaagctgaaacctgagatggacgagaagggcaacctgaccaccgccggctttgcctgctctcagtgtggccagcccctgttcgtgtacaagctggagcaggtgtctgagaagggcaaggcttacaccaactacttcggacggtgcaatgtggccgagcacgaaaagctgatcctgctggcccagctgaagcccgagaaggatagcgacgaagccgtgacatatagcctgggaaagtttgggcagagggccctggatttctacagcattcatgtgaccaaggagtccacccaccccgtgaagcccctggcccagatcgccggaaacagatacgcctccggacctgtgggaaaggccctgagcgacgcatgtatgggcacaatcgcctccttcctgtctaagtaccaggacatcatcatcgaacaccagaaggtggtgaagggcaaccagaagagactggagagcctgcgggagctggccggcaaggaaaacctggaataccctagcgtgaccctgccacctcagcctcacaccaaggagggcgttgatgcctacaacgaagtgatcgcccgggtgcgaatgtgggtgaacctgaacctgtggcagaagctgaagctaagcagagatgatgccaagcctctgctgagactgaagggattcccttcctttcctctggtcgagagacaggccaacgaagtggactggtgggacatggtgtgtaacgtgaagaagctgatcaacgagaaaaaggaggatggcaaggtgttttggcagaatctggctggctacaagagacaggaagccctgagaccatacctgagcagcgaggaagatcggaagaagggaaagaaattcgctcggtaccagctgggcgacctgctgctgcacctggaaaagaagcacggcgaggactggggaaaggtgtacgacgaggcctgggagcggattgacaagaaagtggaaggcctgagcaagcacatcaagctggaagaggaacggagaagcgaggacgcccagagcaaggccgccctgaccgactggctgcgggctaaggccagcttcgtgatcgagggcctgaaggaggccgacaaggacgagttctgcagatgcgagctgaagctgcagaagtggtacggggacctgcggggaaagcccttcgccatcgaagccgagaacagcatcctggacatcagcggcttcagcaagcagtacaactgtgccttcatctggcagaaggacggcgtgaagaagctgaacctgtacctgatcatcaactacttcaagggcggcaagctgcggttcaagaagatcaaacctgaagccttcgaagccaacagattctacaccgtgatcaacaaaaagagcggcgagatcgtgcccatggaggtgaacttcaacttcgacgaccccaacctgatcatcctgcctctggcctttggcaagagacagggcagagaattcatctggaacgacctgctgtccctggaaaccggcagcctgaagctggccaacggaagagtgatcgagaagacactgtacaacagaagaacccggcaggatgagcctgccctgttcgtggccctgaccttcgagcggcgggaggtcctggactcctccaatatcaaaccaatgaacctgatcggcgtggcaagaggcgaaaacatccccgccgtgatcgccctgaccgaccccgagggctgcccactgagccggtttaaggatagcctgggaaacccaacccacatcctgagaatcggcgagagctataaggagaagcagcggaccatccaggccaagaaggaggtggagcagcggagagccggcggctacagccggaagtacgccagcaaagccaagaatctggcagacgatatggtgagaaacaccgctagagatctgctgtactacgccgtgacccaggatgccatgctgatcttcgccaacctgagccggggcttcggccggcagggcaagcggaccttcatggccgagagacagtacacacggatggaggactggctgaccgccaagctggcctacgagggcctgagcaagacctacctgtccaagacactggcccagtacacctccaagacatgcagcaactgtgggtttaccatcaccagcgccgactacgacagggtgctggagaagctgaagaagacagcaacaggctggatgaccacaattaacggcaaggagctgaaggtggagggccagattacctactacaacagatacaagagacagaacgtagtcaaggacctgtccgtcgagctggatagactgagcgaagaatctgtgaacaacgacatctcctcctggacaaagggcagaagcggagaagctctgagcctcctgaagaaaagattctcccatagacccgtgcaggagaagttcgtgtgcctgaactgcggcttcgagacacacgcagccgagcaagccgccctgaacatcgccagatcctggctgttcctgcggagccaggagtacaagaaataccagacaaacaagacaaccggcaacaccgataagagagccttcgtcgagacctggcagtccttttaccggaagaagcttaaggaggtgtggaaacctgccgtgcggtctggcggatctggcggaggctccttcgaggagctggtgaccttcgaggacgtgttcgtggacttcagccccgaggagctgagcagcctgagcgccgcccagaggaacctgtacagggaggtgatgctggagaactacaggaacctggtgagcctgggctaccagttcagcaagcccgacatcatcagcaggctggaggccgaggagagcagggccatggagaaggacagcaggcacaccgtgatctgccagggcgaggcccacgacggcggcccaagcagcggcgcccctcctcccagcggcggcagcccagccggctccccaacctctaccgaggagggcacctctgagtccgccacccccgagagcggccctggcacctccaccgagcccagcgagggcagcgcacccggcagccctgccggcagccccacctccacagaggagggaaccagcaccgagcccagcgaaggcagcgccccaggcaccagcaccgagcctagtgagcaggagattaaacggatcaacaagatcagaagaagacttgtgaaagacagcaacaccaagaaggccggcaagacaggccccatgaaaaccctgctggttagagtgatgacacccgatctgagagagcggctggaaaacctgagaaagaagcctgaaaatatcccccagcccatcagcaatacatctagagccaacctgaataagctgctgaccgattacaccgaaatgaagaaggcgatcctgcatgtgtactgggaagagttccagaaggaccctgtgggcctgatgagccgggtggcccagcctgccagcaagaagatcgatcagaacaagctgaaacctgagatggacgagaagggcaacctgaccaccgccggctttgcctgctctcagtgtggccagcccctgttcgtgtacaagctggagcaggtgtctgagaagggcaaggcttacaccaactacttcggacggtgcaatgtggccgagcacgaaaagctgatcctgctggcccagctgaagcccgagaaggatagcgacgaagccgtgacatatagcctgggaaagtttgggcagagggccctggatttctacagcattcatgtgaccaaggagtccacccaccccgtgaagcccctggcccagatcgccggaaacagatacgcctccggacctgtgggaaaggccctgagcgacgcatgtatgggcacaatcgcctccttcctgtctaagtaccaggacatcatcatcgaacaccagaaggtggtgaagggcaaccagaagagactggagagcctgcgggagctggccggcaaggaaaacctggaataccctagcgtgaccctgccacctcagcctcacaccaaggagggcgttgatgcctacaacgaagtgatcgcccgggtgcgaatgtgggtgaacctgaacctgtggcagaagctgaagctaagcagagatgatgccaagcctctgctgagactgaagggattcccttcctttcctctggtcgagagacaggccaacgaagtggactggtgggacatggtgtgtaacgtgaagaagctgatcaacgagaaaaaggaggatggcaaggtgttttggcagaatctggctggctacaagagacaggaagccctgagaccatacctgagcagcgaggaagatcggaagaagggaaagaaattcgctcggtaccagctgggcgacctgctgctgcacctggaaaagaagcacggcgaggactggggaaaggtgtacgacgaggcctgggagcggattgacaagaaagtggaaggcctgagcaagcacatcaagctggaagaggaacggagaagcgaggacgcccagagcaaggccgccctgaccgactggctgcgggctaaggccagcttcgtgatcgagggcctgaaggaggccgacaaggacgagttctgcagatgcgagctgaagctgcagaagtggtacggggacctgcggggaaagcccttcgccatcgaagccgagaacagcatcctggacatcagcggcttcagcaagcagtacaactgtgccttcatctggcagaaggacggcgtgaagaagctgaacctgtacctgatcatcaactacttcaagggcggcaagctgcggttcaagaagatcaaacctgaagccttcgaagccaacagattctacaccgtgatcaacaaaaagagcggcgagatcgtgcccatggaggtgaacttcaacttcgacgaccccaacctgatcatcctgcctctggcctttggcaagagacagggcagagaattcatctggaacgacctgctgtccctggaaaccggcagcctgaagctggccaacggaagagtgatcgagaagacactgtacaacagaagaacccggcaggatgagcctgccctgttcgtggccctgaccttcgagcggcgggaggtcctggactcctccaatatcaaaccaatgaacctgatcggcgtggcaagaggcgaaaacatccccgccgtgatcgccctgaccgaccccgagggctgcccactgagccggtttaaggatagcctgggaaacccaacccacatcctgagaatcggcgagagctataaggagaagcagcggaccatccaggccaagaaggaggtggagcagcggagagccggcggctacagccggaagtacgccagcaaagccaagaatctggcagacgatatggtgagaaacaccgctagagatctgctgtactacgccgtgacccaggatgccatgctgatcttcgccaacctgagccggggcttcggccggcagggcaagcggaccttcatggccgagagacagtacacacggatggaggactggctgaccgccaagctggcctacgagggcctgagcaagacctacctgtccaagacactggcccagtacacctccaagacatgcagcaactgtgggtttaccatcaccagcgccgactacgacagggtgctggagaagctgaagaagacagcaacaggctggatgaccacaattaacggcaaggagctgaaggtggagggccagattacctactacaacagatacaagagacagaacgtagtcaaggacctgtccgtcgagctggatagactgagcgaagaatctgtgaacaacgacatctcctcctggacaaagggcagaagcggagaagctctgagcctcctgaagaaaagattctcccatagacccgtgcaggagaagttcgtgtgcctgaactgcggcttcgagacacacgcagccgagcaagccgccctgaacatcgccagatcctggctgttcctgcggagccaggagtacaagaaataccagacaaacaagacaaccggcaacaccgataagagagccttcgtcgagacctggcagtccttttaccggaagaagcttaaggaggtgtggaaacctgccgtgcggtctggcggatctggcggaggctcctttcgaggagctggtgaccttcgaggacgtgttcgtggacttcagccccgaggagctgagcagcctgagcgccgcccagaggaacctgtacagggaggtgatgctggagaactacaggaacctggtgagcctgggctaccagttcagcaagcccgacatcatcagcaggctggaggccgaggagagcagggccatggagaaggacagcaggcacaccgtgatctgccagggcgaggcccacgacggatctggctccggcagcggccccaagaaaaagagaaaagtctaagctgccttctgcggggcttgccttctggccatgcccttcttctctcccttgcacctgtacctcttggtctttgaataaagcctgagtaggaaggctagcaaaaaaaaaaaaaaaaaaaaaaaaaaaaaaaaaaaaaaaaaaaaaaaaaaaaaaaaaaaaaaaaaaaaaaaaaaaaaaaa

SEQ ID NO: 16336 - RNA, 9485 nt, synthetic construct
  source 1..9485: mol_type = other RNA
aggaaataagagagaaaagaagagtaagaagaaatataagagccaccatggcccctaagaagaagcgtaaagtgagccggatggaacgcctcgtctacgaggtgcggcagaagtgcagaaacatcgaggacatctgcatctcctgcggatctctgaacgtgaccctggagcacccactgttcatcggcggcatgtgccagaactgtaaaaactgttttctggagtgtgcctatcaatacgacgatgacggctaccagagctactgcaccatctgttgcggcggaagagaggtgctgatgtgtggaaataacaactgctgccggtgcttctgcgtggaatgcgtggacctgctggtgggccccggcgccgcccaggccgctattaaggaagatccttggaactgctacatgtgcggccacaagggcacatacggcctgctgagacggagagaggactggcctagcagactgcagatgttcttcgccaataaccacgaccaggagttcgacccccctaaggtgtaccctcccgtccccgccgagaagagaaagcccatccgggtcctgagcctgttcgatggcatcgccaccggtctgctggtgctgaaggacctgggcatccaggtggataggtacattgcctccgaggtgtgcgaggactccatcaccgtgggaatggtgcgtcatcagggcaagatcatgtacgtgggcgacgtgcggagcgtgacacagaagcatatccaggagtggggccctttcgacctggtgatcggcggcagcccttgcaatgacctgagcatcgtgaacccagcccggaagggcctgtacgagggaaccggcagactgttcttcgagttttacagactgctgcacgacgcccggcctaaggaaggcgacgaccggcccttcttttggctgttcgagaatgtggtggccatgggagtcagcgacaagcgggatattagccggttcctggagagcaaccccgtgatgatcgatgccaaggaagtgagcgccgcccaccgggccagatacttctggggcaatctgcctggcatgaacagacccctggccagcaccgtgaacgacaagctggagctgcaggagtgcctggagcacggccggatcgccaagttcagcaaggtgagaaccatcaccacccgaagcaacagcatcaaacaaggcaaggaccagcactttcctgtgttcatgaacgagaaggaggacatcctgtggtgtaccgagatggagagagtgttcgggttcccagtccactacacagatgtcagcaacatgtctagactggccagacagagactgctgggaagaagctggtccgtccctgtgatcagacacctgttcgcccctctgaaggagtacttcgcctgcgtgagcagcggcaacagcaacgccaacagccggggccccagcttctctagcggcctggtgccactgtccctgagagggagccacatgggccccatggagatctacaaaaccgtgagcgcctggaagcggcagcctgtgcgcgtgctgagcctgtttcggaatatcgataaagtcctgaaaagcctgggattcctggagagcggctctggctccggcggtggcaccctgaagtacgtggaggatgtgacaaacgtggtcagacgggatgtggagaagtggggccccttcgatctggtgtacggcagcacccaacccctgggcagctcttgtgaccggtgccctggctggtacatgtttcagttccaccggatcctgcagtacgccctgccgagacaggagtcccagcggccattcttttggattttcatggacaacttgctgctgaccgaggatgaccaggaaactaccactcggttcctgcagaccgaagccgtgaccctgcaggacgtgagaggccgggactaccagaacgccatgcgggtgtggtccaacatccctggactgaaaagcaagcacgcacctctgacccctaaagaagaggagtacctgcaggcccaggtgcggagcagaagcaagctggacgcccctaaggtggatctgctggtgaagaattgcctcctgcccctgagagagtacttcaagtatttcagccagaatagtctgcccctgggaggcagcggcggcggcgccctggtgacatttgaggacgtcgccgtgcggttcacccaggaggaatgggctctgctggatccttctcagaaaatcctgtaccgggacgtgatgagagagacataccggaatctgacctccgtgggcatcaactgggaatgttgggaccttgaagcctgcttcagaagcctgggaagaaacctgagagtgcaggtggtgaagagaaagtgcgagctgaccaacagcggcccctgcgccgagggcggcccaagcagcggcgcccctcctcccagcggcggcagcccagccggctccccaacctctaccgaggagggcacctctgagtccgccacccccgagagcggccctggcacctccaccgagcccagcgagggcagcgcacccggcagccctgccggcagccccacctccacagaggagggaaccagcaccgagcccagcgaaggcagcgccccaggcaccagcaccgagcctagtgagcaggagattaaacggatcaacaagatcagaagaagacttgtgaaagacagcaacaccaagaaggccggcaagacaggccccatgaaaaccctgctggttagagtgatgacacccgatctgagagagcggctggaaaacctgagaaagaagcctgaaaatatcccccagcccatcagcaatacatctagagccaacctgaataagctgctgaccgattacaccgaaatgaagaaggcgatcctgcatgtgtactgggaagagttccagaaggaccctgtgggcctgatgagccgggtggcccagcctgccagcaagaagatcgatcagaacaagctgaaacctgagatggacgagaagggcaacctgaccaccgccggctttgcctgctctcagtgtggccagcccctgttcgtgtacaagctggagcaggtgtctgagaagggcaaggcttacaccaactacttcggacggtgcaatgtggccgagcacgaaaagctgatcctgctggcccagctgaagcccgagaaggatagcgacgaagccgtgacatatagcctgggaaagtttgggcagagggccctggatttctacagcattcatgtgaccaaggagtccacccaccccgtgaagcccctggcccagatcgccggaaacagatacgcctccggacctgtgggaaaggccctgagcgacgcatgtatgggcacaatcgcctccttcctgtctaagtaccaggacatcatcatcgaacaccagaaggtggtgaagggcaaccagaagagactggagagcctgcgggagctggccggcaaggaaaacctggaataccctagcgtgaccctgccacctcagcctcacaccaaggagggcgttgatgcctacaacgaagtgatcgcccgggtgcgaatgtgggtgaacctgaacctgtggcagaagctgaagctaagcagagatgatgccaagcctctgctgagactgaagggattcccttcctttcctctggtcgagagacaggccaacgaagtggactggtgggacatggtgtgtaacgtgaagaagctgatcaacgagaaaaaggaggatggcaaggtgttttggcagaatctggctggctacaagagacaggaagccctgagaccatacctgagcagcgaggaagatcggaagaagggaaagaaattcgctcggtaccagctgggcgacctgctgctgcacctggaaaagaagcacggcgaggactggggaaaggtgtacgacgaggcctgggagcggattgacaagaaagtggaaggcctgagcaagcacatcaagctggaagaggaacggagaagcgaggacgcccagagcaaggccgccctgaccgactggctgcgggctaaggccagcttcgtgatcgagggcctgaaggaggccgacaaggacgagttctgcagatgcgagctgaagctgcagaagtggtacggggacctgcggggaaagcccttcgccatcgaagccgagaacagcatcctggacatcagcggcttcagcaagcagtacaactgtgccttcatctggcagaaggacggcgtgaagaagctgaacctgtacctgatcatcaactacttcaagggcggcaagctgcggttcaagaagatcaaacctgaagccttcgaagccaacagattctacaccgtgatcaacaaaaagagcggcgagatcgtgcccatggaggtgaacttcaacttcgacgaccccaacctgatcatcctgcctctggcctttggcaagagacagggcagagaattcatctggaacgacctgctgtccctggaaaccggcagcctgaagctggccaacggaagagtgatcgagaagacactgtacaacagaagaacccggcaggatgagcctgccctgttcgtggccctgaccttcgagcggcgggaggtcctggactcctccaatatcaaaccaatgaacctgatcggcgtggcaagaggcgaaaacatccccgccgtgatcgccctgaccgaccccgagggctgcccactgagccggtttaaggatagcctgggaaacccaacccacatcctgagaatcggcgagagctataaggagaagcagcggaccatccaggccaagaaggaggtggagcagcggagagccggcggctacagccggaagtacgccagcaaagccaagaatctggcagacgatatggtgagaaacaccgctagagatctgctgtactacgccgtgacccaggatgccatgctgatcttcgccaacctgagccggggcttcggccggcagggcaagcggaccttcatggccgagagacagtacacacggatggaggactggctgaccgccaagctggcctacgagggcctgagcaagacctacctgtccaagacactggcccagtacacctccaagacatgcagcaactgtgggtttaccatcaccagcgccgactacgacagggtgctggagaagctgaagaagacagcaacaggctggatgaccacaattaacggcaaggagctgaaggtggagggccagattacctactacaacagatacaagagacagaacgtagtcaaggacctgtccgtcgagctggatagactgagcgaagaatctgtgaacaacgacatctcctcctggacaaagggcagaagcggagaagctctgagcctcctgaagaaaagattctcccatagacccgtgcaggagaagttcgtgtgcctgaactgcggcttcgagacacacgcagccgagcaagccgccctgaacatcgccagatcctggctgttcctgcggagccaggagtacaagaaataccagacaaacaagacaaccggcaacaccgataagagagccttcgtcgagacctggcagtccttttaccggaagaagcttaaggaggtgtggaaacctgccgtgcggtctggcggatctggcggaggctcccagccccaggaggccctgaccttcaaggacgtggaggtgaccttcagccaggacgagtggggctggctggacgccagccagaggaacctgtacagggacgtgatgctggagaactacggcaacatcgccagcctgatgggccccttcaccaagcccgccctgatcagctggctggagaccagggagccctgggtgctgaacgtgcagggcgcccagcccgagggcaaccccggcgccgacgtgggcggcccaagcagcggcgcccctcctcccagcggcggcagcccagccggctccccaacctctaccgaggagggcacctctgagtccgccacccccgagagcggccctggcacctccaccgagcccagcgagggcagcgcacccggcagccctgccggcagccccacctccacagaggagggaaccagcaccgagcccagcgaaggcagcgccccaggcaccagcaccgagcctagtgagcaggagattaaacggatcaacaagatcagaagaagacttgtgaaagacagcaacaccaagaaggccggcaagacaggccccatgaaaaccctgctggttagagtgatgacacccgatctgagagagcggctggaaaacctgagaaagaagcctgaaaatatcccccagcccatcagcaatacatctagagccaacctgaataagctgctgaccgattacaccgaaatgaagaaggcgatcctgcatgtgtactgggaagagttccagaaggaccctgtgggcctgatgagccgggtggcccagcctgccagcaagaagatcgatcagaacaagctgaaacctgagatggacgagaagggcaacctgaccaccgccggctttgcctgctctcagtgtggccagcccctgttcgtgtacaagctggagcaggtgtctgagaagggcaaggcttacaccaactacttcggacggtgcaatgtggccgagcacgaaaagctgatcctgctggcccagctgaagcccgagaaggatagcgacgaagccgtgacatatagcctgggaaagtttgggcagagggccctggatttctacagcattcatgtgaccaaggagtccacccaccccgtgaagcccctggcccagatcgccggaaacagatacgcctccggacctgtgggaaaggccctgagcgacgcatgtatgggcacaatcgcctccttcctgtctaagtaccaggacatcatcatcgaacaccagaaggtggtgaagggcaaccagaagagactggagagcctgcgggagctggccggcaaggaaaacctggaataccctagcgtgaccctgccacctcagcctcacaccaaggagggcgttgatgcctacaacgaagtgatcgcccgggtgcgaatgtgggtgaacctgaacctgtggcagaagctgaagctaagcagagatgatgccaagcctctgctgagactgaagggattcccttcctttcctctggtcgagagacaggccaacgaagtggactggtgggacatggtgtgtaacgtgaagaagctgatcaacgagaaaaaggaggatggcaaggtgttttggcagaatctggctggctacaagagacaggaagccctgagaccatacctgagcagcgaggaagatcggaagaagggaaagaaattcgctcggtaccagctgggcgacctgctgctgcacctggaaaagaagcacggcgaggactggggaaaggtgtacgacgaggcctgggagcggattgacaagaaagtggaaggcctgagcaagcacatcaagctggaagaggaacggagaagcgaggacgcccagagcaaggccgccctgaccgactggctgcgggctaaggccagcttcgtgatcgagggcctgaaggaggccgacaaggacgagttctgcagatgcgagctgaagctgcagaagtggtacggggacctgcggggaaagcccttcgccatcgaagccgagaacagcatcctggacatcagcggcttcagcaagcagtacaactgtgccttcatctggcagaaggacggcgtgaagaagctgaacctgtacctgatcatcaactacttcaagggcggcaagctgcggttcaagaagatcaaacctgaagccttcgaagccaacagattctacaccgtgatcaacaaaaagagcggcgagatcgtgcccatggaggtgaacttcaacttcgacgaccccaacctgatcatcctgcctctggcctttggcaagagacagggcagagaattcatctggaacgacctgctgtccctggaaaccggcagcctgaagctggccaacggaagagtgatcgagaagacactgtacaacagaagaacccggcaggatgagcctgccctgttcgtggccctgaccttcgagcggcgggaggtcctggactcctccaatatcaaaccaatgaacctgatcggcgtggcaagaggcgaaaacatccccgccgtgatcgccctgaccgaccccgagggctgcccactgagccggtttaaggatagcctgggaaacccaacccacatcctgagaatcggcgagagctataaggagaagcagcggaccatccaggccaagaaggaggtggagcagcggagagccggcggctacagccggaagtacgccagcaaagccaagaatctggcagacgatatggtgagaaacaccgctagagatctgctgtactacgccgtgacccaggatgccatgctgatcttcgccaacctgagccggggcttcggccggcagggcaagcggaccttcatggccgagagacagtacacacggatggaggactggctgaccgccaagctggcctacgagggcctgagcaagacctacctgtccaagacactggcccagtacacctccaagacatgcagcaactgtgggtttaccatcaccagcgccgactacgacagggtgctggagaagctgaagaagacagcaacaggctggatgaccacaattaacggcaaggagctgaaggtggagggccagattacctactacaacagatacaagagacagaacgtagtcaaggacctgtccgtcgagctggatagactgagcgaagaatctgtgaacaacgacatctcctcctggacaaagggcagaagcggagaagctctgagcctcctgaagaaaagattctcccatagacccgtgcaggagaagttcgtgtgcctgaactgcggcttcgagacacacgcagccgagcaagccgccctgaacatcgccagatcctggctgttcctgcggagccaggagtacaagaaataccagacaaacaagacaaccggcaacaccgataagagagccttcgtcgagacctggcagtccttttaccggaagaagcttaaggaggtgtggaaacctgccgtgcggtctggcggatctggcggaggctcctcagccccaggaggccctgaccttcaaggacgtggaggtgaccttcagccaggacgagtggggctggctggacgccagccagaggaacctgtacagggacgtgatgctggagaactacggcaacatcgccagcctgatgggccccttcaccaagcccgccctgatcagctggctggagaccagggagccctgggtgctgaacgtgcagggcgcccagcccgagggcaaccccggcgccgacgtgggatctggctccggcagcggccccaagaaaaagagaaaagtctaagctgccttctgcggggcttgccttctggccatgcccttcttctctcccttgcacctgtacctcttggtctttgaataaagcctgagtaggaaggctagcaaaaaaaaaaaaaaaaaaaaaaaaaaaaaaaaaaaaaaaaaaaaaaaaaaaaaaaaaaaaaaaaaaaaaaaaaaaaaaaa

SEQ ID NO: 16337 - RNA, 9485 nt, synthetic construct
  source 1..9485: mol_type = other RNA
aggaaataagagagaaaagaagagtaagaagaaatataagagccaccatggcccctaagaagaagcgtaaagtgagccggatggaacgcctcgtctacgaggtgcggcagaagtgcagaaacatcgaggacatctgcatctcctgcggatctctgaacgtgaccctggagcacccactgttcatcggcggcatgtgccagaactgtaaaaactgttttctggagtgtgcctatcaatacgacgatgacggctaccagagctactgcaccatctgttgcggcggaagagaggtgctgatgtgtggaaataacaactgctgccggtgcttctgcgtggaatgcgtggacctgctggtgggccccggcgccgcccaggccgctattaaggaagatccttggaactgctacatgtgcggccacaagggcacatacggcctgctgagacggagagaggactggcctagcagactgcagatgttcttcgccaataaccacgaccaggagttcgacccccctaaggtgtaccctcccgtccccgccgagaagagaaagcccatccgggtcctgagcctgttcgatggcatcgccaccggtctgctggtgctgaaggacctgggcatccaggtggataggtacattgcctccgaggtgtgcgaggactccatcaccgtgggaatggtgcgtcatcagggcaagatcatgtacgtgggcgacgtgcggagcgtgacacagaagcatatccaggagtggggccctttcgacctggtgatcggcggcagcccttgcaatgacctgagcatcgtgaacccagcccggaagggcctgtacgagggaaccggcagactgttcttcgagttttacagactgctgcacgacgcccggcctaaggaaggcgacgaccggcccttcttttggctgttcgagaatgtggtggccatgggagtcagcgacaagcgggatattagccggttcctggagagcaaccccgtgatgatcgatgccaaggaagtgagcgccgcccaccgggccagatacttctggggcaatctgcctggcatgaacagacccctggccagcaccgtgaacgacaagctggagctgcaggagtgcctggagcacggccggatcgccaagttcagcaaggtgagaaccatcaccacccgaagcaacagcatcaaacaaggcaaggaccagcactttcctgtgttcatgaacgagaaggaggacatcctgtggtgtaccgagatggagagagtgttcgggttcccagtccactacacagatgtcagcaacatgtctagactggccagacagagactgctgggaagaagctggtccgtccctgtgatcagacacctgttcgcccctctgaaggagtacttcgcctgcgtgagcagcggcaacagcaacgccaacagccggggccccagcttctctagcggcctggtgccactgtccctgagagggagccacatgggccccatggagatctacaaaaccgtgagcgcctggaagcggcagcctgtgcgcgtgctgagcctgtttcggaatatcgataaagtcctgaaaagcctgggattcctggagagcggctctggctccggcggtggcaccctgaagtacgtggaggatgtgacaaacgtggtcagacgggatgtggagaagtggggccccttcgatctggtgtacggcagcacccaacccctgggcagctcttgtgaccggtgccctggctggtacatgtttcagttccaccggatcctgcagtacgccctgccgagacaggagtcccagcggccattcttttggattttcatggacaacttgctgctgaccgaggatgaccaggaaactaccactcggttcctgcagaccgaagccgtgaccctgcaggacgtgagaggccgggactaccagaacgccatgcgggtgtggtccaacatccctggactgaaaagcaagcacgcacctctgacccctaaagaagaggagtacctgcaggcccaggtgcggagcagaagcaagctggacgcccctaaggtggatctgctggtgaagaattgcctcctgcccctgagagagtacttcaagtatttcagccagaatagtctgcccctgggaggcagcggcggcggcgccctggtgacatttgaggacgtcgccgtgcggttcacccaggaggaatgggctctgctggatccttctcagaaaatcctgtaccgggacgtgatgagagagacataccggaatctgacctccgtgggcatcaactgggaatgttgggaccttgaagcctgcttcagaagcctgggaagaaacctgagagtgcaggtggtgaagagaaagtgcgagctgaccaacagcggcccctgcgccgagggcggcccaagcagcggcgcccctcctcccagcggcggcagcccagccggctccccaacctctaccgaggagggcacctctgagtccgccacccccgagagcggccctggcacctccaccgagcccagcgagggcagcgcacccggcagccctgccggcagccccacctccacagaggagggaaccagcaccgagcccagcgaaggcagcgccccaggcaccagcaccgagcctagtgagcaggagattaaacggatcaacaagatcagaagaagacttgtgaaagacagcaacaccaagaaggccggcaagacaggccccatgaaaaccctgctggttagagtgatgacacccgatctgagagagcggctggaaaacctgagaaagaagcctgaaaatatcccccagcccatcagcaatacatctagagccaacctgaataagctgctgaccgattacaccgaaatgaagaaggcgatcctgcatgtgtactgggaagagttccagaaggaccctgtgggcctgatgagccgggtggcccagcctgccagcaagaagatcgatcagaacaagctgaaacctgagatggacgagaagggcaacctgaccaccgccggctttgcctgctctcagtgtggccagcccctgttcgtgtacaagctggagcaggtgtctgagaagggcaaggcttacaccaactacttcggacggtgcaatgtggccgagcacgaaaagctgatcctgctggcccagctgaagcccgagaaggatagcgacgaagccgtgacatatagcctgggaaagtttgggcagagggccctggatttctacagcattcatgtgaccaaggagtccacccaccccgtgaagcccctggcccagatcgccggaaacagatacgcctccggacctgtgggaaaggccctgagcgacgcatgtatgggcacaatcgcctccttcctgtctaagtaccaggacatcatcatcgaacaccagaaggtggtgaagggcaaccagaagagactggagagcctgcgggagctggccggcaaggaaaacctggaataccctagcgtgaccctgccacctcagcctcacaccaaggagggcgttgatgcctacaacgaagtgatcgcccgggtgcgaatgtgggtgaacctgaacctgtggcagaagctgaagctaagcagagatgatgccaagcctctgctgagactgaagggattcccttcctttcctctggtcgagagacaggccaacgaagtggactggtgggacatggtgtgtaacgtgaagaagctgatcaacgagaaaaaggaggatggcaaggtgttttggcagaatctggctggctacaagagacaggaagccctgagaccatacctgagcagcgaggaagatcggaagaagggaaagaaattcgctcggtaccagctgggcgacctgctgctgcacctggaaaagaagcacggcgaggactggggaaaggtgtacgacgaggcctgggagcggattgacaagaaagtggaaggcctgagcaagcacatcaagctggaagaggaacggagaagcgaggacgcccagagcaaggccgccctgaccgactggctgcgggctaaggccagcttcgtgatcgagggcctgaaggaggccgacaaggacgagttctgcagatgcgagctgaagctgcagaagtggtacggggacctgcggggaaagcccttcgccatcgaagccgagaacagcatcctggacatcagcggcttcagcaagcagtacaactgtgccttcatctggcagaaggacggcgtgaagaagctgaacctgtacctgatcatcaactacttcaagggcggcaagctgcggttcaagaagatcaaacctgaagccttcgaagccaacagattctacaccgtgatcaacaaaaagagcggcgagatcgtgcccatggaggtgaacttcaacttcgacgaccccaacctgatcatcctgcctctggcctttggcaagagacagggcagagaattcatctggaacgacctgctgtccctggaaaccggcagcctgaagctggccaacggaagagtgatcgagaagacactgtacaacagaagaacccggcaggatgagcctgccctgttcgtggccctgaccttcgagcggcgggaggtcctggactcctccaatatcaaaccaatgaacctgatcggcgtggcaagaggcgaaaacatccccgccgtgatcgccctgaccgaccccgagggctgcccactgagccggtttaaggatagcctgggaaacccaacccacatcctgagaatcggcgagagctataaggagaagcagcggaccatccaggccaagaaggaggtggagcagcggagagccggcggctacagccggaagtacgccagcaaagccaagaatctggcagacgatatggtgagaaacaccgctagagatctgctgtactacgccgtgacccaggatgccatgctgatcttcgccaacctgagccggggcttcggccggcagggcaagcggaccttcatggccgagagacagtacacacggatggaggactggctgaccgccaagctggcctacgagggcctgagcaagacctacctgtccaagacactggcccagtacacctccaagacatgcagcaactgtgggtttaccatcaccagcgccgactacgacagggtgctggagaagctgaagaagacagcaacaggctggatgaccacaattaacggcaaggagctgaaggtggagggccagattacctactacaacagatacaagagacagaacgtagtcaaggacctgtccgtcgagctggatagactgagcgaagaatctgtgaacaacgacatctcctcctggacaaagggcagaagcggagaagctctgagcctcctgaagaaaagattctcccatagacccgtgcaggagaagttcgtgtgcctgaactgcggcttcgagacacacgcagccgagcaagccgccctgaacatcgccagatcctggctgttcctgcggagccaggagtacaagaaataccagacaaacaagacaaccggcaacaccgataagagagccttcgtcgagacctggcagtccttttaccggaagaagcttaaggaggtgtggaaacctgccgtgcggtctggcggatctggcggaggctccccccagaagagcgtgaccttcgaggacgtggccgtgtacttcacccagaccgagtgggacggcctgagccccgcccagagggccctgtacagggacgtgatgctggagaactacggcaacgtggccagcctgggcttccccctgctgaagcccaccgtgatcagccagctggagggcggcggcgagctggagggccccagccccctgaccagcggcaccggcaccggccaccagggcctgtggggcggcccaagcagcggcgcccctcctcccagcggcggcagcccagccggctccccaacctctaccgaggagggcacctctgagtccgccacccccgagagcggccctggcacctccaccgagcccagcgagggcagcgcacccggcagccctgccggcagccccacctccacagaggagggaaccagcaccgagcccagcgaaggcagcgccccaggcaccagcaccgagcctagtgagcaggagattaaacggatcaacaagatcagaagaagacttgtgaaagacagcaacaccaagaaggccggcaagacaggccccatgaaaaccctgctggttagagtgatgacacccgatctgagagagcggctggaaaacctgagaaagaagcctgaaaatatcccccagcccatcagcaatacatctagagccaacctgaataagctgctgaccgattacaccgaaatgaagaaggcgatcctgcatgtgtactgggaagagttccagaaggaccctgtgggcctgatgagccgggtggcccagcctgccagcaagaagatcgatcagaacaagctgaaacctgagatggacgagaagggcaacctgaccaccgccggctttgcctgctctcagtgtggccagcccctgttcgtgtacaagctggagcaggtgtctgagaagggcaaggcttacaccaactacttcggacggtgcaatgtggccgagcacgaaaagctgatcctgctggcccagctgaagcccgagaaggatagcgacgaagccgtgacatatagcctgggaaagtttgggcagagggccctggatttctacagcattcatgtgaccaaggagtccacccaccccgtgaagcccctggcccagatcgccggaaacagatacgcctccggacctgtgggaaaggccctgagcgacgcatgtatgggcacaatcgcctccttcctgtctaagtaccaggacatcatcatcgaacaccagaaggtggtgaagggcaaccagaagagactggagagcctgcgggagctggccggcaaggaaaacctggaataccctagcgtgaccctgccacctcagcctcacaccaaggagggcgttgatgcctacaacgaagtgatcgcccgggtgcgaatgtgggtgaacctgaacctgtggcagaagctgaagctaagcagagatgatgccaagcctctgctgagactgaagggattcccttcctttcctctggtcgagagacaggccaacgaagtggactggtgggacatggtgtgtaacgtgaagaagctgatcaacgagaaaaaggaggatggcaaggtgttttggcagaatctggctggctacaagagacaggaagccctgagaccatacctgagcagcgaggaagatcggaagaagggaaagaaattcgctcggtaccagctgggcgacctgctgctgcacctggaaaagaagcacggcgaggactggggaaaggtgtacgacgaggcctgggagcggattgacaagaaagtggaaggcctgagcaagcacatcaagctggaagaggaacggagaagcgaggacgcccagagcaaggccgccctgaccgactggctgcgggctaaggccagcttcgtgatcgagggcctgaaggaggccgacaaggacgagttctgcagatgcgagctgaagctgcagaagtggtacggggacctgcggggaaagcccttcgccatcgaagccgagaacagcatcctggacatcagcggcttcagcaagcagtacaactgtgccttcatctggcagaaggacggcgtgaagaagctgaacctgtacctgatcatcaactacttcaagggcggcaagctgcggttcaagaagatcaaacctgaagccttcgaagccaacagattctacaccgtgatcaacaaaaagagcggcgagatcgtgcccatggaggtgaacttcaacttcgacgaccccaacctgatcatcctgcctctggcctttggcaagagacagggcagagaattcatctggaacgacctgctgtccctggaaaccggcagcctgaagctggccaacggaagagtgatcgagaagacactgtacaacagaagaacccggcaggatgagcctgccctgttcgtggccctgaccttcgagcggcgggaggtcctggactcctccaatatcaaaccaatgaacctgatcggcgtggcaagaggcgaaaacatccccgccgtgatcgccctgaccgaccccgagggctgcccactgagccggtttaaggatagcctgggaaacccaacccacatcctgagaatcggcgagagctataaggagaagcagcggaccatccaggccaagaaggaggtggagcagcggagagccggcggctacagccggaagtacgccagcaaagccaagaatctggcagacgatatggtgagaaacaccgctagagatctgctgtactacgccgtgacccaggatgccatgctgatcttcgccaacctgagccggggcttcggccggcagggcaagcggaccttcatggccgagagacagtacacacggatggaggactggctgaccgccaagctggcctacgagggcctgagcaagacctacctgtccaagacactggcccagtacacctccaagacatgcagcaactgtgggtttaccatcaccagcgccgactacgacagggtgctggagaagctgaagaagacagcaacaggctggatgaccacaattaacggcaaggagctgaaggtggagggccagattacctactacaacagatacaagagacagaacgtagtcaaggacctgtccgtcgagctggatagactgagcgaagaatctgtgaacaacgacatctcctcctggacaaagggcagaagcggagaagctctgagcctcctgaagaaaagattctcccatagacccgtgcaggagaagttcgtgtgcctgaactgcggcttcgagacacacgcagccgagcaagccgccctgaacatcgccagatcctggctgttcctgcggagccaggagtacaagaaataccagacaaacaagacaaccggcaacaccgataagagagccttcgtcgagacctggcagtccttttaccggaagaagcttaaggaggtgtggaaacctgccgtgcggtctggcggatctggcggaggctcctccccagaagagcgtgaccttcgaggacgtggccgtgtacttcacccagaccgagtgggacggcctgagccccgcccagagggccctgtacagggacgtgatgctggagaactacggcaacgtggccagcctgggcttccccctgctgaagcccaccgtgatcagccagctggagggcggcggcgagctggagggccccagccccctgaccagcggcaccggcaccggccaccagggcctgtggggatctggctccggcagcggccccaagaaaaagagaaaagtctaagctgccttctgcggggcttgccttctggccatgcccttcttctctcccttgcacctgtacctcttggtctttgaataaagcctgagtaggaaggctagcaaaaaaaaaaaaaaaaaaaaaaaaaaaaaaaaaaaaaaaaaaaaaaaaaaaaaaaaaaaaaaaaaaaaaaaaaaaaaaaa

SEQ ID NO: 16338 - RNA, 9485 nt, synthetic construct
  source 1..9485: mol_type = other RNA
aggaaataagagagaaaagaagagtaagaagaaatataagagccaccatggcccctaagaagaagcgtaaagtgagccggatggaacgcctcgtctacgaggtgcggcagaagtgcagaaacatcgaggacatctgcatctcctgcggatctctgaacgtgaccctggagcacccactgttcatcggcggcatgtgccagaactgtaaaaactgttttctggagtgtgcctatcaatacgacgatgacggctaccagagctactgcaccatctgttgcggcggaagagaggtgctgatgtgtggaaataacaactgctgccggtgcttctgcgtggaatgcgtggacctgctggtgggccccggcgccgcccaggccgctattaaggaagatccttggaactgctacatgtgcggccacaagggcacatacggcctgctgagacggagagaggactggcctagcagactgcagatgttcttcgccaataaccacgaccaggagttcgacccccctaaggtgtaccctcccgtccccgccgagaagagaaagcccatccgggtcctgagcctgttcgatggcatcgccaccggtctgctggtgctgaaggacctgggcatccaggtggataggtacattgcctccgaggtgtgcgaggactccatcaccgtgggaatggtgcgtcatcagggcaagatcatgtacgtgggcgacgtgcggagcgtgacacagaagcatatccaggagtggggccctttcgacctggtgatcggcggcagcccttgcaatgacctgagcatcgtgaacccagcccggaagggcctgtacgagggaaccggcagactgttcttcgagttttacagactgctgcacgacgcccggcctaaggaaggcgacgaccggcccttcttttggctgttcgagaatgtggtggccatgggagtcagcgacaagcgggatattagccggttcctggagagcaaccccgtgatgatcgatgccaaggaagtgagcgccgcccaccgggccagatacttctggggcaatctgcctggcatgaacagacccctggccagcaccgtgaacgacaagctggagctgcaggagtgcctggagcacggccggatcgccaagttcagcaaggtgagaaccatcaccacccgaagcaacagcatcaaacaaggcaaggaccagcactttcctgtgttcatgaacgagaaggaggacatcctgtggtgtaccgagatggagagagtgttcgggttcccagtccactacacagatgtcagcaacatgtctagactggccagacagagactgctgggaagaagctggtccgtccctgtgatcagacacctgttcgcccctctgaaggagtacttcgcctgcgtgagcagcggcaacagcaacgccaacagccggggccccagcttctctagcggcctggtgccactgtccctgagagggagccacatgggccccatggagatctacaaaaccgtgagcgcctggaagcggcagcctgtgcgcgtgctgagcctgtttcggaatatcgataaagtcctgaaaagcctgggattcctggagagcggctctggctccggcggtggcaccctgaagtacgtggaggatgtgacaaacgtggtcagacgggatgtggagaagtggggccccttcgatctggtgtacggcagcacccaacccctgggcagctcttgtgaccggtgccctggctggtacatgtttcagttccaccggatcctgcagtacgccctgccgagacaggagtcccagcggccattcttttggattttcatggacaacttgctgctgaccgaggatgaccaggaaactaccactcggttcctgcagaccgaagccgtgaccctgcaggacgtgagaggccgggactaccagaacgccatgcgggtgtggtccaacatccctggactgaaaagcaagcacgcacctctgacccctaaagaagaggagtacctgcaggcccaggtgcggagcagaagcaagctggacgcccctaaggtggatctgctggtgaagaattgcctcctgcccctgagagagtacttcaagtatttcagccagaatagtctgcccctgggaggcagcggcggcggcgccctggtgacatttgaggacgtcgccgtgcggttcacccaggaggaatgggctctgctggatccttctcagaaaatcctgtaccgggacgtgatgagagagacataccggaatctgacctccgtgggcatcaactgggaatgttgggaccttgaagcctgcttcagaagcctgggaagaaacctgagagtgcaggtggtgaagagaaagtgcgagctgaccaacagcggcccctgcgccgagggcggcccaagcagcggcgcccctcctcccagcggcggcagcccagccggctccccaacctctaccgaggagggcacctctgagtccgccacccccgagagcggccctggcacctccaccgagcccagcgagggcagcgcacccggcagccctgccggcagccccacctccacagaggagggaaccagcaccgagcccagcgaaggcagcgccccaggcaccagcaccgagcctagtgagcaggagattaaacggatcaacaagatcagaagaagacttgtgaaagacagcaacaccaagaaggccggcaagacaggccccatgaaaaccctgctggttagagtgatgacacccgatctgagagagcggctggaaaacctgagaaagaagcctgaaaatatcccccagcccatcagcaatacatctagagccaacctgaataagctgctgaccgattacaccgaaatgaagaaggcgatcctgcatgtgtactgggaagagttccagaaggaccctgtgggcctgatgagccgggtggcccagcctgccagcaagaagatcgatcagaacaagctgaaacctgagatggacgagaagggcaacctgaccaccgccggctttgcctgctctcagtgtggccagcccctgttcgtgtacaagctggagcaggtgtctgagaagggcaaggcttacaccaactacttcggacggtgcaatgtggccgagcacgaaaagctgatcctgctggcccagctgaagcccgagaaggatagcgacgaagccgtgacatatagcctgggaaagtttgggcagagggccctggatttctacagcattcatgtgaccaaggagtccacccaccccgtgaagcccctggcccagatcgccggaaacagatacgcctccggacctgtgggaaaggccctgagcgacgcatgtatgggcacaatcgcctccttcctgtctaagtaccaggacatcatcatcgaacaccagaaggtggtgaagggcaaccagaagagactggagagcctgcgggagctggccggcaaggaaaacctggaataccctagcgtgaccctgccacctcagcctcacaccaaggagggcgttgatgcctacaacgaagtgatcgcccgggtgcgaatgtgggtgaacctgaacctgtggcagaagctgaagctaagcagagatgatgccaagcctctgctgagactgaagggattcccttcctttcctctggtcgagagacaggccaacgaagtggactggtgggacatggtgtgtaacgtgaagaagctgatcaacgagaaaaaggaggatggcaaggtgttttggcagaatctggctggctacaagagacaggaagccctgagaccatacctgagcagcgaggaagatcggaagaagggaaagaaattcgctcggtaccagctgggcgacctgctgctgcacctggaaaagaagcacggcgaggactggggaaaggtgtacgacgaggcctgggagcggattgacaagaaagtggaaggcctgagcaagcacatcaagctggaagaggaacggagaagcgaggacgcccagagcaaggccgccctgaccgactggctgcgggctaaggccagcttcgtgatcgagggcctgaaggaggccgacaaggacgagttctgcagatgcgagctgaagctgcagaagtggtacggggacctgcggggaaagcccttcgccatcgaagccgagaacagcatcctggacatcagcggcttcagcaagcagtacaactgtgccttcatctggcagaaggacggcgtgaagaagctgaacctgtacctgatcatcaactacttcaagggcggcaagctgcggttcaagaagatcaaacctgaagccttcgaagccaacagattctacaccgtgatcaacaaaaagagcggcgagatcgtgcccatggaggtgaacttcaacttcgacgaccccaacctgatcatcctgcctctggcctttggcaagagacagggcagagaattcatctggaacgacctgctgtccctggaaaccggcagcctgaagctggccaacggaagagtgatcgagaagacactgtacaacagaagaacccggcaggatgagcctgccctgttcgtggccctgaccttcgagcggcgggaggtcctggactcctccaatatcaaaccaatgaacctgatcggcgtggcaagaggcgaaaacatccccgccgtgatcgccctgaccgaccccgagggctgcccactgagccggtttaaggatagcctgggaaacccaacccacatcctgagaatcggcgagagctataaggagaagcagcggaccatccaggccaagaaggaggtggagcagcggagagccggcggctacagccggaagtacgccagcaaagccaagaatctggcagacgatatggtgagaaacaccgctagagatctgctgtactacgccgtgacccaggatgccatgctgatcttcgccaacctgagccggggcttcggccggcagggcaagcggaccttcatggccgagagacagtacacacggatggaggactggctgaccgccaagctggcctacgagggcctgagcaagacctacctgtccaagacactggcccagtacacctccaagacatgcagcaactgtgggtttaccatcaccagcgccgactacgacagggtgctggagaagctgaagaagacagcaacaggctggatgaccacaattaacggcaaggagctgaaggtggagggccagattacctactacaacagatacaagagacagaacgtagtcaaggacctgtccgtcgagctggatagactgagcgaagaatctgtgaacaacgacatctcctcctggacaaagggcagaagcggagaagctctgagcctcctgaagaaaagattctcccatagacccgtgcaggagaagttcgtgtgcctgaactgcggcttcgagacacacgcagccgagcaagccgccctgaacatcgccagatcctggctgttcctgcggagccaggagtacaagaaataccagacaaacaagacaaccggcaacaccgataagagagccttcgtcgagacctggcagtccttttaccggaagaagcttaaggaggtgtggaaacctgccgtgcggtctggcggatctggcggaggctccagccagatccccctgaccttccaggacgtggccgtggacttcacctgggaggagtggggcctgctggagcccagccagaaggacatgtactgggacgtgatgctggagaactacgagaacttcgtgagcctgggcggcctgcccatctgcctgcccgacgtgatcagcaggatggagaggatcgaggccccctggatggccgagggcggcgtgctggtgagcaccttcctgggcagcctgagcggcggcccaagcagcggcgcccctcctcccagcggcggcagcccagccggctccccaacctctaccgaggagggcacctctgagtccgccacccccgagagcggccctggcacctccaccgagcccagcgagggcagcgcacccggcagccctgccggcagccccacctccacagaggagggaaccagcaccgagcccagcgaaggcagcgccccaggcaccagcaccgagcctagtgagcaggagattaaacggatcaacaagatcagaagaagacttgtgaaagacagcaacaccaagaaggccggcaagacaggccccatgaaaaccctgctggttagagtgatgacacccgatctgagagagcggctggaaaacctgagaaagaagcctgaaaatatcccccagcccatcagcaatacatctagagccaacctgaataagctgctgaccgattacaccgaaatgaagaaggcgatcctgcatgtgtactgggaagagttccagaaggaccctgtgggcctgatgagccgggtggcccagcctgccagcaagaagatcgatcagaacaagctgaaacctgagatggacgagaagggcaacctgaccaccgccggctttgcctgctctcagtgtggccagcccctgttcgtgtacaagctggagcaggtgtctgagaagggcaaggcttacaccaactacttcggacggtgcaatgtggccgagcacgaaaagctgatcctgctggcccagctgaagcccgagaaggatagcgacgaagccgtgacatatagcctgggaaagtttgggcagagggccctggatttctacagcattcatgtgaccaaggagtccacccaccccgtgaagcccctggcccagatcgccggaaacagatacgcctccggacctgtgggaaaggccctgagcgacgcatgtatgggcacaatcgcctccttcctgtctaagtaccaggacatcatcatcgaacaccagaaggtggtgaagggcaaccagaagagactggagagcctgcgggagctggccggcaaggaaaacctggaataccctagcgtgaccctgccacctcagcctcacaccaaggagggcgttgatgcctacaacgaagtgatcgcccgggtgcgaatgtgggtgaacctgaacctgtggcagaagctgaagctaagcagagatgatgccaagcctctgctgagactgaagggattcccttcctttcctctggtcgagagacaggccaacgaagtggactggtgggacatggtgtgtaacgtgaagaagctgatcaacgagaaaaaggaggatggcaaggtgttttggcagaatctggctggctacaagagacaggaagccctgagaccatacctgagcagcgaggaagatcggaagaagggaaagaaattcgctcggtaccagctgggcgacctgctgctgcacctggaaaagaagcacggcgaggactggggaaaggtgtacgacgaggcctgggagcggattgacaagaaagtggaaggcctgagcaagcacatcaagctggaagaggaacggagaagcgaggacgcccagagcaaggccgccctgaccgactggctgcgggctaaggccagcttcgtgatcgagggcctgaaggaggccgacaaggacgagttctgcagatgcgagctgaagctgcagaagtggtacggggacctgcggggaaagcccttcgccatcgaagccgagaacagcatcctggacatcagcggcttcagcaagcagtacaactgtgccttcatctggcagaaggacggcgtgaagaagctgaacctgtacctgatcatcaactacttcaagggcggcaagctgcggttcaagaagatcaaacctgaagccttcgaagccaacagattctacaccgtgatcaacaaaaagagcggcgagatcgtgcccatggaggtgaacttcaacttcgacgaccccaacctgatcatcctgcctctggcctttggcaagagacagggcagagaattcatctggaacgacctgctgtccctggaaaccggcagcctgaagctggccaacggaagagtgatcgagaagacactgtacaacagaagaacccggcaggatgagcctgccctgttcgtggccctgaccttcgagcggcgggaggtcctggactcctccaatatcaaaccaatgaacctgatcggcgtggcaagaggcgaaaacatccccgccgtgatcgccctgaccgaccccgagggctgcccactgagccggtttaaggatagcctgggaaacccaacccacatcctgagaatcggcgagagctataaggagaagcagcggaccatccaggccaagaaggaggtggagcagcggagagccggcggctacagccggaagtacgccagcaaagccaagaatctggcagacgatatggtgagaaacaccgctagagatctgctgtactacgccgtgacccaggatgccatgctgatcttcgccaacctgagccggggcttcggccggcagggcaagcggaccttcatggccgagagacagtacacacggatggaggactggctgaccgccaagctggcctacgagggcctgagcaagacctacctgtccaagacactggcccagtacacctccaagacatgcagcaactgtgggtttaccatcaccagcgccgactacgacagggtgctggagaagctgaagaagacagcaacaggctggatgaccacaattaacggcaaggagctgaaggtggagggccagattacctactacaacagatacaagagacagaacgtagtcaaggacctgtccgtcgagctggatagactgagcgaagaatctgtgaacaacgacatctcctcctggacaaagggcagaagcggagaagctctgagcctcctgaagaaaagattctcccatagacccgtgcaggagaagttcgtgtgcctgaactgcggcttcgagacacacgcagccgagcaagccgccctgaacatcgccagatcctggctgttcctgcggagccaggagtacaagaaataccagacaaacaagacaaccggcaacaccgataagagagccttcgtcgagacctggcagtccttttaccggaagaagcttaaggaggtgtggaaacctgccgtgcggtctggcggatctggcggaggctcctagccagatccccctgaccttccaggacgtggccgtggacttcacctgggaggagtggggcctgctggagcccagccagaaggacatgtactgggacgtgatgctggagaactacgagaacttcgtgagcctgggcggcctgcccatctgcctgcccgacgtgatcagcaggatggagaggatcgaggccccctggatggccgagggcggcgtgctggtgagcaccttcctgggcagcctgagcggatctggctccggcagcggccccaagaaaaagagaaaagtctaagctgccttctgcggggcttgccttctggccatgcccttcttctctcccttgcacctgtacctcttggtctttgaataaagcctgagtaggaaggctagcaaaaaaaaaaaaaaaaaaaaaaaaaaaaaaaaaaaaaaaaaaaaaaaaaaaaaaaaaaaaaaaaaaaaaaaaaaaaaaaa

SEQ ID NO: 16339 - RNA, 9485 nt, synthetic construct
  source 1..9485: mol_type = other RNA
aggaaataagagagaaaagaagagtaagaagaaatataagagccaccatggcccctaagaagaagcgtaaagtgagccggatggaacgcctcgtctacgaggtgcggcagaagtgcagaaacatcgaggacatctgcatctcctgcggatctctgaacgtgaccctggagcacccactgttcatcggcggcatgtgccagaactgtaaaaactgttttctggagtgtgcctatcaatacgacgatgacggctaccagagctactgcaccatctgttgcggcggaagagaggtgctgatgtgtggaaataacaactgctgccggtgcttctgcgtggaatgcgtggacctgctggtgggccccggcgccgcccaggccgctattaaggaagatccttggaactgctacatgtgcggccacaagggcacatacggcctgctgagacggagagaggactggcctagcagactgcagatgttcttcgccaataaccacgaccaggagttcgacccccctaaggtgtaccctcccgtccccgccgagaagagaaagcccatccgggtcctgagcctgttcgatggcatcgccaccggtctgctggtgctgaaggacctgggcatccaggtggataggtacattgcctccgaggtgtgcgaggactccatcaccgtgggaatggtgcgtcatcagggcaagatcatgtacgtgggcgacgtgcggagcgtgacacagaagcatatccaggagtggggccctttcgacctggtgatcggcggcagcccttgcaatgacctgagcatcgtgaacccagcccggaagggcctgtacgagggaaccggcagactgttcttcgagttttacagactgctgcacgacgcccggcctaaggaaggcgacgaccggcccttcttttggctgttcgagaatgtggtggccatgggagtcagcgacaagcgggatattagccggttcctggagagcaaccccgtgatgatcgatgccaaggaagtgagcgccgcccaccgggccagatacttctggggcaatctgcctggcatgaacagacccctggccagcaccgtgaacgacaagctggagctgcaggagtgcctggagcacggccggatcgccaagttcagcaaggtgagaaccatcaccacccgaagcaacagcatcaaacaaggcaaggaccagcactttcctgtgttcatgaacgagaaggaggacatcctgtggtgtaccgagatggagagagtgttcgggttcccagtccactacacagatgtcagcaacatgtctagactggccagacagagactgctgggaagaagctggtccgtccctgtgatcagacacctgttcgcccctctgaaggagtacttcgcctgcgtgagcagcggcaacagcaacgccaacagccggggccccagcttctctagcggcctggtgccactgtccctgagagggagccacatgggccccatggagatctacaaaaccgtgagcgcctggaagcggcagcctgtgcgcgtgctgagcctgtttcggaatatcgataaagtcctgaaaagcctgggattcctggagagcggctctggctccggcggtggcaccctgaagtacgtggaggatgtgacaaacgtggtcagacgggatgtggagaagtggggccccttcgatctggtgtacggcagcacccaacccctgggcagctcttgtgaccggtgccctggctggtacatgtttcagttccaccggatcctgcagtacgccctgccgagacaggagtcccagcggccattcttttggattttcatggacaacttgctgctgaccgaggatgaccaggaaactaccactcggttcctgcagaccgaagccgtgaccctgcaggacgtgagaggccgggactaccagaacgccatgcgggtgtggtccaacatccctggactgaaaagcaagcacgcacctctgacccctaaagaagaggagtacctgcaggcccaggtgcggagcagaagcaagctggacgcccctaaggtggatctgctggtgaagaattgcctcctgcccctgagagagtacttcaagtatttcagccagaatagtctgcccctgggaggcagcggcggcggcgccctggtgacatttgaggacgtcgccgtgcggttcacccaggaggaatgggctctgctggatccttctcagaaaatcctgtaccgggacgtgatgagagagacataccggaatctgacctccgtgggcatcaactgggaatgttgggaccttgaagcctgcttcagaagcctgggaagaaacctgagagtgcaggtggtgaagagaaagtgcgagctgaccaacagcggcccctgcgccgagggcggcccaagcagcggcgcccctcctcccagcggcggcagcccagccggctccccaacctctaccgaggagggcacctctgagtccgccacccccgagagcggccctggcacctccaccgagcccagcgagggcagcgcacccggcagccctgccggcagccccacctccacagaggagggaaccagcaccgagcccagcgaaggcagcgccccaggcaccagcaccgagcctagtgagcaggagattaaacggatcaacaagatcagaagaagacttgtgaaagacagcaacaccaagaaggccggcaagacaggccccatgaaaaccctgctggttagagtgatgacacccgatctgagagagcggctggaaaacctgagaaagaagcctgaaaatatcccccagcccatcagcaatacatctagagccaacctgaataagctgctgaccgattacaccgaaatgaagaaggcgatcctgcatgtgtactgggaagagttccagaaggaccctgtgggcctgatgagccgggtggcccagcctgccagcaagaagatcgatcagaacaagctgaaacctgagatggacgagaagggcaacctgaccaccgccggctttgcctgctctcagtgtggccagcccctgttcgtgtacaagctggagcaggtgtctgagaagggcaaggcttacaccaactacttcggacggtgcaatgtggccgagcacgaaaagctgatcctgctggcccagctgaagcccgagaaggatagcgacgaagccgtgacatatagcctgggaaagtttgggcagagggccctggatttctacagcattcatgtgaccaaggagtccacccaccccgtgaagcccctggcccagatcgccggaaacagatacgcctccggacctgtgggaaaggccctgagcgacgcatgtatgggcacaatcgcctccttcctgtctaagtaccaggacatcatcatcgaacaccagaaggtggtgaagggcaaccagaagagactggagagcctgcgggagctggccggcaaggaaaacctggaataccctagcgtgaccctgccacctcagcctcacaccaaggagggcgttgatgcctacaacgaagtgatcgcccgggtgcgaatgtgggtgaacctgaacctgtggcagaagctgaagctaagcagagatgatgccaagcctctgctgagactgaagggattcccttcctttcctctggtcgagagacaggccaacgaagtggactggtgggacatggtgtgtaacgtgaagaagctgatcaacgagaaaaaggaggatggcaaggtgttttggcagaatctggctggctacaagagacaggaagccctgagaccatacctgagcagcgaggaagatcggaagaagggaaagaaattcgctcggtaccagctgggcgacctgctgctgcacctggaaaagaagcacggcgaggactggggaaaggtgtacgacgaggcctgggagcggattgacaagaaagtggaaggcctgagcaagcacatcaagctggaagaggaacggagaagcgaggacgcccagagcaaggccgccctgaccgactggctgcgggctaaggccagcttcgtgatcgagggcctgaaggaggccgacaaggacgagttctgcagatgcgagctgaagctgcagaagtggtacggggacctgcggggaaagcccttcgccatcgaagccgagaacagcatcctggacatcagcggcttcagcaagcagtacaactgtgccttcatctggcagaaggacggcgtgaagaagctgaacctgtacctgatcatcaactacttcaagggcggcaagctgcggttcaagaagatcaaacctgaagccttcgaagccaacagattctacaccgtgatcaacaaaaagagcggcgagatcgtgcccatggaggtgaacttcaacttcgacgaccccaacctgatcatcctgcctctggcctttggcaagagacagggcagagaattcatctggaacgacctgctgtccctggaaaccggcagcctgaagctggccaacggaagagtgatcgagaagacactgtacaacagaagaacccggcaggatgagcctgccctgttcgtggccctgaccttcgagcggcgggaggtcctggactcctccaatatcaaaccaatgaacctgatcggcgtggcaagaggcgaaaacatccccgccgtgatcgccctgaccgaccccgagggctgcccactgagccggtttaaggatagcctgggaaacccaacccacatcctgagaatcggcgagagctataaggagaagcagcggaccatccaggccaagaaggaggtggagcagcggagagccggcggctacagccggaagtacgccagcaaagccaagaatctggcagacgatatggtgagaaacaccgctagagatctgctgtactacgccgtgacccaggatgccatgctgatcttcgccaacctgagccggggcttcggccggcagggcaagcggaccttcatggccgagagacagtacacacggatggaggactggctgaccgccaagctggcctacgagggcctgagcaagacctacctgtccaagacactggcccagtacacctccaagacatgcagcaactgtgggtttaccatcaccagcgccgactacgacagggtgctggagaagctgaagaagacagcaacaggctggatgaccacaattaacggcaaggagctgaaggtggagggccagattacctactacaacagatacaagagacagaacgtagtcaaggacctgtccgtcgagctggatagactgagcgaagaatctgtgaacaacgacatctcctcctggacaaagggcagaagcggagaagctctgagcctcctgaagaaaagattctcccatagacccgtgcaggagaagttcgtgtgcctgaactgcggcttcgagacacacgcagccgagcaagccgccctgaacatcgccagatcctggctgttcctgcggagccaggagtacaagaaataccagacaaacaagacaaccggcaacaccgataagagagccttcgtcgagacctggcagtccttttaccggaagaagcttaaggaggtgtggaaacctgccgtgcggtctggcggatctggcggaggctcctgccaggagctggtgaccttcgaggacgtggccgtgtacttcagcctggaggagtgggagaggctggaggccgaccagaggggcctgtaccaggaggtgatgcaggagaactacggcatcctggtgagcctgggctaccccatccccaagcccgacctgatcttcaggctggagcagggcgaggagccctgggtgcccgacagccccaggcccgaggagggcgacatcgtgaccggcgtgtacggcggcccaagcagcggcgcccctcctcccagcggcggcagcccagccggctccccaacctctaccgaggagggcacctctgagtccgccacccccgagagcggccctggcacctccaccgagcccagcgagggcagcgcacccggcagccctgccggcagccccacctccacagaggagggaaccagcaccgagcccagcgaaggcagcgccccaggcaccagcaccgagcctagtgagcaggagattaaacggatcaacaagatcagaagaagacttgtgaaagacagcaacaccaagaaggccggcaagacaggccccatgaaaaccctgctggttagagtgatgacacccgatctgagagagcggctggaaaacctgagaaagaagcctgaaaatatcccccagcccatcagcaatacatctagagccaacctgaataagctgctgaccgattacaccgaaatgaagaaggcgatcctgcatgtgtactgggaagagttccagaaggaccctgtgggcctgatgagccgggtggcccagcctgccagcaagaagatcgatcagaacaagctgaaacctgagatggacgagaagggcaacctgaccaccgccggctttgcctgctctcagtgtggccagcccctgttcgtgtacaagctggagcaggtgtctgagaagggcaaggcttacaccaactacttcggacggtgcaatgtggccgagcacgaaaagctgatcctgctggcccagctgaagcccgagaaggatagcgacgaagccgtgacatatagcctgggaaagtttgggcagagggccctggatttctacagcattcatgtgaccaaggagtccacccaccccgtgaagcccctggcccagatcgccggaaacagatacgcctccggacctgtgggaaaggccctgagcgacgcatgtatgggcacaatcgcctccttcctgtctaagtaccaggacatcatcatcgaacaccagaaggtggtgaagggcaaccagaagagactggagagcctgcgggagctggccggcaaggaaaacctggaataccctagcgtgaccctgccacctcagcctcacaccaaggagggcgttgatgcctacaacgaagtgatcgcccgggtgcgaatgtgggtgaacctgaacctgtggcagaagctgaagctaagcagagatgatgccaagcctctgctgagactgaagggattcccttcctttcctctggtcgagagacaggccaacgaagtggactggtgggacatggtgtgtaacgtgaagaagctgatcaacgagaaaaaggaggatggcaaggtgttttggcagaatctggctggctacaagagacaggaagccctgagaccatacctgagcagcgaggaagatcggaagaagggaaagaaattcgctcggtaccagctgggcgacctgctgctgcacctggaaaagaagcacggcgaggactggggaaaggtgtacgacgaggcctgggagcggattgacaagaaagtggaaggcctgagcaagcacatcaagctggaagaggaacggagaagcgaggacgcccagagcaaggccgccctgaccgactggctgcgggctaaggccagcttcgtgatcgagggcctgaaggaggccgacaaggacgagttctgcagatgcgagctgaagctgcagaagtggtacggggacctgcggggaaagcccttcgccatcgaagccgagaacagcatcctggacatcagcggcttcagcaagcagtacaactgtgccttcatctggcagaaggacggcgtgaagaagctgaacctgtacctgatcatcaactacttcaagggcggcaagctgcggttcaagaagatcaaacctgaagccttcgaagccaacagattctacaccgtgatcaacaaaaagagcggcgagatcgtgcccatggaggtgaacttcaacttcgacgaccccaacctgatcatcctgcctctggcctttggcaagagacagggcagagaattcatctggaacgacctgctgtccctggaaaccggcagcctgaagctggccaacggaagagtgatcgagaagacactgtacaacagaagaacccggcaggatgagcctgccctgttcgtggccctgaccttcgagcggcgggaggtcctggactcctccaatatcaaaccaatgaacctgatcggcgtggcaagaggcgaaaacatccccgccgtgatcgccctgaccgaccccgagggctgcccactgagccggtttaaggatagcctgggaaacccaacccacatcctgagaatcggcgagagctataaggagaagcagcggaccatccaggccaagaaggaggtggagcagcggagagccggcggctacagccggaagtacgccagcaaagccaagaatctggcagacgatatggtgagaaacaccgctagagatctgctgtactacgccgtgacccaggatgccatgctgatcttcgccaacctgagccggggcttcggccggcagggcaagcggaccttcatggccgagagacagtacacacggatggaggactggctgaccgccaagctggcctacgagggcctgagcaagacctacctgtccaagacactggcccagtacacctccaagacatgcagcaactgtgggtttaccatcaccagcgccgactacgacagggtgctggagaagctgaagaagacagcaacaggctggatgaccacaattaacggcaaggagctgaaggtggagggccagattacctactacaacagatacaagagacagaacgtagtcaaggacctgtccgtcgagctggatagactgagcgaagaatctgtgaacaacgacatctcctcctggacaaagggcagaagcggagaagctctgagcctcctgaagaaaagattctcccatagacccgtgcaggagaagttcgtgtgcctgaactgcggcttcgagacacacgcagccgagcaagccgccctgaacatcgccagatcctggctgttcctgcggagccaggagtacaagaaataccagacaaacaagacaaccggcaacaccgataagagagccttcgtcgagacctggcagtccttttaccggaagaagcttaaggaggtgtggaaacctgccgtgcggtctggcggatctggcggaggctccttgccaggagctggtgaccttcgaggacgtggccgtgtacttcagcctggaggagtgggagaggctggaggccgaccagaggggcctgtaccaggaggtgatgcaggagaactacggcatcctggtgagcctgggctaccccatccccaagcccgacctgatcttcaggctggagcagggcgaggagccctgggtgcccgacagccccaggcccgaggagggcgacatcgtgaccggcgtgtacggatctggctccggcagcggccccaagaaaaagagaaaagtctaagctgccttctgcggggcttgccttctggccatgcccttcttctctcccttgcacctgtacctcttggtctttgaataaagcctgagtaggaaggctagcaaaaaaaaaaaaaaaaaaaaaaaaaaaaaaaaaaaaaaaaaaaaaaaaaaaaaaaaaaaaaaaaaaaaaaaaaaaaaaaa

SEQ ID NO: 16340 - RNA, 9485 nt, synthetic construct
  source 1..9485: mol_type = other RNA
aggaaataagagagaaaagaagagtaagaagaaatataagagccaccatggcccctaagaagaagcgtaaagtgagccggatggaacgcctcgtctacgaggtgcggcagaagtgcagaaacatcgaggacatctgcatctcctgcggatctctgaacgtgaccctggagcacccactgttcatcggcggcatgtgccagaactgtaaaaactgttttctggagtgtgcctatcaatacgacgatgacggctaccagagctactgcaccatctgttgcggcggaagagaggtgctgatgtgtggaaataacaactgctgccggtgcttctgcgtggaatgcgtggacctgctggtgggccccggcgccgcccaggccgctattaaggaagatccttggaactgctacatgtgcggccacaagggcacatacggcctgctgagacggagagaggactggcctagcagactgcagatgttcttcgccaataaccacgaccaggagttcgacccccctaaggtgtaccctcccgtccccgccgagaagagaaagcccatccgggtcctgagcctgttcgatggcatcgccaccggtctgctggtgctgaaggacctgggcatccaggtggataggtacattgcctccgaggtgtgcgaggactccatcaccgtgggaatggtgcgtcatcagggcaagatcatgtacgtgggcgacgtgcggagcgtgacacagaagcatatccaggagtggggccctttcgacctggtgatcggcggcagcccttgcaatgacctgagcatcgtgaacccagcccggaagggcctgtacgagggaaccggcagactgttcttcgagttttacagactgctgcacgacgcccggcctaaggaaggcgacgaccggcccttcttttggctgttcgagaatgtggtggccatgggagtcagcgacaagcgggatattagccggttcctggagagcaaccccgtgatgatcgatgccaaggaagtgagcgccgcccaccgggccagatacttctggggcaatctgcctggcatgaacagacccctggccagcaccgtgaacgacaagctggagctgcaggagtgcctggagcacggccggatcgccaagttcagcaaggtgagaaccatcaccacccgaagcaacagcatcaaacaaggcaaggaccagcactttcctgtgttcatgaacgagaaggaggacatcctgtggtgtaccgagatggagagagtgttcgggttcccagtccactacacagatgtcagcaacatgtctagactggccagacagagactgctgggaagaagctggtccgtccctgtgatcagacacctgttcgcccctctgaaggagtacttcgcctgcgtgagcagcggcaacagcaacgccaacagccggggccccagcttctctagcggcctggtgccactgtccctgagagggagccacatgggccccatggagatctacaaaaccgtgagcgcctggaagcggcagcctgtgcgcgtgctgagcctgtttcggaatatcgataaagtcctgaaaagcctgggattcctggagagcggctctggctccggcggtggcaccctgaagtacgtggaggatgtgacaaacgtggtcagacgggatgtggagaagtggggccccttcgatctggtgtacggcagcacccaacccctgggcagctcttgtgaccggtgccctggctggtacatgtttcagttccaccggatcctgcagtacgccctgccgagacaggagtcccagcggccattcttttggattttcatggacaacttgctgctgaccgaggatgaccaggaaactaccactcggttcctgcagaccgaagccgtgaccctgcaggacgtgagaggccgggactaccagaacgccatgcgggtgtggtccaacatccctggactgaaaagcaagcacgcacctctgacccctaaagaagaggagtacctgcaggcccaggtgcggagcagaagcaagctggacgcccctaaggtggatctgctggtgaagaattgcctcctgcccctgagagagtacttcaagtatttcagccagaatagtctgcccctgggaggcagcggcggcggcgccctggtgacatttgaggacgtcgccgtgcggttcacccaggaggaatgggctctgctggatccttctcagaaaatcctgtaccgggacgtgatgagagagacataccggaatctgacctccgtgggcatcaactgggaatgttgggaccttgaagcctgcttcagaagcctgggaagaaacctgagagtgcaggtggtgaagagaaagtgcgagctgaccaacagcggcccctgcgccgagggcggcccaagcagcggcgcccctcctcccagcggcggcagcccagccggctccccaacctctaccgaggagggcacctctgagtccgccacccccgagagcggccctggcacctccaccgagcccagcgagggcagcgcacccggcagccctgccggcagccccacctccacagaggagggaaccagcaccgagcccagcgaaggcagcgccccaggcaccagcaccgagcctagtgagcaggagattaaacggatcaacaagatcagaagaagacttgtgaaagacagcaacaccaagaaggccggcaagacaggccccatgaaaaccctgctggttagagtgatgacacccgatctgagagagcggctggaaaacctgagaaagaagcctgaaaatatcccccagcccatcagcaatacatctagagccaacctgaataagctgctgaccgattacaccgaaatgaagaaggcgatcctgcatgtgtactgggaagagttccagaaggaccctgtgggcctgatgagccgggtggcccagcctgccagcaagaagatcgatcagaacaagctgaaacctgagatggacgagaagggcaacctgaccaccgccggctttgcctgctctcagtgtggccagcccctgttcgtgtacaagctggagcaggtgtctgagaagggcaaggcttacaccaactacttcggacggtgcaatgtggccgagcacgaaaagctgatcctgctggcccagctgaagcccgagaaggatagcgacgaagccgtgacatatagcctgggaaagtttgggcagagggccctggatttctacagcattcatgtgaccaaggagtccacccaccccgtgaagcccctggcccagatcgccggaaacagatacgcctccggacctgtgggaaaggccctgagcgacgcatgtatgggcacaatcgcctccttcctgtctaagtaccaggacatcatcatcgaacaccagaaggtggtgaagggcaaccagaagagactggagagcctgcgggagctggccggcaaggaaaacctggaataccctagcgtgaccctgccacctcagcctcacaccaaggagggcgttgatgcctacaacgaagtgatcgcccgggtgcgaatgtgggtgaacctgaacctgtggcagaagctgaagctaagcagagatgatgccaagcctctgctgagactgaagggattcccttcctttcctctggtcgagagacaggccaacgaagtggactggtgggacatggtgtgtaacgtgaagaagctgatcaacgagaaaaaggaggatggcaaggtgttttggcagaatctggctggctacaagagacaggaagccctgagaccatacctgagcagcgaggaagatcggaagaagggaaagaaattcgctcggtaccagctgggcgacctgctgctgcacctggaaaagaagcacggcgaggactggggaaaggtgtacgacgaggcctgggagcggattgacaagaaagtggaaggcctgagcaagcacatcaagctggaagaggaacggagaagcgaggacgcccagagcaaggccgccctgaccgactggctgcgggctaaggccagcttcgtgatcgagggcctgaaggaggccgacaaggacgagttctgcagatgcgagctgaagctgcagaagtggtacggggacctgcggggaaagcccttcgccatcgaagccgagaacagcatcctggacatcagcggcttcagcaagcagtacaactgtgccttcatctggcagaaggacggcgtgaagaagctgaacctgtacctgatcatcaactacttcaagggcggcaagctgcggttcaagaagatcaaacctgaagccttcgaagccaacagattctacaccgtgatcaacaaaaagagcggcgagatcgtgcccatggaggtgaacttcaacttcgacgaccccaacctgatcatcctgcctctggcctttggcaagagacagggcagagaattcatctggaacgacctgctgtccctggaaaccggcagcctgaagctggccaacggaagagtgatcgagaagacactgtacaacagaagaacccggcaggatgagcctgccctgttcgtggccctgaccttcgagcggcgggaggtcctggactcctccaatatcaaaccaatgaacctgatcggcgtggcaagaggcgaaaacatccccgccgtgatcgccctgaccgaccccgagggctgcccactgagccggtttaaggatagcctgggaaacccaacccacatcctgagaatcggcgagagctataaggagaagcagcggaccatccaggccaagaaggaggtggagcagcggagagccggcggctacagccggaagtacgccagcaaagccaagaatctggcagacgatatggtgagaaacaccgctagagatctgctgtactacgccgtgacccaggatgccatgctgatcttcgccaacctgagccggggcttcggccggcagggcaagcggaccttcatggccgagagacagtacacacggatggaggactggctgaccgccaagctggcctacgagggcctgagcaagacctacctgtccaagacactggcccagtacacctccaagacatgcagcaactgtgggtttaccatcaccagcgccgactacgacagggtgctggagaagctgaagaagacagcaacaggctggatgaccacaattaacggcaaggagctgaaggtggagggccagattacctactacaacagatacaagagacagaacgtagtcaaggacctgtccgtcgagctggatagactgagcgaagaatctgtgaacaacgacatctcctcctggacaaagggcagaagcggagaagctctgagcctcctgaagaaaagattctcccatagacccgtgcaggagaagttcgtgtgcctgaactgcggcttcgagacacacgcagccgagcaagccgccctgaacatcgccagatcctggctgttcctgcggagccaggagtacaagaaataccagacaaacaagacaaccggcaacaccgataagagagccttcgtcgagacctggcagtccttttaccggaagaagcttaaggaggtgtggaaacctgccgtgcggtctggcggatctggcggaggctccatgagccagggcctggtgaccttcagggacgtggccatcgacttcagccaggaggagtggaagtggctgcagcccgcccagagggacctgtacaggtgcgtgatgctggagaactacggccacctggtgagcctgggcctgagcatcagcaagcccgacgtggtgagcctgctggagcagggcaaggagccctggctgggcaagagggaggtgaagagggacctgttcagcgtgagcgagagcggcggcccaagcagcggcgcccctcctcccagcggcggcagcccagccggctccccaacctctaccgaggagggcacctctgagtccgccacccccgagagcggccctggcacctccaccgagcccagcgagggcagcgcacccggcagccctgccggcagccccacctccacagaggagggaaccagcaccgagcccagcgaaggcagcgccccaggcaccagcaccgagcctagtgagcaggagattaaacggatcaacaagatcagaagaagacttgtgaaagacagcaacaccaagaaggccggcaagacaggccccatgaaaaccctgctggttagagtgatgacacccgatctgagagagcggctggaaaacctgagaaagaagcctgaaaatatcccccagcccatcagcaatacatctagagccaacctgaataagctgctgaccgattacaccgaaatgaagaaggcgatcctgcatgtgtactgggaagagttccagaaggaccctgtgggcctgatgagccgggtggcccagcctgccagcaagaagatcgatcagaacaagctgaaacctgagatggacgagaagggcaacctgaccaccgccggctttgcctgctctcagtgtggccagcccctgttcgtgtacaagctggagcaggtgtctgagaagggcaaggcttacaccaactacttcggacggtgcaatgtggccgagcacgaaaagctgatcctgctggcccagctgaagcccgagaaggatagcgacgaagccgtgacatatagcctgggaaagtttgggcagagggccctggatttctacagcattcatgtgaccaaggagtccacccaccccgtgaagcccctggcccagatcgccggaaacagatacgcctccggacctgtgggaaaggccctgagcgacgcatgtatgggcacaatcgcctccttcctgtctaagtaccaggacatcatcatcgaacaccagaaggtggtgaagggcaaccagaagagactggagagcctgcgggagctggccggcaaggaaaacctggaataccctagcgtgaccctgccacctcagcctcacaccaaggagggcgttgatgcctacaacgaagtgatcgcccgggtgcgaatgtgggtgaacctgaacctgtggcagaagctgaagctaagcagagatgatgccaagcctctgctgagactgaagggattcccttcctttcctctggtcgagagacaggccaacgaagtggactggtgggacatggtgtgtaacgtgaagaagctgatcaacgagaaaaaggaggatggcaaggtgttttggcagaatctggctggctacaagagacaggaagccctgagaccatacctgagcagcgaggaagatcggaagaagggaaagaaattcgctcggtaccagctgggcgacctgctgctgcacctggaaaagaagcacggcgaggactggggaaaggtgtacgacgaggcctgggagcggattgacaagaaagtggaaggcctgagcaagcacatcaagctggaagaggaacggagaagcgaggacgcccagagcaaggccgccctgaccgactggctgcgggctaaggccagcttcgtgatcgagggcctgaaggaggccgacaaggacgagttctgcagatgcgagctgaagctgcagaagtggtacggggacctgcggggaaagcccttcgccatcgaagccgagaacagcatcctggacatcagcggcttcagcaagcagtacaactgtgccttcatctggcagaaggacggcgtgaagaagctgaacctgtacctgatcatcaactacttcaagggcggcaagctgcggttcaagaagatcaaacctgaagccttcgaagccaacagattctacaccgtgatcaacaaaaagagcggcgagatcgtgcccatggaggtgaacttcaacttcgacgaccccaacctgatcatcctgcctctggcctttggcaagagacagggcagagaattcatctggaacgacctgctgtccctggaaaccggcagcctgaagctggccaacggaagagtgatcgagaagacactgtacaacagaagaacccggcaggatgagcctgccctgttcgtggccctgaccttcgagcggcgggaggtcctggactcctccaatatcaaaccaatgaacctgatcggcgtggcaagaggcgaaaacatccccgccgtgatcgccctgaccgaccccgagggctgcccactgagccggtttaaggatagcctgggaaacccaacccacatcctgagaatcggcgagagctataaggagaagcagcggaccatccaggccaagaaggaggtggagcagcggagagccggcggctacagccggaagtacgccagcaaagccaagaatctggcagacgatatggtgagaaacaccgctagagatctgctgtactacgccgtgacccaggatgccatgctgatcttcgccaacctgagccggggcttcggccggcagggcaagcggaccttcatggccgagagacagtacacacggatggaggactggctgaccgccaagctggcctacgagggcctgagcaagacctacctgtccaagacactggcccagtacacctccaagacatgcagcaactgtgggtttaccatcaccagcgccgactacgacagggtgctggagaagctgaagaagacagcaacaggctggatgaccacaattaacggcaaggagctgaaggtggagggccagattacctactacaacagatacaagagacagaacgtagtcaaggacctgtccgtcgagctggatagactgagcgaagaatctgtgaacaacgacatctcctcctggacaaagggcagaagcggagaagctctgagcctcctgaagaaaagattctcccatagacccgtgcaggagaagttcgtgtgcctgaactgcggcttcgagacacacgcagccgagcaagccgccctgaacatcgccagatcctggctgttcctgcggagccaggagtacaagaaataccagacaaacaagacaaccggcaacaccgataagagagccttcgtcgagacctggcagtccttttaccggaagaagcttaaggaggtgtggaaacctgccgtgcggtctggcggatctggcggaggctcctatgagccagggcctggtgaccttcagggacgtggccatcgacttcagccaggaggagtggaagtggctgcagcccgcccagagggacctgtacaggtgcgtgatgctggagaactacggccacctggtgagcctgggcctgagcatcagcaagcccgacgtggtgagcctgctggagcagggcaaggagccctggctgggcaagagggaggtgaagagggacctgttcagcgtgagcgagagcggatctggctccggcagcggccccaagaaaaagagaaaagtctaagctgccttctgcggggcttgccttctggccatgcccttcttctctcccttgcacctgtacctcttggtctttgaataaagcctgagtaggaaggctagcaaaaaaaaaaaaaaaaaaaaaaaaaaaaaaaaaaaaaaaaaaaaaaaaaaaaaaaaaaaaaaaaaaaaaaaaaaaaaaaa

SEQ ID NO: 16341 - RNA, 9485 nt, synthetic construct
  source 1..9485: mol_type = other RNA
aggaaataagagagaaaagaagagtaagaagaaatataagagccaccatggcccctaagaagaagcgtaaagtgagccggatggaacgcctcgtctacgaggtgcggcagaagtgcagaaacatcgaggacatctgcatctcctgcggatctctgaacgtgaccctggagcacccactgttcatcggcggcatgtgccagaactgtaaaaactgttttctggagtgtgcctatcaatacgacgatgacggctaccagagctactgcaccatctgttgcggcggaagagaggtgctgatgtgtggaaataacaactgctgccggtgcttctgcgtggaatgcgtggacctgctggtgggccccggcgccgcccaggccgctattaaggaagatccttggaactgctacatgtgcggccacaagggcacatacggcctgctgagacggagagaggactggcctagcagactgcagatgttcttcgccaataaccacgaccaggagttcgacccccctaaggtgtaccctcccgtccccgccgagaagagaaagcccatccgggtcctgagcctgttcgatggcatcgccaccggtctgctggtgctgaaggacctgggcatccaggtggataggtacattgcctccgaggtgtgcgaggactccatcaccgtgggaatggtgcgtcatcagggcaagatcatgtacgtgggcgacgtgcggagcgtgacacagaagcatatccaggagtggggccctttcgacctggtgatcggcggcagcccttgcaatgacctgagcatcgtgaacccagcccggaagggcctgtacgagggaaccggcagactgttcttcgagttttacagactgctgcacgacgcccggcctaaggaaggcgacgaccggcccttcttttggctgttcgagaatgtggtggccatgggagtcagcgacaagcgggatattagccggttcctggagagcaaccccgtgatgatcgatgccaaggaagtgagcgccgcccaccgggccagatacttctggggcaatctgcctggcatgaacagacccctggccagcaccgtgaacgacaagctggagctgcaggagtgcctggagcacggccggatcgccaagttcagcaaggtgagaaccatcaccacccgaagcaacagcatcaaacaaggcaaggaccagcactttcctgtgttcatgaacgagaaggaggacatcctgtggtgtaccgagatggagagagtgttcgggttcccagtccactacacagatgtcagcaacatgtctagactggccagacagagactgctgggaagaagctggtccgtccctgtgatcagacacctgttcgcccctctgaaggagtacttcgcctgcgtgagcagcggcaacagcaacgccaacagccggggccccagcttctctagcggcctggtgccactgtccctgagagggagccacatgggccccatggagatctacaaaaccgtgagcgcctggaagcggcagcctgtgcgcgtgctgagcctgtttcggaatatcgataaagtcctgaaaagcctgggattcctggagagcggctctggctccggcggtggcaccctgaagtacgtggaggatgtgacaaacgtggtcagacgggatgtggagaagtggggccccttcgatctggtgtacggcagcacccaacccctgggcagctcttgtgaccggtgccctggctggtacatgtttcagttccaccggatcctgcagtacgccctgccgagacaggagtcccagcggccattcttttggattttcatggacaacttgctgctgaccgaggatgaccaggaaactaccactcggttcctgcagaccgaagccgtgaccctgcaggacgtgagaggccgggactaccagaacgccatgcgggtgtggtccaacatccctggactgaaaagcaagcacgcacctctgacccctaaagaagaggagtacctgcaggcccaggtgcggagcagaagcaagctggacgcccctaaggtggatctgctggtgaagaattgcctcctgcccctgagagagtacttcaagtatttcagccagaatagtctgcccctgggaggcagcggcggcggcgccctggtgacatttgaggacgtcgccgtgcggttcacccaggaggaatgggctctgctggatccttctcagaaaatcctgtaccgggacgtgatgagagagacataccggaatctgacctccgtgggcatcaactgggaatgttgggaccttgaagcctgcttcagaagcctgggaagaaacctgagagtgcaggtggtgaagagaaagtgcgagctgaccaacagcggcccctgcgccgagggcggcccaagcagcggcgcccctcctcccagcggcggcagcccagccggctccccaacctctaccgaggagggcacctctgagtccgccacccccgagagcggccctggcacctccaccgagcccagcgagggcagcgcacccggcagccctgccggcagccccacctccacagaggagggaaccagcaccgagcccagcgaaggcagcgccccaggcaccagcaccgagcctagtgagcaggagattaaacggatcaacaagatcagaagaagacttgtgaaagacagcaacaccaagaaggccggcaagacaggccccatgaaaaccctgctggttagagtgatgacacccgatctgagagagcggctggaaaacctgagaaagaagcctgaaaatatcccccagcccatcagcaatacatctagagccaacctgaataagctgctgaccgattacaccgaaatgaagaaggcgatcctgcatgtgtactgggaagagttccagaaggaccctgtgggcctgatgagccgggtggcccagcctgccagcaagaagatcgatcagaacaagctgaaacctgagatggacgagaagggcaacctgaccaccgccggctttgcctgctctcagtgtggccagcccctgttcgtgtacaagctggagcaggtgtctgagaagggcaaggcttacaccaactacttcggacggtgcaatgtggccgagcacgaaaagctgatcctgctggcccagctgaagcccgagaaggatagcgacgaagccgtgacatatagcctgggaaagtttgggcagagggccctggatttctacagcattcatgtgaccaaggagtccacccaccccgtgaagcccctggcccagatcgccggaaacagatacgcctccggacctgtgggaaaggccctgagcgacgcatgtatgggcacaatcgcctccttcctgtctaagtaccaggacatcatcatcgaacaccagaaggtggtgaagggcaaccagaagagactggagagcctgcgggagctggccggcaaggaaaacctggaataccctagcgtgaccctgccacctcagcctcacaccaaggagggcgttgatgcctacaacgaagtgatcgcccgggtgcgaatgtgggtgaacctgaacctgtggcagaagctgaagctaagcagagatgatgccaagcctctgctgagactgaagggattcccttcctttcctctggtcgagagacaggccaacgaagtggactggtgggacatggtgtgtaacgtgaagaagctgatcaacgagaaaaaggaggatggcaaggtgttttggcagaatctggctggctacaagagacaggaagccctgagaccatacctgagcagcgaggaagatcggaagaagggaaagaaattcgctcggtaccagctgggcgacctgctgctgcacctggaaaagaagcacggcgaggactggggaaaggtgtacgacgaggcctgggagcggattgacaagaaagtggaaggcctgagcaagcacatcaagctggaagaggaacggagaagcgaggacgcccagagcaaggccgccctgaccgactggctgcgggctaaggccagcttcgtgatcgagggcctgaaggaggccgacaaggacgagttctgcagatgcgagctgaagctgcagaagtggtacggggacctgcggggaaagcccttcgccatcgaagccgagaacagcatcctggacatcagcggcttcagcaagcagtacaactgtgccttcatctggcagaaggacggcgtgaagaagctgaacctgtacctgatcatcaactacttcaagggcggcaagctgcggttcaagaagatcaaacctgaagccttcgaagccaacagattctacaccgtgatcaacaaaaagagcggcgagatcgtgcccatggaggtgaacttcaacttcgacgaccccaacctgatcatcctgcctctggcctttggcaagagacagggcagagaattcatctggaacgacctgctgtccctggaaaccggcagcctgaagctggccaacggaagagtgatcgagaagacactgtacaacagaagaacccggcaggatgagcctgccctgttcgtggccctgaccttcgagcggcgggaggtcctggactcctccaatatcaaaccaatgaacctgatcggcgtggcaagaggcgaaaacatccccgccgtgatcgccctgaccgaccccgagggctgcccactgagccggtttaaggatagcctgggaaacccaacccacatcctgagaatcggcgagagctataaggagaagcagcggaccatccaggccaagaaggaggtggagcagcggagagccggcggctacagccggaagtacgccagcaaagccaagaatctggcagacgatatggtgagaaacaccgctagagatctgctgtactacgccgtgacccaggatgccatgctgatcttcgccaacctgagccggggcttcggccggcagggcaagcggaccttcatggccgagagacagtacacacggatggaggactggctgaccgccaagctggcctacgagggcctgagcaagacctacctgtccaagacactggcccagtacacctccaagacatgcagcaactgtgggtttaccatcaccagcgccgactacgacagggtgctggagaagctgaagaagacagcaacaggctggatgaccacaattaacggcaaggagctgaaggtggagggccagattacctactacaacagatacaagagacagaacgtagtcaaggacctgtccgtcgagctggatagactgagcgaagaatctgtgaacaacgacatctcctcctggacaaagggcagaagcggagaagctctgagcctcctgaagaaaagattctcccatagacccgtgcaggagaagttcgtgtgcctgaactgcggcttcgagacacacgcagccgagcaagccgccctgaacatcgccagatcctggctgttcctgcggagccaggagtacaagaaataccagacaaacaagacaaccggcaacaccgataagagagccttcgtcgagacctggcagtccttttaccggaagaagcttaaggaggtgtggaaacctgccgtgcggtctggcggatctggcggaggctccagccaggagcccgtgaccttcgccgacgtggccgtggtgttcacccccgaggagtgggtgttcctggacagcacccagaggagcctgtacagggacgtgatgctggagaactacaggaacctggccagcgtggccgaccagctgtgcaagcccaacgccctgagctacctggaggagaggggcgagcagtggaccaccgacaggggcatcctgagcgacacctgcgccgagccccagtgccagggcggcccaagcagcggcgcccctcctcccagcggcggcagcccagccggctccccaacctctaccgaggagggcacctctgagtccgccacccccgagagcggccctggcacctccaccgagcccagcgagggcagcgcacccggcagccctgccggcagccccacctccacagaggagggaaccagcaccgagcccagcgaaggcagcgccccaggcaccagcaccgagcctagtgagcaggagattaaacggatcaacaagatcagaagaagacttgtgaaagacagcaacaccaagaaggccggcaagacaggccccatgaaaaccctgctggttagagtgatgacacccgatctgagagagcggctggaaaacctgagaaagaagcctgaaaatatcccccagcccatcagcaatacatctagagccaacctgaataagctgctgaccgattacaccgaaatgaagaaggcgatcctgcatgtgtactgggaagagttccagaaggaccctgtgggcctgatgagccgggtggcccagcctgccagcaagaagatcgatcagaacaagctgaaacctgagatggacgagaagggcaacctgaccaccgccggctttgcctgctctcagtgtggccagcccctgttcgtgtacaagctggagcaggtgtctgagaagggcaaggcttacaccaactacttcggacggtgcaatgtggccgagcacgaaaagctgatcctgctggcccagctgaagcccgagaaggatagcgacgaagccgtgacatatagcctgggaaagtttgggcagagggccctggatttctacagcattcatgtgaccaaggagtccacccaccccgtgaagcccctggcccagatcgccggaaacagatacgcctccggacctgtgggaaaggccctgagcgacgcatgtatgggcacaatcgcctccttcctgtctaagtaccaggacatcatcatcgaacaccagaaggtggtgaagggcaaccagaagagactggagagcctgcgggagctggccggcaaggaaaacctggaataccctagcgtgaccctgccacctcagcctcacaccaaggagggcgttgatgcctacaacgaagtgatcgcccgggtgcgaatgtgggtgaacctgaacctgtggcagaagctgaagctaagcagagatgatgccaagcctctgctgagactgaagggattcccttcctttcctctggtcgagagacaggccaacgaagtggactggtgggacatggtgtgtaacgtgaagaagctgatcaacgagaaaaaggaggatggcaaggtgttttggcagaatctggctggctacaagagacaggaagccctgagaccatacctgagcagcgaggaagatcggaagaagggaaagaaattcgctcggtaccagctgggcgacctgctgctgcacctggaaaagaagcacggcgaggactggggaaaggtgtacgacgaggcctgggagcggattgacaagaaagtggaaggcctgagcaagcacatcaagctggaagaggaacggagaagcgaggacgcccagagcaaggccgccctgaccgactggctgcgggctaaggccagcttcgtgatcgagggcctgaaggaggccgacaaggacgagttctgcagatgcgagctgaagctgcagaagtggtacggggacctgcggggaaagcccttcgccatcgaagccgagaacagcatcctggacatcagcggcttcagcaagcagtacaactgtgccttcatctggcagaaggacggcgtgaagaagctgaacctgtacctgatcatcaactacttcaagggcggcaagctgcggttcaagaagatcaaacctgaagccttcgaagccaacagattctacaccgtgatcaacaaaaagagcggcgagatcgtgcccatggaggtgaacttcaacttcgacgaccccaacctgatcatcctgcctctggcctttggcaagagacagggcagagaattcatctggaacgacctgctgtccctggaaaccggcagcctgaagctggccaacggaagagtgatcgagaagacactgtacaacagaagaacccggcaggatgagcctgccctgttcgtggccctgaccttcgagcggcgggaggtcctggactcctccaatatcaaaccaatgaacctgatcggcgtggcaagaggcgaaaacatccccgccgtgatcgccctgaccgaccccgagggctgcccactgagccggtttaaggatagcctgggaaacccaacccacatcctgagaatcggcgagagctataaggagaagcagcggaccatccaggccaagaaggaggtggagcagcggagagccggcggctacagccggaagtacgccagcaaagccaagaatctggcagacgatatggtgagaaacaccgctagagatctgctgtactacgccgtgacccaggatgccatgctgatcttcgccaacctgagccggggcttcggccggcagggcaagcggaccttcatggccgagagacagtacacacggatggaggactggctgaccgccaagctggcctacgagggcctgagcaagacctacctgtccaagacactggcccagtacacctccaagacatgcagcaactgtgggtttaccatcaccagcgccgactacgacagggtgctggagaagctgaagaagacagcaacaggctggatgaccacaattaacggcaaggagctgaaggtggagggccagattacctactacaacagatacaagagacagaacgtagtcaaggacctgtccgtcgagctggatagactgagcgaagaatctgtgaacaacgacatctcctcctggacaaagggcagaagcggagaagctctgagcctcctgaagaaaagattctcccatagacccgtgcaggagaagttcgtgtgcctgaactgcggcttcgagacacacgcagccgagcaagccgccctgaacatcgccagatcctggctgttcctgcggagccaggagtacaagaaataccagacaaacaagacaaccggcaacaccgataagagagccttcgtcgagacctggcagtccttttaccggaagaagcttaaggaggtgtggaaacctgccgtgcggtctggcggatctggcggaggctcctagccaggagcccgtgaccttcgccgacgtggccgtggtgttcacccccgaggagtgggtgttcctggacagcacccagaggagcctgtacagggacgtgatgctggagaactacaggaacctggccagcgtggccgaccagctgtgcaagcccaacgccctgagctacctggaggagaggggcgagcagtggaccaccgacaggggcatcctgagcgacacctgcgccgagccccagtgccagggatctggctccggcagcggccccaagaaaaagagaaaagtctaagctgccttctgcggggcttgccttctggccatgcccttcttctctcccttgcacctgtacctcttggtctttgaataaagcctgagtaggaaggctagcaaaaaaaaaaaaaaaaaaaaaaaaaaaaaaaaaaaaaaaaaaaaaaaaaaaaaaaaaaaaaaaaaaaaaaaaaaaaaaaa

SEQ ID NO: 16342 - RNA, 9533 nt, synthetic construct
  source 1..9533: mol_type = other RNA
aggaaataagagagaaaagaagagtaagaagaaatataagagccaccatggcccctaagaagaagcgtaaagtgagccggatggaacgcctcgtctacgaggtgcggcagaagtgcagaaacatcgaggacatctgcatctcctgcggatctctgaacgtgaccctggagcacccactgttcatcggcggcatgtgccagaactgtaaaaactgttttctggagtgtgcctatcaatacgacgatgacggctaccagagctactgcaccatctgttgcggcggaagagaggtgctgatgtgtggaaataacaactgctgccggtgcttctgcgtggaatgcgtggacctgctggtgggccccggcgccgcccaggccgctattaaggaagatccttggaactgctacatgtgcggccacaagggcacatacggcctgctgagacggagagaggactggcctagcagactgcagatgttcttcgccaataaccacgaccaggagttcgacccccctaaggtgtaccctcccgtccccgccgagaagagaaagcccatccgggtcctgagcctgttcgatggcatcgccaccggtctgctggtgctgaaggacctgggcatccaggtggataggtacattgcctccgaggtgtgcgaggactccatcaccgtgggaatggtgcgtcatcagggcaagatcatgtacgtgggcgacgtgcggagcgtgacacagaagcatatccaggagtggggccctttcgacctggtgatcggcggcagcccttgcaatgacctgagcatcgtgaacccagcccggaagggcctgtacgagggaaccggcagactgttcttcgagttttacagactgctgcacgacgcccggcctaaggaaggcgacgaccggcccttcttttggctgttcgagaatgtggtggccatgggagtcagcgacaagcgggatattagccggttcctggagagcaaccccgtgatgatcgatgccaaggaagtgagcgccgcccaccgggccagatacttctggggcaatctgcctggcatgaacagacccctggccagcaccgtgaacgacaagctggagctgcaggagtgcctggagcacggccggatcgccaagttcagcaaggtgagaaccatcaccacccgaagcaacagcatcaaacaaggcaaggaccagcactttcctgtgttcatgaacgagaaggaggacatcctgtggtgtaccgagatggagagagtgttcgggttcccagtccactacacagatgtcagcaacatgtctagactggccagacagagactgctgggaagaagctggtccgtccctgtgatcagacacctgttcgcccctctgaaggagtacttcgcctgcgtgagcagcggcaacagcaacgccaacagccggggccccagcttctctagcggcctggtgccactgtccctgagagggagccacatgggccccatggagatctacaaaaccgtgagcgcctggaagcggcagcctgtgcgcgtgctgagcctgtttcggaatatcgataaagtcctgaaaagcctgggattcctggagagcggctctggctccggcggtggcaccctgaagtacgtggaggatgtgacaaacgtggtcagacgggatgtggagaagtggggccccttcgatctggtgtacggcagcacccaacccctgggcagctcttgtgaccggtgccctggctggtacatgtttcagttccaccggatcctgcagtacgccctgccgagacaggagtcccagcggccattcttttggattttcatggacaacttgctgctgaccgaggatgaccaggaaactaccactcggttcctgcagaccgaagccgtgaccctgcaggacgtgagaggccgggactaccagaacgccatgcgggtgtggtccaacatccctggactgaaaagcaagcacgcacctctgacccctaaagaagaggagtacctgcaggcccaggtgcggagcagaagcaagctggacgcccctaaggtggatctgctggtgaagaattgcctcctgcccctgagagagtacttcaagtatttcagccagaatagtctgcccctgggaggcagcggcggcggcgccctggtgacatttgaggacgtcgccgtgcggttcacccaggaggaatgggctctgctggatccttctcagaaaatcctgtaccgggacgtgatgagagagacataccggaatctgacctccgtgggcatcaactgggaatgttgggaccttgaagcctgcttcagaagcctgggaagaaacctgagagtgcaggtggtgaagagaaagtgcgagctgaccaacagcggcccctgcgccgagggcggcccaagcagcggcgcccctcctcccagcggcggcagcccagccggctccccaacctctaccgaggagggcacctctgagtccgccacccccgagagcggccctggcacctccaccgagcccagcgagggcagcgcacccggcagccctgccggcagccccacctccacagaggagggaaccagcaccgagcccagcgaaggcagcgccccaggcaccagcaccgagcctagtgagcaggagattaaacggatcaacaagatcagaagaagacttgtgaaagacagcaacaccaagaaggccggcaagacaggccccatgaaaaccctgctggttagagtgatgacacccgatctgagagagcggctggaaaacctgagaaagaagcctgaaaatatcccccagcccatcagcaatacatctagagccaacctgaataagctgctgaccgattacaccgaaatgaagaaggcgatcctgcatgtgtactgggaagagttccagaaggaccctgtgggcctgatgagccgggtggcccagcctgccagcaagaagatcgatcagaacaagctgaaacctgagatggacgagaagggcaacctgaccaccgccggctttgcctgctctcagtgtggccagcccctgttcgtgtacaagctggagcaggtgtctgagaagggcaaggcttacaccaactacttcggacggtgcaatgtggccgagcacgaaaagctgatcctgctggcccagctgaagcccgagaaggatagcgacgaagccgtgacatatagcctgggaaagtttgggcagagggccctggatttctacagcattcatgtgaccaaggagtccacccaccccgtgaagcccctggcccagatcgccggaaacagatacgcctccggacctgtgggaaaggccctgagcgacgcatgtatgggcacaatcgcctccttcctgtctaagtaccaggacatcatcatcgaacaccagaaggtggtgaagggcaaccagaagagactggagagcctgcgggagctggccggcaaggaaaacctggaataccctagcgtgaccctgccacctcagcctcacaccaaggagggcgttgatgcctacaacgaagtgatcgcccgggtgcgaatgtgggtgaacctgaacctgtggcagaagctgaagctaagcagagatgatgccaagcctctgctgagactgaagggattcccttcctttcctctggtcgagagacaggccaacgaagtggactggtgggacatggtgtgtaacgtgaagaagctgatcaacgagaaaaaggaggatggcaaggtgttttggcagaatctggctggctacaagagacaggaagccctgagaccatacctgagcagcgaggaagatcggaagaagggaaagaaattcgctcggtaccagctgggcgacctgctgctgcacctggaaaagaagcacggcgaggactggggaaaggtgtacgacgaggcctgggagcggattgacaagaaagtggaaggcctgagcaagcacatcaagctggaagaggaacggagaagcgaggacgcccagagcaaggccgccctgaccgactggctgcgggctaaggccagcttcgtgatcgagggcctgaaggaggccgacaaggacgagttctgcagatgcgagctgaagctgcagaagtggtacggggacctgcggggaaagcccttcgccatcgaagccgagaacagcatcctggacatcagcggcttcagcaagcagtacaactgtgccttcatctggcagaaggacggcgtgaagaagctgaacctgtacctgatcatcaactacttcaagggcggcaagctgcggttcaagaagatcaaacctgaagccttcgaagccaacagattctacaccgtgatcaacaaaaagagcggcgagatcgtgcccatggaggtgaacttcaacttcgacgaccccaacctgatcatcctgcctctggcctttggcaagagacagggcagagaattcatctggaacgacctgctgtccctggaaaccggcagcctgaagctggccaacggaagagtgatcgagaagacactgtacaacagaagaacccggcaggatgagcctgccctgttcgtggccctgaccttcgagcggcgggaggtcctggactcctccaatatcaaaccaatgaacctgatcggcgtggcaagaggcgaaaacatccccgccgtgatcgccctgaccgaccccgagggctgcccactgagccggtttaaggatagcctgggaaacccaacccacatcctgagaatcggcgagagctataaggagaagcagcggaccatccaggccaagaaggaggtggagcagcggagagccggcggctacagccggaagtacgccagcaaagccaagaatctggcagacgatatggtgagaaacaccgctagagatctgctgtactacgccgtgacccaggatgccatgctgatcttcgccaacctgagccggggcttcggccggcagggcaagcggaccttcatggccgagagacagtacacacggatggaggactggctgaccgccaagctggcctacgagggcctgagcaagacctacctgtccaagacactggcccagtacacctccaagacatgcagcaactgtgggtttaccatcaccagcgccgactacgacagggtgctggagaagctgaagaagacagcaacaggctggatgaccacaattaacggcaaggagctgaaggtggagggccagattacctactacaacagatacaagagacagaacgtagtcaaggacctgtccgtcgagctggatagactgagcgaagaatctgtgaacaacgacatctcctcctggacaaagggcagaagcggagaagctctgagcctcctgaagaaaagattctcccatagacccgtgcaggagaagttcgtgtgcctgaactgcggcttcgagacacacgcagccgagcaagccgccctgaacatcgccagatcctggctgttcctgcggagccaggagtacaagaaataccagacaaacaagacaaccggcaacaccgataagagagccttcgtcgagacctggcagtccttttaccggaagaagcttaaggaggtgtggaaacctgccgtgcggtctggcggatctggcggaggctccgtggtgttcgaggacgtggccgtgaacttcaccctggaggagtgggccctgctggacagcagccagaaggagctgtacagggacgtgatgctggagaccttcaggaacctggccagcgtggacggcgagacccagtacaaggccaacggcagcgtgagccagcaggacatctacaggaacaagatcagcaaggagcacaagatcagcaagttcaccggcaacgacagctggcccttcgtgctgggcaagatctgggaggagctgagcggcggcccaagcagcggcgcccctcctcccagcggcggcagcccagccggctccccaacctctaccgaggagggcacctctgagtccgccacccccgagagcggccctggcacctccaccgagcccagcgagggcagcgcacccggcagccctgccggcagccccacctccacagaggagggaaccagcaccgagcccagcgaaggcagcgccccaggcaccagcaccgagcctagtgagcaggagattaaacggatcaacaagatcagaagaagacttgtgaaagacagcaacaccaagaaggccggcaagacaggccccatgaaaaccctgctggttagagtgatgacacccgatctgagagagcggctggaaaacctgagaaagaagcctgaaaatatcccccagcccatcagcaatacatctagagccaacctgaataagctgctgaccgattacaccgaaatgaagaaggcgatcctgcatgtgtactgggaagagttccagaaggaccctgtgggcctgatgagccgggtggcccagcctgccagcaagaagatcgatcagaacaagctgaaacctgagatggacgagaagggcaacctgaccaccgccggctttgcctgctctcagtgtggccagcccctgttcgtgtacaagctggagcaggtgtctgagaagggcaaggcttacaccaactacttcggacggtgcaatgtggccgagcacgaaaagctgatcctgctggcccagctgaagcccgagaaggatagcgacgaagccgtgacatatagcctgggaaagtttgggcagagggccctggatttctacagcattcatgtgaccaaggagtccacccaccccgtgaagcccctggcccagatcgccggaaacagatacgcctccggacctgtgggaaaggccctgagcgacgcatgtatgggcacaatcgcctccttcctgtctaagtaccaggacatcatcatcgaacaccagaaggtggtgaagggcaaccagaagagactggagagcctgcgggagctggccggcaaggaaaacctggaataccctagcgtgaccctgccacctcagcctcacaccaaggagggcgttgatgcctacaacgaagtgatcgcccgggtgcgaatgtgggtgaacctgaacctgtggcagaagctgaagctaagcagagatgatgccaagcctctgctgagactgaagggattcccttcctttcctctggtcgagagacaggccaacgaagtggactggtgggacatggtgtgtaacgtgaagaagctgatcaacgagaaaaaggaggatggcaaggtgttttggcagaatctggctggctacaagagacaggaagccctgagaccatacctgagcagcgaggaagatcggaagaagggaaagaaattcgctcggtaccagctgggcgacctgctgctgcacctggaaaagaagcacggcgaggactggggaaaggtgtacgacgaggcctgggagcggattgacaagaaagtggaaggcctgagcaagcacatcaagctggaagaggaacggagaagcgaggacgcccagagcaaggccgccctgaccgactggctgcgggctaaggccagcttcgtgatcgagggcctgaaggaggccgacaaggacgagttctgcagatgcgagctgaagctgcagaagtggtacggggacctgcggggaaagcccttcgccatcgaagccgagaacagcatcctggacatcagcggcttcagcaagcagtacaactgtgccttcatctggcagaaggacggcgtgaagaagctgaacctgtacctgatcatcaactacttcaagggcggcaagctgcggttcaagaagatcaaacctgaagccttcgaagccaacagattctacaccgtgatcaacaaaaagagcggcgagatcgtgcccatggaggtgaacttcaacttcgacgaccccaacctgatcatcctgcctctggcctttggcaagagacagggcagagaattcatctggaacgacctgctgtccctggaaaccggcagcctgaagctggccaacggaagagtgatcgagaagacactgtacaacagaagaacccggcaggatgagcctgccctgttcgtggccctgaccttcgagcggcgggaggtcctggactcctccaatatcaaaccaatgaacctgatcggcgtggcaagaggcgaaaacatccccgccgtgatcgccctgaccgaccccgagggctgcccactgagccggtttaaggatagcctgggaaacccaacccacatcctgagaatcggcgagagctataaggagaagcagcggaccatccaggccaagaaggaggtggagcagcggagagccggcggctacagccggaagtacgccagcaaagccaagaatctggcagacgatatggtgagaaacaccgctagagatctgctgtactacgccgtgacccaggatgccatgctgatcttcgccaacctgagccggggcttcggccggcagggcaagcggaccttcatggccgagagacagtacacacggatggaggactggctgaccgccaagctggcctacgagggcctgagcaagacctacctgtccaagacactggcccagtacacctccaagacatgcagcaactgtgggtttaccatcaccagcgccgactacgacagggtgctggagaagctgaagaagacagcaacaggctggatgaccacaattaacggcaaggagctgaaggtggagggccagattacctactacaacagatacaagagacagaacgtagtcaaggacctgtccgtcgagctggatagactgagcgaagaatctgtgaacaacgacatctcctcctggacaaagggcagaagcggagaagctctgagcctcctgaagaaaagattctcccatagacccgtgcaggagaagttcgtgtgcctgaactgcggcttcgagacacacgcagccgagcaagccgccctgaacatcgccagatcctggctgttcctgcggagccaggagtacaagaaataccagacaaacaagacaaccggcaacaccgataagagagccttcgtcgagacctggcagtccttttaccggaagaagcttaaggaggtgtggaaacctgccgtgcggtctggcggatctggcggaggctcctgtggtgttcgaggacgtggccgtgaacttcaccctggaggagtgggccctgctggacagcagccagaaggagctgtacagggacgtgatgctggagaccttcaggaacctggccagcgtggacggcgagacccagtacaaggccaacggcagcgtgagccagcaggacatctacaggaacaagatcagcaaggagcacaagatcagcaagttcaccggcaacgacagctggcccttcgtgctgggcaagatctgggaggagctgagcggatctggctccggcagcggccccaagaaaaagagaaaagtctaagctgccttctgcggggcttgccttctggccatgcccttcttctctcccttgcacctgtacctcttggtctttgaataaagcctgagtaggaaggctagcaaaaaaaaaaaaaaaaaaaaaaaaaaaaaaaaaaaaaaaaaaaaaaaaaaaaaaaaaaaaaaaaaaaaaaaaaaaaaaaa

SEQ ID NO: 16343 - RNA, 9485 nt, synthetic construct
  source 1..9485: mol_type = other RNA
aggaaataagagagaaaagaagagtaagaagaaatataagagccaccatggcccctaagaagaagcgtaaagtgagccggatggaacgcctcgtctacgaggtgcggcagaagtgcagaaacatcgaggacatctgcatctcctgcggatctctgaacgtgaccctggagcacccactgttcatcggcggcatgtgccagaactgtaaaaactgttttctggagtgtgcctatcaatacgacgatgacggctaccagagctactgcaccatctgttgcggcggaagagaggtgctgatgtgtggaaataacaactgctgccggtgcttctgcgtggaatgcgtggacctgctggtgggccccggcgccgcccaggccgctattaaggaagatccttggaactgctacatgtgcggccacaagggcacatacggcctgctgagacggagagaggactggcctagcagactgcagatgttcttcgccaataaccacgaccaggagttcgacccccctaaggtgtaccctcccgtccccgccgagaagagaaagcccatccgggtcctgagcctgttcgatggcatcgccaccggtctgctggtgctgaaggacctgggcatccaggtggataggtacattgcctccgaggtgtgcgaggactccatcaccgtgggaatggtgcgtcatcagggcaagatcatgtacgtgggcgacgtgcggagcgtgacacagaagcatatccaggagtggggccctttcgacctggtgatcggcggcagcccttgcaatgacctgagcatcgtgaacccagcccggaagggcctgtacgagggaaccggcagactgttcttcgagttttacagactgctgcacgacgcccggcctaaggaaggcgacgaccggcccttcttttggctgttcgagaatgtggtggccatgggagtcagcgacaagcgggatattagccggttcctggagagcaaccccgtgatgatcgatgccaaggaagtgagcgccgcccaccgggccagatacttctggggcaatctgcctggcatgaacagacccctggccagcaccgtgaacgacaagctggagctgcaggagtgcctggagcacggccggatcgccaagttcagcaaggtgagaaccatcaccacccgaagcaacagcatcaaacaaggcaaggaccagcactttcctgtgttcatgaacgagaaggaggacatcctgtggtgtaccgagatggagagagtgttcgggttcccagtccactacacagatgtcagcaacatgtctagactggccagacagagactgctgggaagaagctggtccgtccctgtgatcagacacctgttcgcccctctgaaggagtacttcgcctgcgtgagcagcggcaacagcaacgccaacagccggggccccagcttctctagcggcctggtgccactgtccctgagagggagccacatgggccccatggagatctacaaaaccgtgagcgcctggaagcggcagcctgtgcgcgtgctgagcctgtttcggaatatcgataaagtcctgaaaagcctgggattcctggagagcggctctggctccggcggtggcaccctgaagtacgtggaggatgtgacaaacgtggtcagacgggatgtggagaagtggggccccttcgatctggtgtacggcagcacccaacccctgggcagctcttgtgaccggtgccctggctggtacatgtttcagttccaccggatcctgcagtacgccctgccgagacaggagtcccagcggccattcttttggattttcatggacaacttgctgctgaccgaggatgaccaggaaactaccactcggttcctgcagaccgaagccgtgaccctgcaggacgtgagaggccgggactaccagaacgccatgcgggtgtggtccaacatccctggactgaaaagcaagcacgcacctctgacccctaaagaagaggagtacctgcaggcccaggtgcggagcagaagcaagctggacgcccctaaggtggatctgctggtgaagaattgcctcctgcccctgagagagtacttcaagtatttcagccagaatagtctgcccctgggaggcagcggcggcggcgccctggtgacatttgaggacgtcgccgtgcggttcacccaggaggaatgggctctgctggatccttctcagaaaatcctgtaccgggacgtgatgagagagacataccggaatctgacctccgtgggcatcaactgggaatgttgggaccttgaagcctgcttcagaagcctgggaagaaacctgagagtgcaggtggtgaagagaaagtgcgagctgaccaacagcggcccctgcgccgagggcggcccaagcagcggcgcccctcctcccagcggcggcagcccagccggctccccaacctctaccgaggagggcacctctgagtccgccacccccgagagcggccctggcacctccaccgagcccagcgagggcagcgcacccggcagccctgccggcagccccacctccacagaggagggaaccagcaccgagcccagcgaaggcagcgccccaggcaccagcaccgagcctagtgagcaggagattaaacggatcaacaagatcagaagaagacttgtgaaagacagcaacaccaagaaggccggcaagacaggccccatgaaaaccctgctggttagagtgatgacacccgatctgagagagcggctggaaaacctgagaaagaagcctgaaaatatcccccagcccatcagcaatacatctagagccaacctgaataagctgctgaccgattacaccgaaatgaagaaggcgatcctgcatgtgtactgggaagagttccagaaggaccctgtgggcctgatgagccgggtggcccagcctgccagcaagaagatcgatcagaacaagctgaaacctgagatggacgagaagggcaacctgaccaccgccggctttgcctgctctcagtgtggccagcccctgttcgtgtacaagctggagcaggtgtctgagaagggcaaggcttacaccaactacttcggacggtgcaatgtggccgagcacgaaaagctgatcctgctggcccagctgaagcccgagaaggatagcgacgaagccgtgacatatagcctgggaaagtttgggcagagggccctggatttctacagcattcatgtgaccaaggagtccacccaccccgtgaagcccctggcccagatcgccggaaacagatacgcctccggacctgtgggaaaggccctgagcgacgcatgtatgggcacaatcgcctccttcctgtctaagtaccaggacatcatcatcgaacaccagaaggtggtgaagggcaaccagaagagactggagagcctgcgggagctggccggcaaggaaaacctggaataccctagcgtgaccctgccacctcagcctcacaccaaggagggcgttgatgcctacaacgaagtgatcgcccgggtgcgaatgtgggtgaacctgaacctgtggcagaagctgaagctaagcagagatgatgccaagcctctgctgagactgaagggattcccttcctttcctctggtcgagagacaggccaacgaagtggactggtgggacatggtgtgtaacgtgaagaagctgatcaacgagaaaaaggaggatggcaaggtgttttggcagaatctggctggctacaagagacaggaagccctgagaccatacctgagcagcgaggaagatcggaagaagggaaagaaattcgctcggtaccagctgggcgacctgctgctgcacctggaaaagaagcacggcgaggactggggaaaggtgtacgacgaggcctgggagcggattgacaagaaagtggaaggcctgagcaagcacatcaagctggaagaggaacggagaagcgaggacgcccagagcaaggccgccctgaccgactggctgcgggctaaggccagcttcgtgatcgagggcctgaaggaggccgacaaggacgagttctgcagatgcgagctgaagctgcagaagtggtacggggacctgcggggaaagcccttcgccatcgaagccgagaacagcatcctggacatcagcggcttcagcaagcagtacaactgtgccttcatctggcagaaggacggcgtgaagaagctgaacctgtacctgatcatcaactacttcaagggcggcaagctgcggttcaagaagatcaaacctgaagccttcgaagccaacagattctacaccgtgatcaacaaaaagagcggcgagatcgtgcccatggaggtgaacttcaacttcgacgaccccaacctgatcatcctgcctctggcctttggcaagagacagggcagagaattcatctggaacgacctgctgtccctggaaaccggcagcctgaagctggccaacggaagagtgatcgagaagacactgtacaacagaagaacccggcaggatgagcctgccctgttcgtggccctgaccttcgagcggcgggaggtcctggactcctccaatatcaaaccaatgaacctgatcggcgtggcaagaggcgaaaacatccccgccgtgatcgccctgaccgaccccgagggctgcccactgagccggtttaaggatagcctgggaaacccaacccacatcctgagaatcggcgagagctataaggagaagcagcggaccatccaggccaagaaggaggtggagcagcggagagccggcggctacagccggaagtacgccagcaaagccaagaatctggcagacgatatggtgagaaacaccgctagagatctgctgtactacgccgtgacccaggatgccatgctgatcttcgccaacctgagccggggcttcggccggcagggcaagcggaccttcatggccgagagacagtacacacggatggaggactggctgaccgccaagctggcctacgagggcctgagcaagacctacctgtccaagacactggcccagtacacctccaagacatgcagcaactgtgggtttaccatcaccagcgccgactacgacagggtgctggagaagctgaagaagacagcaacaggctggatgaccacaattaacggcaaggagctgaaggtggagggccagattacctactacaacagatacaagagacagaacgtagtcaaggacctgtccgtcgagctggatagactgagcgaagaatctgtgaacaacgacatctcctcctggacaaagggcagaagcggagaagctctgagcctcctgaagaaaagattctcccatagacccgtgcaggagaagttcgtgtgcctgaactgcggcttcgagacacacgcagccgagcaagccgccctgaacatcgccagatcctggctgttcctgcggagccaggagtacaagaaataccagacaaacaagacaaccggcaacaccgataagagagccttcgtcgagacctggcagtccttttaccggaagaagcttaaggaggtgtggaaacctgccgtgcggtctggcggatctggcggaggctccgccgacatcaccctgatgagccaggcccaggacagcaggagcatcctgttccaggagagcgtgaccttcgaggacgtggccgtgaacttcaccaacagggagtggcagtgcctgacctacgcccagaggcacctgtacaaggacgtgatgctggagaactacaggaacatggccagcctgggcttccccttccccaagccccccctgatcagccacctggagagggaggtggacccctgcgtgggcggcccaagcagcggcgcccctcctcccagcggcggcagcccagccggctccccaacctctaccgaggagggcacctctgagtccgccacccccgagagcggccctggcacctccaccgagcccagcgagggcagcgcacccggcagccctgccggcagccccacctccacagaggagggaaccagcaccgagcccagcgaaggcagcgccccaggcaccagcaccgagcctagtgagcaggagattaaacggatcaacaagatcagaagaagacttgtgaaagacagcaacaccaagaaggccggcaagacaggccccatgaaaaccctgctggttagagtgatgacacccgatctgagagagcggctggaaaacctgagaaagaagcctgaaaatatcccccagcccatcagcaatacatctagagccaacctgaataagctgctgaccgattacaccgaaatgaagaaggcgatcctgcatgtgtactgggaagagttccagaaggaccctgtgggcctgatgagccgggtggcccagcctgccagcaagaagatcgatcagaacaagctgaaacctgagatggacgagaagggcaacctgaccaccgccggctttgcctgctctcagtgtggccagcccctgttcgtgtacaagctggagcaggtgtctgagaagggcaaggcttacaccaactacttcggacggtgcaatgtggccgagcacgaaaagctgatcctgctggcccagctgaagcccgagaaggatagcgacgaagccgtgacatatagcctgggaaagtttgggcagagggccctggatttctacagcattcatgtgaccaaggagtccacccaccccgtgaagcccctggcccagatcgccggaaacagatacgcctccggacctgtgggaaaggccctgagcgacgcatgtatgggcacaatcgcctccttcctgtctaagtaccaggacatcatcatcgaacaccagaaggtggtgaagggcaaccagaagagactggagagcctgcgggagctggccggcaaggaaaacctggaataccctagcgtgaccctgccacctcagcctcacaccaaggagggcgttgatgcctacaacgaagtgatcgcccgggtgcgaatgtgggtgaacctgaacctgtggcagaagctgaagctaagcagagatgatgccaagcctctgctgagactgaagggattcccttcctttcctctggtcgagagacaggccaacgaagtggactggtgggacatggtgtgtaacgtgaagaagctgatcaacgagaaaaaggaggatggcaaggtgttttggcagaatctggctggctacaagagacaggaagccctgagaccatacctgagcagcgaggaagatcggaagaagggaaagaaattcgctcggtaccagctgggcgacctgctgctgcacctggaaaagaagcacggcgaggactggggaaaggtgtacgacgaggcctgggagcggattgacaagaaagtggaaggcctgagcaagcacatcaagctggaagaggaacggagaagcgaggacgcccagagcaaggccgccctgaccgactggctgcgggctaaggccagcttcgtgatcgagggcctgaaggaggccgacaaggacgagttctgcagatgcgagctgaagctgcagaagtggtacggggacctgcggggaaagcccttcgccatcgaagccgagaacagcatcctggacatcagcggcttcagcaagcagtacaactgtgccttcatctggcagaaggacggcgtgaagaagctgaacctgtacctgatcatcaactacttcaagggcggcaagctgcggttcaagaagatcaaacctgaagccttcgaagccaacagattctacaccgtgatcaacaaaaagagcggcgagatcgtgcccatggaggtgaacttcaacttcgacgaccccaacctgatcatcctgcctctggcctttggcaagagacagggcagagaattcatctggaacgacctgctgtccctggaaaccggcagcctgaagctggccaacggaagagtgatcgagaagacactgtacaacagaagaacccggcaggatgagcctgccctgttcgtggccctgaccttcgagcggcgggaggtcctggactcctccaatatcaaaccaatgaacctgatcggcgtggcaagaggcgaaaacatccccgccgtgatcgccctgaccgaccccgagggctgcccactgagccggtttaaggatagcctgggaaacccaacccacatcctgagaatcggcgagagctataaggagaagcagcggaccatccaggccaagaaggaggtggagcagcggagagccggcggctacagccggaagtacgccagcaaagccaagaatctggcagacgatatggtgagaaacaccgctagagatctgctgtactacgccgtgacccaggatgccatgctgatcttcgccaacctgagccggggcttcggccggcagggcaagcggaccttcatggccgagagacagtacacacggatggaggactggctgaccgccaagctggcctacgagggcctgagcaagacctacctgtccaagacactggcccagtacacctccaagacatgcagcaactgtgggtttaccatcaccagcgccgactacgacagggtgctggagaagctgaagaagacagcaacaggctggatgaccacaattaacggcaaggagctgaaggtggagggccagattacctactacaacagatacaagagacagaacgtagtcaaggacctgtccgtcgagctggatagactgagcgaagaatctgtgaacaacgacatctcctcctggacaaagggcagaagcggagaagctctgagcctcctgaagaaaagattctcccatagacccgtgcaggagaagttcgtgtgcctgaactgcggcttcgagacacacgcagccgagcaagccgccctgaacatcgccagatcctggctgttcctgcggagccaggagtacaagaaataccagacaaacaagacaaccggcaacaccgataagagagccttcgtcgagacctggcagtccttttaccggaagaagcttaaggaggtgtggaaacctgccgtgcggtctggcggatctggcggaggctcctgccgacatcaccctgatgagccaggcccaggacagcaggagcatcctgttccaggagagcgtgaccttcgaggacgtggccgtgaacttcaccaacagggagtggcagtgcctgacctacgcccagaggcacctgtacaaggacgtgatgctggagaactacaggaacatggccagcctgggcttccccttccccaagccccccctgatcagccacctggagagggaggtggacccctgcgtgggatctggctccggcagcggccccaagaaaaagagaaaagtctaagctgccttctgcggggcttgccttctggccatgcccttcttctctcccttgcacctgtacctcttggtctttgaataaagcctgagtaggaaggctagcaaaaaaaaaaaaaaaaaaaaaaaaaaaaaaaaaaaaaaaaaaaaaaaaaaaaaaaaaaaaaaaaaaaaaaaaaaaaaaaa

SEQ ID NO: 16344 - RNA, 9485 nt, synthetic construct
  source 1..9485: mol_type = other RNA
aggaaataagagagaaaagaagagtaagaagaaatataagagccaccatggcccctaagaagaagcgtaaagtgagccggatggaacgcctcgtctacgaggtgcggcagaagtgcagaaacatcgaggacatctgcatctcctgcggatctctgaacgtgaccctggagcacccactgttcatcggcggcatgtgccagaactgtaaaaactgttttctggagtgtgcctatcaatacgacgatgacggctaccagagctactgcaccatctgttgcggcggaagagaggtgctgatgtgtggaaataacaactgctgccggtgcttctgcgtggaatgcgtggacctgctggtgggccccggcgccgcccaggccgctattaaggaagatccttggaactgctacatgtgcggccacaagggcacatacggcctgctgagacggagagaggactggcctagcagactgcagatgttcttcgccaataaccacgaccaggagttcgacccccctaaggtgtaccctcccgtccccgccgagaagagaaagcccatccgggtcctgagcctgttcgatggcatcgccaccggtctgctggtgctgaaggacctgggcatccaggtggataggtacattgcctccgaggtgtgcgaggactccatcaccgtgggaatggtgcgtcatcagggcaagatcatgtacgtgggcgacgtgcggagcgtgacacagaagcatatccaggagtggggccctttcgacctggtgatcggcggcagcccttgcaatgacctgagcatcgtgaacccagcccggaagggcctgtacgagggaaccggcagactgttcttcgagttttacagactgctgcacgacgcccggcctaaggaaggcgacgaccggcccttcttttggctgttcgagaatgtggtggccatgggagtcagcgacaagcgggatattagccggttcctggagagcaaccccgtgatgatcgatgccaaggaagtgagcgccgcccaccgggccagatacttctggggcaatctgcctggcatgaacagacccctggccagcaccgtgaacgacaagctggagctgcaggagtgcctggagcacggccggatcgccaagttcagcaaggtgagaaccatcaccacccgaagcaacagcatcaaacaaggcaaggaccagcactttcctgtgttcatgaacgagaaggaggacatcctgtggtgtaccgagatggagagagtgttcgggttcccagtccactacacagatgtcagcaacatgtctagactggccagacagagactgctgggaagaagctggtccgtccctgtgatcagacacctgttcgcccctctgaaggagtacttcgcctgcgtgagcagcggcaacagcaacgccaacagccggggccccagcttctctagcggcctggtgccactgtccctgagagggagccacatgggccccatggagatctacaaaaccgtgagcgcctggaagcggcagcctgtgcgcgtgctgagcctgtttcggaatatcgataaagtcctgaaaagcctgggattcctggagagcggctctggctccggcggtggcaccctgaagtacgtggaggatgtgacaaacgtggtcagacgggatgtggagaagtggggccccttcgatctggtgtacggcagcacccaacccctgggcagctcttgtgaccggtgccctggctggtacatgtttcagttccaccggatcctgcagtacgccctgccgagacaggagtcccagcggccattcttttggattttcatggacaacttgctgctgaccgaggatgaccaggaaactaccactcggttcctgcagaccgaagccgtgaccctgcaggacgtgagaggccgggactaccagaacgccatgcgggtgtggtccaacatccctggactgaaaagcaagcacgcacctctgacccctaaagaagaggagtacctgcaggcccaggtgcggagcagaagcaagctggacgcccctaaggtggatctgctggtgaagaattgcctcctgcccctgagagagtacttcaagtatttcagccagaatagtctgcccctgggaggcagcggcggcggcgccctggtgacatttgaggacgtcgccgtgcggttcacccaggaggaatgggctctgctggatccttctcagaaaatcctgtaccgggacgtgatgagagagacataccggaatctgacctccgtgggcatcaactgggaatgttgggaccttgaagcctgcttcagaagcctgggaagaaacctgagagtgcaggtggtgaagagaaagtgcgagctgaccaacagcggcccctgcgccgagggcggcccaagcagcggcgcccctcctcccagcggcggcagcccagccggctccccaacctctaccgaggagggcacctctgagtccgccacccccgagagcggccctggcacctccaccgagcccagcgagggcagcgcacccggcagccctgccggcagccccacctccacagaggagggaaccagcaccgagcccagcgaaggcagcgccccaggcaccagcaccgagcctagtgagcaggagattaaacggatcaacaagatcagaagaagacttgtgaaagacagcaacaccaagaaggccggcaagacaggccccatgaaaaccctgctggttagagtgatgacacccgatctgagagagcggctggaaaacctgagaaagaagcctgaaaatatcccccagcccatcagcaatacatctagagccaacctgaataagctgctgaccgattacaccgaaatgaagaaggcgatcctgcatgtgtactgggaagagttccagaaggaccctgtgggcctgatgagccgggtggcccagcctgccagcaagaagatcgatcagaacaagctgaaacctgagatggacgagaagggcaacctgaccaccgccggctttgcctgctctcagtgtggccagcccctgttcgtgtacaagctggagcaggtgtctgagaagggcaaggcttacaccaactacttcggacggtgcaatgtggccgagcacgaaaagctgatcctgctggcccagctgaagcccgagaaggatagcgacgaagccgtgacatatagcctgggaaagtttgggcagagggccctggatttctacagcattcatgtgaccaaggagtccacccaccccgtgaagcccctggcccagatcgccggaaacagatacgcctccggacctgtgggaaaggccctgagcgacgcatgtatgggcacaatcgcctccttcctgtctaagtaccaggacatcatcatcgaacaccagaaggtggtgaagggcaaccagaagagactggagagcctgcgggagctggccggcaaggaaaacctggaataccctagcgtgaccctgccacctcagcctcacaccaaggagggcgttgatgcctacaacgaagtgatcgcccgggtgcgaatgtgggtgaacctgaacctgtggcagaagctgaagctaagcagagatgatgccaagcctctgctgagactgaagggattcccttcctttcctctggtcgagagacaggccaacgaagtggactggtgggacatggtgtgtaacgtgaagaagctgatcaacgagaaaaaggaggatggcaaggtgttttggcagaatctggctggctacaagagacaggaagccctgagaccatacctgagcagcgaggaagatcggaagaagggaaagaaattcgctcggtaccagctgggcgacctgctgctgcacctggaaaagaagcacggcgaggactggggaaaggtgtacgacgaggcctgggagcggattgacaagaaagtggaaggcctgagcaagcacatcaagctggaagaggaacggagaagcgaggacgcccagagcaaggccgccctgaccgactggctgcgggctaaggccagcttcgtgatcgagggcctgaaggaggccgacaaggacgagttctgcagatgcgagctgaagctgcagaagtggtacggggacctgcggggaaagcccttcgccatcgaagccgagaacagcatcctggacatcagcggcttcagcaagcagtacaactgtgccttcatctggcagaaggacggcgtgaagaagctgaacctgtacctgatcatcaactacttcaagggcggcaagctgcggttcaagaagatcaaacctgaagccttcgaagccaacagattctacaccgtgatcaacaaaaagagcggcgagatcgtgcccatggaggtgaacttcaacttcgacgaccccaacctgatcatcctgcctctggcctttggcaagagacagggcagagaattcatctggaacgacctgctgtccctggaaaccggcagcctgaagctggccaacggaagagtgatcgagaagacactgtacaacagaagaacccggcaggatgagcctgccctgttcgtggccctgaccttcgagcggcgggaggtcctggactcctccaatatcaaaccaatgaacctgatcggcgtggcaagaggcgaaaacatccccgccgtgatcgccctgaccgaccccgagggctgcccactgagccggtttaaggatagcctgggaaacccaacccacatcctgagaatcggcgagagctataaggagaagcagcggaccatccaggccaagaaggaggtggagcagcggagagccggcggctacagccggaagtacgccagcaaagccaagaatctggcagacgatatggtgagaaacaccgctagagatctgctgtactacgccgtgacccaggatgccatgctgatcttcgccaacctgagccggggcttcggccggcagggcaagcggaccttcatggccgagagacagtacacacggatggaggactggctgaccgccaagctggcctacgagggcctgagcaagacctacctgtccaagacactggcccagtacacctccaagacatgcagcaactgtgggtttaccatcaccagcgccgactacgacagggtgctggagaagctgaagaagacagcaacaggctggatgaccacaattaacggcaaggagctgaaggtggagggccagattacctactacaacagatacaagagacagaacgtagtcaaggacctgtccgtcgagctggatagactgagcgaagaatctgtgaacaacgacatctcctcctggacaaagggcagaagcggagaagctctgagcctcctgaagaaaagattctcccatagacccgtgcaggagaagttcgtgtgcctgaactgcggcttcgagacacacgcagccgagcaagccgccctgaacatcgccagatcctggctgttcctgcggagccaggagtacaagaaataccagacaaacaagacaaccggcaacaccgataagagagccttcgtcgagacctggcagtccttttaccggaagaagcttaaggaggtgtggaaacctgccgtgcggtctggcggatctggcggaggctccgagatggagccccacagccacgccgtgccctgccagcccagcatgagcttcaaggacgtggccgtgaccttcacccaggaggagtggggccagctgaacctggcccagaggaggctgtacaggaacgtgaccctggagacctggagccacctggtgagcctgggcctgctgctgagcaagcccgacgtgatcagctggctggagcagggccaggacccctggagggccgagcagggcccccccggcggcccaagcagcggcgcccctcctcccagcggcggcagcccagccggctccccaacctctaccgaggagggcacctctgagtccgccacccccgagagcggccctggcacctccaccgagcccagcgagggcagcgcacccggcagccctgccggcagccccacctccacagaggagggaaccagcaccgagcccagcgaaggcagcgccccaggcaccagcaccgagcctagtgagcaggagattaaacggatcaacaagatcagaagaagacttgtgaaagacagcaacaccaagaaggccggcaagacaggccccatgaaaaccctgctggttagagtgatgacacccgatctgagagagcggctggaaaacctgagaaagaagcctgaaaatatcccccagcccatcagcaatacatctagagccaacctgaataagctgctgaccgattacaccgaaatgaagaaggcgatcctgcatgtgtactgggaagagttccagaaggaccctgtgggcctgatgagccgggtggcccagcctgccagcaagaagatcgatcagaacaagctgaaacctgagatggacgagaagggcaacctgaccaccgccggctttgcctgctctcagtgtggccagcccctgttcgtgtacaagctggagcaggtgtctgagaagggcaaggcttacaccaactacttcggacggtgcaatgtggccgagcacgaaaagctgatcctgctggcccagctgaagcccgagaaggatagcgacgaagccgtgacatatagcctgggaaagtttgggcagagggccctggatttctacagcattcatgtgaccaaggagtccacccaccccgtgaagcccctggcccagatcgccggaaacagatacgcctccggacctgtgggaaaggccctgagcgacgcatgtatgggcacaatcgcctccttcctgtctaagtaccaggacatcatcatcgaacaccagaaggtggtgaagggcaaccagaagagactggagagcctgcgggagctggccggcaaggaaaacctggaataccctagcgtgaccctgccacctcagcctcacaccaaggagggcgttgatgcctacaacgaagtgatcgcccgggtgcgaatgtgggtgaacctgaacctgtggcagaagctgaagctaagcagagatgatgccaagcctctgctgagactgaagggattcccttcctttcctctggtcgagagacaggccaacgaagtggactggtgggacatggtgtgtaacgtgaagaagctgatcaacgagaaaaaggaggatggcaaggtgttttggcagaatctggctggctacaagagacaggaagccctgagaccatacctgagcagcgaggaagatcggaagaagggaaagaaattcgctcggtaccagctgggcgacctgctgctgcacctggaaaagaagcacggcgaggactggggaaaggtgtacgacgaggcctgggagcggattgacaagaaagtggaaggcctgagcaagcacatcaagctggaagaggaacggagaagcgaggacgcccagagcaaggccgccctgaccgactggctgcgggctaaggccagcttcgtgatcgagggcctgaaggaggccgacaaggacgagttctgcagatgcgagctgaagctgcagaagtggtacggggacctgcggggaaagcccttcgccatcgaagccgagaacagcatcctggacatcagcggcttcagcaagcagtacaactgtgccttcatctggcagaaggacggcgtgaagaagctgaacctgtacctgatcatcaactacttcaagggcggcaagctgcggttcaagaagatcaaacctgaagccttcgaagccaacagattctacaccgtgatcaacaaaaagagcggcgagatcgtgcccatggaggtgaacttcaacttcgacgaccccaacctgatcatcctgcctctggcctttggcaagagacagggcagagaattcatctggaacgacctgctgtccctggaaaccggcagcctgaagctggccaacggaagagtgatcgagaagacactgtacaacagaagaacccggcaggatgagcctgccctgttcgtggccctgaccttcgagcggcgggaggtcctggactcctccaatatcaaaccaatgaacctgatcggcgtggcaagaggcgaaaacatccccgccgtgatcgccctgaccgaccccgagggctgcccactgagccggtttaaggatagcctgggaaacccaacccacatcctgagaatcggcgagagctataaggagaagcagcggaccatccaggccaagaaggaggtggagcagcggagagccggcggctacagccggaagtacgccagcaaagccaagaatctggcagacgatatggtgagaaacaccgctagagatctgctgtactacgccgtgacccaggatgccatgctgatcttcgccaacctgagccggggcttcggccggcagggcaagcggaccttcatggccgagagacagtacacacggatggaggactggctgaccgccaagctggcctacgagggcctgagcaagacctacctgtccaagacactggcccagtacacctccaagacatgcagcaactgtgggtttaccatcaccagcgccgactacgacagggtgctggagaagctgaagaagacagcaacaggctggatgaccacaattaacggcaaggagctgaaggtggagggccagattacctactacaacagatacaagagacagaacgtagtcaaggacctgtccgtcgagctggatagactgagcgaagaatctgtgaacaacgacatctcctcctggacaaagggcagaagcggagaagctctgagcctcctgaagaaaagattctcccatagacccgtgcaggagaagttcgtgtgcctgaactgcggcttcgagacacacgcagccgagcaagccgccctgaacatcgccagatcctggctgttcctgcggagccaggagtacaagaaataccagacaaacaagacaaccggcaacaccgataagagagccttcgtcgagacctggcagtccttttaccggaagaagcttaaggaggtgtggaaacctgccgtgcggtctggcggatctggcggaggctcctgagatggagccccacagccacgccgtgccctgccagcccagcatgagcttcaaggacgtggccgtgaccttcacccaggaggagtggggccagctgaacctggcccagaggaggctgtacaggaacgtgaccctggagacctggagccacctggtgagcctgggcctgctgctgagcaagcccgacgtgatcagctggctggagcagggccaggacccctggagggccgagcagggcccccccggatctggctccggcagcggccccaagaaaaagagaaaagtctaagctgccttctgcggggcttgccttctggccatgcccttcttctctcccttgcacctgtacctcttggtctttgaataaagcctgagtaggaaggctagcaaaaaaaaaaaaaaaaaaaaaaaaaaaaaaaaaaaaaaaaaaaaaaaaaaaaaaaaaaaaaaaaaaaaaaaaaaaaaaaa

SEQ ID NO: 16345 - RNA, 9485 nt, synthetic construct
  source 1..9485: mol_type = other RNA
aggaaataagagagaaaagaagagtaagaagaaatataagagccaccatggcccctaagaagaagcgtaaagtgagccggatggaacgcctcgtctacgaggtgcggcagaagtgcagaaacatcgaggacatctgcatctcctgcggatctctgaacgtgaccctggagcacccactgttcatcggcggcatgtgccagaactgtaaaaactgttttctggagtgtgcctatcaatacgacgatgacggctaccagagctactgcaccatctgttgcggcggaagagaggtgctgatgtgtggaaataacaactgctgccggtgcttctgcgtggaatgcgtggacctgctggtgggccccggcgccgcccaggccgctattaaggaagatccttggaactgctacatgtgcggccacaagggcacatacggcctgctgagacggagagaggactggcctagcagactgcagatgttcttcgccaataaccacgaccaggagttcgacccccctaaggtgtaccctcccgtccccgccgagaagagaaagcccatccgggtcctgagcctgttcgatggcatcgccaccggtctgctggtgctgaaggacctgggcatccaggtggataggtacattgcctccgaggtgtgcgaggactccatcaccgtgggaatggtgcgtcatcagggcaagatcatgtacgtgggcgacgtgcggagcgtgacacagaagcatatccaggagtggggccctttcgacctggtgatcggcggcagcccttgcaatgacctgagcatcgtgaacccagcccggaagggcctgtacgagggaaccggcagactgttcttcgagttttacagactgctgcacgacgcccggcctaaggaaggcgacgaccggcccttcttttggctgttcgagaatgtggtggccatgggagtcagcgacaagcgggatattagccggttcctggagagcaaccccgtgatgatcgatgccaaggaagtgagcgccgcccaccgggccagatacttctggggcaatctgcctggcatgaacagacccctggccagcaccgtgaacgacaagctggagctgcaggagtgcctggagcacggccggatcgccaagttcagcaaggtgagaaccatcaccacccgaagcaacagcatcaaacaaggcaaggaccagcactttcctgtgttcatgaacgagaaggaggacatcctgtggtgtaccgagatggagagagtgttcgggttcccagtccactacacagatgtcagcaacatgtctagactggccagacagagactgctgggaagaagctggtccgtccctgtgatcagacacctgttcgcccctctgaaggagtacttcgcctgcgtgagcagcggcaacagcaacgccaacagccggggccccagcttctctagcggcctggtgccactgtccctgagagggagccacatgggccccatggagatctacaaaaccgtgagcgcctggaagcggcagcctgtgcgcgtgctgagcctgtttcggaatatcgataaagtcctgaaaagcctgggattcctggagagcggctctggctccggcggtggcaccctgaagtacgtggaggatgtgacaaacgtggtcagacgggatgtggagaagtggggccccttcgatctggtgtacggcagcacccaacccctgggcagctcttgtgaccggtgccctggctggtacatgtttcagttccaccggatcctgcagtacgccctgccgagacaggagtcccagcggccattcttttggattttcatggacaacttgctgctgaccgaggatgaccaggaaactaccactcggttcctgcagaccgaagccgtgaccctgcaggacgtgagaggccgggactaccagaacgccatgcgggtgtggtccaacatccctggactgaaaagcaagcacgcacctctgacccctaaagaagaggagtacctgcaggcccaggtgcggagcagaagcaagctggacgcccctaaggtggatctgctggtgaagaattgcctcctgcccctgagagagtacttcaagtatttcagccagaatagtctgcccctgggaggcagcggcggcggcgccctggtgacatttgaggacgtcgccgtgcggttcacccaggaggaatgggctctgctggatccttctcagaaaatcctgtaccgggacgtgatgagagagacataccggaatctgacctccgtgggcatcaactgggaatgttgggaccttgaagcctgcttcagaagcctgggaagaaacctgagagtgcaggtggtgaagagaaagtgcgagctgaccaacagcggcccctgcgccgagggcggcccaagcagcggcgcccctcctcccagcggcggcagcccagccggctccccaacctctaccgaggagggcacctctgagtccgccacccccgagagcggccctggcacctccaccgagcccagcgagggcagcgcacccggcagccctgccggcagccccacctccacagaggagggaaccagcaccgagcccagcgaaggcagcgccccaggcaccagcaccgagcctagtgagcaggagattaaacggatcaacaagatcagaagaagacttgtgaaagacagcaacaccaagaaggccggcaagacaggccccatgaaaaccctgctggttagagtgatgacacccgatctgagagagcggctggaaaacctgagaaagaagcctgaaaatatcccccagcccatcagcaatacatctagagccaacctgaataagctgctgaccgattacaccgaaatgaagaaggcgatcctgcatgtgtactgggaagagttccagaaggaccctgtgggcctgatgagccgggtggcccagcctgccagcaagaagatcgatcagaacaagctgaaacctgagatggacgagaagggcaacctgaccaccgccggctttgcctgctctcagtgtggccagcccctgttcgtgtacaagctggagcaggtgtctgagaagggcaaggcttacaccaactacttcggacggtgcaatgtggccgagcacgaaaagctgatcctgctggcccagctgaagcccgagaaggatagcgacgaagccgtgacatatagcctgggaaagtttgggcagagggccctggatttctacagcattcatgtgaccaaggagtccacccaccccgtgaagcccctggcccagatcgccggaaacagatacgcctccggacctgtgggaaaggccctgagcgacgcatgtatgggcacaatcgcctccttcctgtctaagtaccaggacatcatcatcgaacaccagaaggtggtgaagggcaaccagaagagactggagagcctgcgggagctggccggcaaggaaaacctggaataccctagcgtgaccctgccacctcagcctcacaccaaggagggcgttgatgcctacaacgaagtgatcgcccgggtgcgaatgtgggtgaacctgaacctgtggcagaagctgaagctaagcagagatgatgccaagcctctgctgagactgaagggattcccttcctttcctctggtcgagagacaggccaacgaagtggactggtgggacatggtgtgtaacgtgaagaagctgatcaacgagaaaaaggaggatggcaaggtgttttggcagaatctggctggctacaagagacaggaagccctgagaccatacctgagcagcgaggaagatcggaagaagggaaagaaattcgctcggtaccagctgggcgacctgctgctgcacctggaaaagaagcacggcgaggactggggaaaggtgtacgacgaggcctgggagcggattgacaagaaagtggaaggcctgagcaagcacatcaagctggaagaggaacggagaagcgaggacgcccagagcaaggccgccctgaccgactggctgcgggctaaggccagcttcgtgatcgagggcctgaaggaggccgacaaggacgagttctgcagatgcgagctgaagctgcagaagtggtacggggacctgcggggaaagcccttcgccatcgaagccgagaacagcatcctggacatcagcggcttcagcaagcagtacaactgtgccttcatctggcagaaggacggcgtgaagaagctgaacctgtacctgatcatcaactacttcaagggcggcaagctgcggttcaagaagatcaaacctgaagccttcgaagccaacagattctacaccgtgatcaacaaaaagagcggcgagatcgtgcccatggaggtgaacttcaacttcgacgaccccaacctgatcatcctgcctctggcctttggcaagagacagggcagagaattcatctggaacgacctgctgtccctggaaaccggcagcctgaagctggccaacggaagagtgatcgagaagacactgtacaacagaagaacccggcaggatgagcctgccctgttcgtggccctgaccttcgagcggcgggaggtcctggactcctccaatatcaaaccaatgaacctgatcggcgtggcaagaggcgaaaacatccccgccgtgatcgccctgaccgaccccgagggctgcccactgagccggtttaaggatagcctgggaaacccaacccacatcctgagaatcggcgagagctataaggagaagcagcggaccatccaggccaagaaggaggtggagcagcggagagccggcggctacagccggaagtacgccagcaaagccaagaatctggcagacgatatggtgagaaacaccgctagagatctgctgtactacgccgtgacccaggatgccatgctgatcttcgccaacctgagccggggcttcggccggcagggcaagcggaccttcatggccgagagacagtacacacggatggaggactggctgaccgccaagctggcctacgagggcctgagcaagacctacctgtccaagacactggcccagtacacctccaagacatgcagcaactgtgggtttaccatcaccagcgccgactacgacagggtgctggagaagctgaagaagacagcaacaggctggatgaccacaattaacggcaaggagctgaaggtggagggccagattacctactacaacagatacaagagacagaacgtagtcaaggacctgtccgtcgagctggatagactgagcgaagaatctgtgaacaacgacatctcctcctggacaaagggcagaagcggagaagctctgagcctcctgaagaaaagattctcccatagacccgtgcaggagaagttcgtgtgcctgaactgcggcttcgagacacacgcagccgagcaagccgccctgaacatcgccagatcctggctgttcctgcggagccaggagtacaagaaataccagacaaacaagacaaccggcaacaccgataagagagccttcgtcgagacctggcagtccttttaccggaagaagcttaaggaggtgtggaaacctgccgtgcggtctggcggatctggcggaggctcccaccaggaggtggtgaccttcgaggacgtggccgtgtacttcacccagaccgagtgggccggcctgagccccgcccagagggccctgtacaggagcgtgatgctggagatctacggcaacctgaccagcctgggctaccccgtgcccaagcccgccctggtgagcctgctggagaggggcgagctgccctggggcctggagaccagggacgacccccccgcccagggcaccaaggacatctgcggcggcccaagcagcggcgcccctcctcccagcggcggcagcccagccggctccccaacctctaccgaggagggcacctctgagtccgccacccccgagagcggccctggcacctccaccgagcccagcgagggcagcgcacccggcagccctgccggcagccccacctccacagaggagggaaccagcaccgagcccagcgaaggcagcgccccaggcaccagcaccgagcctagtgagcaggagattaaacggatcaacaagatcagaagaagacttgtgaaagacagcaacaccaagaaggccggcaagacaggccccatgaaaaccctgctggttagagtgatgacacccgatctgagagagcggctggaaaacctgagaaagaagcctgaaaatatcccccagcccatcagcaatacatctagagccaacctgaataagctgctgaccgattacaccgaaatgaagaaggcgatcctgcatgtgtactgggaagagttccagaaggaccctgtgggcctgatgagccgggtggcccagcctgccagcaagaagatcgatcagaacaagctgaaacctgagatggacgagaagggcaacctgaccaccgccggctttgcctgctctcagtgtggccagcccctgttcgtgtacaagctggagcaggtgtctgagaagggcaaggcttacaccaactacttcggacggtgcaatgtggccgagcacgaaaagctgatcctgctggcccagctgaagcccgagaaggatagcgacgaagccgtgacatatagcctgggaaagtttgggcagagggccctggatttctacagcattcatgtgaccaaggagtccacccaccccgtgaagcccctggcccagatcgccggaaacagatacgcctccggacctgtgggaaaggccctgagcgacgcatgtatgggcacaatcgcctccttcctgtctaagtaccaggacatcatcatcgaacaccagaaggtggtgaagggcaaccagaagagactggagagcctgcgggagctggccggcaaggaaaacctggaataccctagcgtgaccctgccacctcagcctcacaccaaggagggcgttgatgcctacaacgaagtgatcgcccgggtgcgaatgtgggtgaacctgaacctgtggcagaagctgaagctaagcagagatgatgccaagcctctgctgagactgaagggattcccttcctttcctctggtcgagagacaggccaacgaagtggactggtgggacatggtgtgtaacgtgaagaagctgatcaacgagaaaaaggaggatggcaaggtgttttggcagaatctggctggctacaagagacaggaagccctgagaccatacctgagcagcgaggaagatcggaagaagggaaagaaattcgctcggtaccagctgggcgacctgctgctgcacctggaaaagaagcacggcgaggactggggaaaggtgtacgacgaggcctgggagcggattgacaagaaagtggaaggcctgagcaagcacatcaagctggaagaggaacggagaagcgaggacgcccagagcaaggccgccctgaccgactggctgcgggctaaggccagcttcgtgatcgagggcctgaaggaggccgacaaggacgagttctgcagatgcgagctgaagctgcagaagtggtacggggacctgcggggaaagcccttcgccatcgaagccgagaacagcatcctggacatcagcggcttcagcaagcagtacaactgtgccttcatctggcagaaggacggcgtgaagaagctgaacctgtacctgatcatcaactacttcaagggcggcaagctgcggttcaagaagatcaaacctgaagccttcgaagccaacagattctacaccgtgatcaacaaaaagagcggcgagatcgtgcccatggaggtgaacttcaacttcgacgaccccaacctgatcatcctgcctctggcctttggcaagagacagggcagagaattcatctggaacgacctgctgtccctggaaaccggcagcctgaagctggccaacggaagagtgatcgagaagacactgtacaacagaagaacccggcaggatgagcctgccctgttcgtggccctgaccttcgagcggcgggaggtcctggactcctccaatatcaaaccaatgaacctgatcggcgtggcaagaggcgaaaacatccccgccgtgatcgccctgaccgaccccgagggctgcccactgagccggtttaaggatagcctgggaaacccaacccacatcctgagaatcggcgagagctataaggagaagcagcggaccatccaggccaagaaggaggtggagcagcggagagccggcggctacagccggaagtacgccagcaaagccaagaatctggcagacgatatggtgagaaacaccgctagagatctgctgtactacgccgtgacccaggatgccatgctgatcttcgccaacctgagccggggcttcggccggcagggcaagcggaccttcatggccgagagacagtacacacggatggaggactggctgaccgccaagctggcctacgagggcctgagcaagacctacctgtccaagacactggcccagtacacctccaagacatgcagcaactgtgggtttaccatcaccagcgccgactacgacagggtgctggagaagctgaagaagacagcaacaggctggatgaccacaattaacggcaaggagctgaaggtggagggccagattacctactacaacagatacaagagacagaacgtagtcaaggacctgtccgtcgagctggatagactgagcgaagaatctgtgaacaacgacatctcctcctggacaaagggcagaagcggagaagctctgagcctcctgaagaaaagattctcccatagacccgtgcaggagaagttcgtgtgcctgaactgcggcttcgagacacacgcagccgagcaagccgccctgaacatcgccagatcctggctgttcctgcggagccaggagtacaagaaataccagacaaacaagacaaccggcaacaccgataagagagccttcgtcgagacctggcagtccttttaccggaagaagcttaaggaggtgtggaaacctgccgtgcggtctggcggatctggcggaggctcctcaccaggaggtggtgaccttcgaggacgtggccgtgtacttcacccagaccgagtgggccggcctgagccccgcccagagggccctgtacaggagcgtgatgctggagatctacggcaacctgaccagcctgggctaccccgtgcccaagcccgccctggtgagcctgctggagaggggcgagctgccctggggcctggagaccagggacgacccccccgcccagggcaccaaggacatctgcggatctggctccggcagcggccccaagaaaaagagaaaagtctaagctgccttctgcggggcttgccttctggccatgcccttcttctctcccttgcacctgtacctcttggtctttgaataaagcctgagtaggaaggctagcaaaaaaaaaaaaaaaaaaaaaaaaaaaaaaaaaaaaaaaaaaaaaaaaaaaaaaaaaaaaaaaaaaaaaaaaaaaaaaaa

SEQ ID NO: 16346 - RNA, 9485 nt, synthetic construct
  source 1..9485: mol_type = other RNA
aggaaataagagagaaaagaagagtaagaagaaatataagagccaccatggcccctaagaagaagcgtaaagtgagccggatggaacgcctcgtctacgaggtgcggcagaagtgcagaaacatcgaggacatctgcatctcctgcggatctctgaacgtgaccctggagcacccactgttcatcggcggcatgtgccagaactgtaaaaactgttttctggagtgtgcctatcaatacgacgatgacggctaccagagctactgcaccatctgttgcggcggaagagaggtgctgatgtgtggaaataacaactgctgccggtgcttctgcgtggaatgcgtggacctgctggtgggccccggcgccgcccaggccgctattaaggaagatccttggaactgctacatgtgcggccacaagggcacatacggcctgctgagacggagagaggactggcctagcagactgcagatgttcttcgccaataaccacgaccaggagttcgacccccctaaggtgtaccctcccgtccccgccgagaagagaaagcccatccgggtcctgagcctgttcgatggcatcgccaccggtctgctggtgctgaaggacctgggcatccaggtggataggtacattgcctccgaggtgtgcgaggactccatcaccgtgggaatggtgcgtcatcagggcaagatcatgtacgtgggcgacgtgcggagcgtgacacagaagcatatccaggagtggggccctttcgacctggtgatcggcggcagcccttgcaatgacctgagcatcgtgaacccagcccggaagggcctgtacgagggaaccggcagactgttcttcgagttttacagactgctgcacgacgcccggcctaaggaaggcgacgaccggcccttcttttggctgttcgagaatgtggtggccatgggagtcagcgacaagcgggatattagccggttcctggagagcaaccccgtgatgatcgatgccaaggaagtgagcgccgcccaccgggccagatacttctggggcaatctgcctggcatgaacagacccctggccagcaccgtgaacgacaagctggagctgcaggagtgcctggagcacggccggatcgccaagttcagcaaggtgagaaccatcaccacccgaagcaacagcatcaaacaaggcaaggaccagcactttcctgtgttcatgaacgagaaggaggacatcctgtggtgtaccgagatggagagagtgttcgggttcccagtccactacacagatgtcagcaacatgtctagactggccagacagagactgctgggaagaagctggtccgtccctgtgatcagacacctgttcgcccctctgaaggagtacttcgcctgcgtgagcagcggcaacagcaacgccaacagccggggccccagcttctctagcggcctggtgccactgtccctgagagggagccacatgggccccatggagatctacaaaaccgtgagcgcctggaagcggcagcctgtgcgcgtgctgagcctgtttcggaatatcgataaagtcctgaaaagcctgggattcctggagagcggctctggctccggcggtggcaccctgaagtacgtggaggatgtgacaaacgtggtcagacgggatgtggagaagtggggccccttcgatctggtgtacggcagcacccaacccctgggcagctcttgtgaccggtgccctggctggtacatgtttcagttccaccggatcctgcagtacgccctgccgagacaggagtcccagcggccattcttttggattttcatggacaacttgctgctgaccgaggatgaccaggaaactaccactcggttcctgcagaccgaagccgtgaccctgcaggacgtgagaggccgggactaccagaacgccatgcgggtgtggtccaacatccctggactgaaaagcaagcacgcacctctgacccctaaagaagaggagtacctgcaggcccaggtgcggagcagaagcaagctggacgcccctaaggtggatctgctggtgaagaattgcctcctgcccctgagagagtacttcaagtatttcagccagaatagtctgcccctgggaggcagcggcggcggcgccctggtgacatttgaggacgtcgccgtgcggttcacccaggaggaatgggctctgctggatccttctcagaaaatcctgtaccgggacgtgatgagagagacataccggaatctgacctccgtgggcatcaactgggaatgttgggaccttgaagcctgcttcagaagcctgggaagaaacctgagagtgcaggtggtgaagagaaagtgcgagctgaccaacagcggcccctgcgccgagggcggcccaagcagcggcgcccctcctcccagcggcggcagcccagccggctccccaacctctaccgaggagggcacctctgagtccgccacccccgagagcggccctggcacctccaccgagcccagcgagggcagcgcacccggcagccctgccggcagccccacctccacagaggagggaaccagcaccgagcccagcgaaggcagcgccccaggcaccagcaccgagcctagtgagcaggagattaaacggatcaacaagatcagaagaagacttgtgaaagacagcaacaccaagaaggccggcaagacaggccccatgaaaaccctgctggttagagtgatgacacccgatctgagagagcggctggaaaacctgagaaagaagcctgaaaatatcccccagcccatcagcaatacatctagagccaacctgaataagctgctgaccgattacaccgaaatgaagaaggcgatcctgcatgtgtactgggaagagttccagaaggaccctgtgggcctgatgagccgggtggcccagcctgccagcaagaagatcgatcagaacaagctgaaacctgagatggacgagaagggcaacctgaccaccgccggctttgcctgctctcagtgtggccagcccctgttcgtgtacaagctggagcaggtgtctgagaagggcaaggcttacaccaactacttcggacggtgcaatgtggccgagcacgaaaagctgatcctgctggcccagctgaagcccgagaaggatagcgacgaagccgtgacatatagcctgggaaagtttgggcagagggccctggatttctacagcattcatgtgaccaaggagtccacccaccccgtgaagcccctggcccagatcgccggaaacagatacgcctccggacctgtgggaaaggccctgagcgacgcatgtatgggcacaatcgcctccttcctgtctaagtaccaggacatcatcatcgaacaccagaaggtggtgaagggcaaccagaagagactggagagcctgcgggagctggccggcaaggaaaacctggaataccctagcgtgaccctgccacctcagcctcacaccaaggagggcgttgatgcctacaacgaagtgatcgcccgggtgcgaatgtgggtgaacctgaacctgtggcagaagctgaagctaagcagagatgatgccaagcctctgctgagactgaagggattcccttcctttcctctggtcgagagacaggccaacgaagtggactggtgggacatggtgtgtaacgtgaagaagctgatcaacgagaaaaaggaggatggcaaggtgttttggcagaatctggctggctacaagagacaggaagccctgagaccatacctgagcagcgaggaagatcggaagaagggaaagaaattcgctcggtaccagctgggcgacctgctgctgcacctggaaaagaagcacggcgaggactggggaaaggtgtacgacgaggcctgggagcggattgacaagaaagtggaaggcctgagcaagcacatcaagctggaagaggaacggagaagcgaggacgcccagagcaaggccgccctgaccgactggctgcgggctaaggccagcttcgtgatcgagggcctgaaggaggccgacaaggacgagttctgcagatgcgagctgaagctgcagaagtggtacggggacctgcggggaaagcccttcgccatcgaagccgagaacagcatcctggacatcagcggcttcagcaagcagtacaactgtgccttcatctggcagaaggacggcgtgaagaagctgaacctgtacctgatcatcaactacttcaagggcggcaagctgcggttcaagaagatcaaacctgaagccttcgaagccaacagattctacaccgtgatcaacaaaaagagcggcgagatcgtgcccatggaggtgaacttcaacttcgacgaccccaacctgatcatcctgcctctggcctttggcaagagacagggcagagaattcatctggaacgacctgctgtccctggaaaccggcagcctgaagctggccaacggaagagtgatcgagaagacactgtacaacagaagaacccggcaggatgagcctgccctgttcgtggccctgaccttcgagcggcgggaggtcctggactcctccaatatcaaaccaatgaacctgatcggcgtggcaagaggcgaaaacatccccgccgtgatcgccctgaccgaccccgagggctgcccactgagccggtttaaggatagcctgggaaacccaacccacatcctgagaatcggcgagagctataaggagaagcagcggaccatccaggccaagaaggaggtggagcagcggagagccggcggctacagccggaagtacgccagcaaagccaagaatctggcagacgatatggtgagaaacaccgctagagatctgctgtactacgccgtgacccaggatgccatgctgatcttcgccaacctgagccggggcttcggccggcagggcaagcggaccttcatggccgagagacagtacacacggatggaggactggctgaccgccaagctggcctacgagggcctgagcaagacctacctgtccaagacactggcccagtacacctccaagacatgcagcaactgtgggtttaccatcaccagcgccgactacgacagggtgctggagaagctgaagaagacagcaacaggctggatgaccacaattaacggcaaggagctgaaggtggagggccagattacctactacaacagatacaagagacagaacgtagtcaaggacctgtccgtcgagctggatagactgagcgaagaatctgtgaacaacgacatctcctcctggacaaagggcagaagcggagaagctctgagcctcctgaagaaaagattctcccatagacccgtgcaggagaagttcgtgtgcctgaactgcggcttcgagacacacgcagccgagcaagccgccctgaacatcgccagatcctggctgttcctgcggagccaggagtacaagaaataccagacaaacaagacaaccggcaacaccgataagagagccttcgtcgagacctggcagtccttttaccggaagaagcttaaggaggtgtggaaacctgccgtgcggtctggcggatctggcggaggctccatggccaccgccctgaccgaccccgcccaggtgagcgtgaccttcgacgacgtggccgtgaccttcacccaggaggagtggggccagctggacctggcccagaggaccctgtaccaggaggtgatgctggagaactgcggcctgctggtgagcctgggctgccccgtgcccaggcccgagctgatctaccacctggagcacggccaggagccctggaccaggaaggaggacctgagccagggcggcggcccaagcagcggcgcccctcctcccagcggcggcagcccagccggctccccaacctctaccgaggagggcacctctgagtccgccacccccgagagcggccctggcacctccaccgagcccagcgagggcagcgcacccggcagccctgccggcagccccacctccacagaggagggaaccagcaccgagcccagcgaaggcagcgccccaggcaccagcaccgagcctagtgagcaggagattaaacggatcaacaagatcagaagaagacttgtgaaagacagcaacaccaagaaggccggcaagacaggccccatgaaaaccctgctggttagagtgatgacacccgatctgagagagcggctggaaaacctgagaaagaagcctgaaaatatcccccagcccatcagcaatacatctagagccaacctgaataagctgctgaccgattacaccgaaatgaagaaggcgatcctgcatgtgtactgggaagagttccagaaggaccctgtgggcctgatgagccgggtggcccagcctgccagcaagaagatcgatcagaacaagctgaaacctgagatggacgagaagggcaacctgaccaccgccggctttgcctgctctcagtgtggccagcccctgttcgtgtacaagctggagcaggtgtctgagaagggcaaggcttacaccaactacttcggacggtgcaatgtggccgagcacgaaaagctgatcctgctggcccagctgaagcccgagaaggatagcgacgaagccgtgacatatagcctgggaaagtttgggcagagggccctggatttctacagcattcatgtgaccaaggagtccacccaccccgtgaagcccctggcccagatcgccggaaacagatacgcctccggacctgtgggaaaggccctgagcgacgcatgtatgggcacaatcgcctccttcctgtctaagtaccaggacatcatcatcgaacaccagaaggtggtgaagggcaaccagaagagactggagagcctgcgggagctggccggcaaggaaaacctggaataccctagcgtgaccctgccacctcagcctcacaccaaggagggcgttgatgcctacaacgaagtgatcgcccgggtgcgaatgtgggtgaacctgaacctgtggcagaagctgaagctaagcagagatgatgccaagcctctgctgagactgaagggattcccttcctttcctctggtcgagagacaggccaacgaagtggactggtgggacatggtgtgtaacgtgaagaagctgatcaacgagaaaaaggaggatggcaaggtgttttggcagaatctggctggctacaagagacaggaagccctgagaccatacctgagcagcgaggaagatcggaagaagggaaagaaattcgctcggtaccagctgggcgacctgctgctgcacctggaaaagaagcacggcgaggactggggaaaggtgtacgacgaggcctgggagcggattgacaagaaagtggaaggcctgagcaagcacatcaagctggaagaggaacggagaagcgaggacgcccagagcaaggccgccctgaccgactggctgcgggctaaggccagcttcgtgatcgagggcctgaaggaggccgacaaggacgagttctgcagatgcgagctgaagctgcagaagtggtacggggacctgcggggaaagcccttcgccatcgaagccgagaacagcatcctggacatcagcggcttcagcaagcagtacaactgtgccttcatctggcagaaggacggcgtgaagaagctgaacctgtacctgatcatcaactacttcaagggcggcaagctgcggttcaagaagatcaaacctgaagccttcgaagccaacagattctacaccgtgatcaacaaaaagagcggcgagatcgtgcccatggaggtgaacttcaacttcgacgaccccaacctgatcatcctgcctctggcctttggcaagagacagggcagagaattcatctggaacgacctgctgtccctggaaaccggcagcctgaagctggccaacggaagagtgatcgagaagacactgtacaacagaagaacccggcaggatgagcctgccctgttcgtggccctgaccttcgagcggcgggaggtcctggactcctccaatatcaaaccaatgaacctgatcggcgtggcaagaggcgaaaacatccccgccgtgatcgccctgaccgaccccgagggctgcccactgagccggtttaaggatagcctgggaaacccaacccacatcctgagaatcggcgagagctataaggagaagcagcggaccatccaggccaagaaggaggtggagcagcggagagccggcggctacagccggaagtacgccagcaaagccaagaatctggcagacgatatggtgagaaacaccgctagagatctgctgtactacgccgtgacccaggatgccatgctgatcttcgccaacctgagccggggcttcggccggcagggcaagcggaccttcatggccgagagacagtacacacggatggaggactggctgaccgccaagctggcctacgagggcctgagcaagacctacctgtccaagacactggcccagtacacctccaagacatgcagcaactgtgggtttaccatcaccagcgccgactacgacagggtgctggagaagctgaagaagacagcaacaggctggatgaccacaattaacggcaaggagctgaaggtggagggccagattacctactacaacagatacaagagacagaacgtagtcaaggacctgtccgtcgagctggatagactgagcgaagaatctgtgaacaacgacatctcctcctggacaaagggcagaagcggagaagctctgagcctcctgaagaaaagattctcccatagacccgtgcaggagaagttcgtgtgcctgaactgcggcttcgagacacacgcagccgagcaagccgccctgaacatcgccagatcctggctgttcctgcggagccaggagtacaagaaataccagacaaacaagacaaccggcaacaccgataagagagccttcgtcgagacctggcagtccttttaccggaagaagcttaaggaggtgtggaaacctgccgtgcggtctggcggatctggcggaggctcctatggccaccgccctgaccgaccccgcccaggtgagcgtgaccttcgacgacgtggccgtgaccttcacccaggaggagtggggccagctggacctggcccagaggaccctgtaccaggaggtgatgctggagaactgcggcctgctggtgagcctgggctgccccgtgcccaggcccgagctgatctaccacctggagcacggccaggagccctggaccaggaaggaggacctgagccagggcggatctggctccggcagcggccccaagaaaaagagaaaagtctaagctgccttctgcggggcttgccttctggccatgcccttcttctctcccttgcacctgtacctcttggtctttgaataaagcctgagtaggaaggctagcaaaaaaaaaaaaaaaaaaaaaaaaaaaaaaaaaaaaaaaaaaaaaaaaaaaaaaaaaaaaaaaaaaaaaaaaaaaaaaaa

SEQ ID NO: 16347 - RNA, 9479 nt, synthetic construct
  source 1..9479: mol_type = other RNA
aggaaataagagagaaaagaagagtaagaagaaatataagagccaccatggcccctaagaagaagcgtaaagtgagccggatggaacgcctcgtctacgaggtgcggcagaagtgcagaaacatcgaggacatctgcatctcctgcggatctctgaacgtgaccctggagcacccactgttcatcggcggcatgtgccagaactgtaaaaactgttttctggagtgtgcctatcaatacgacgatgacggctaccagagctactgcaccatctgttgcggcggaagagaggtgctgatgtgtggaaataacaactgctgccggtgcttctgcgtggaatgcgtggacctgctggtgggccccggcgccgcccaggccgctattaaggaagatccttggaactgctacatgtgcggccacaagggcacatacggcctgctgagacggagagaggactggcctagcagactgcagatgttcttcgccaataaccacgaccaggagttcgacccccctaaggtgtaccctcccgtccccgccgagaagagaaagcccatccgggtcctgagcctgttcgatggcatcgccaccggtctgctggtgctgaaggacctgggcatccaggtggataggtacattgcctccgaggtgtgcgaggactccatcaccgtgggaatggtgcgtcatcagggcaagatcatgtacgtgggcgacgtgcggagcgtgacacagaagcatatccaggagtggggccctttcgacctggtgatcggcggcagcccttgcaatgacctgagcatcgtgaacccagcccggaagggcctgtacgagggaaccggcagactgttcttcgagttttacagactgctgcacgacgcccggcctaaggaaggcgacgaccggcccttcttttggctgttcgagaatgtggtggccatgggagtcagcgacaagcgggatattagccggttcctggagagcaaccccgtgatgatcgatgccaaggaagtgagcgccgcccaccgggccagatacttctggggcaatctgcctggcatgaacagacccctggccagcaccgtgaacgacaagctggagctgcaggagtgcctggagcacggccggatcgccaagttcagcaaggtgagaaccatcaccacccgaagcaacagcatcaaacaaggcaaggaccagcactttcctgtgttcatgaacgagaaggaggacatcctgtggtgtaccgagatggagagagtgttcgggttcccagtccactacacagatgtcagcaacatgtctagactggccagacagagactgctgggaagaagctggtccgtccctgtgatcagacacctgttcgcccctctgaaggagtacttcgcctgcgtgagcagcggcaacagcaacgccaacagccggggccccagcttctctagcggcctggtgccactgtccctgagagggagccacatgggccccatggagatctacaaaaccgtgagcgcctggaagcggcagcctgtgcgcgtgctgagcctgtttcggaatatcgataaagtcctgaaaagcctgggattcctggagagcggctctggctccggcggtggcaccctgaagtacgtggaggatgtgacaaacgtggtcagacgggatgtggagaagtggggccccttcgatctggtgtacggcagcacccaacccctgggcagctcttgtgaccggtgccctggctggtacatgtttcagttccaccggatcctgcagtacgccctgccgagacaggagtcccagcggccattcttttggattttcatggacaacttgctgctgaccgaggatgaccaggaaactaccactcggttcctgcagaccgaagccgtgaccctgcaggacgtgagaggccgggactaccagaacgccatgcgggtgtggtccaacatccctggactgaaaagcaagcacgcacctctgacccctaaagaagaggagtacctgcaggcccaggtgcggagcagaagcaagctggacgcccctaaggtggatctgctggtgaagaattgcctcctgcccctgagagagtacttcaagtatttcagccagaatagtctgcccctgggaggcagcggcggcggcgccctggtgacatttgaggacgtcgccgtgcggttcacccaggaggaatgggctctgctggatccttctcagaaaatcctgtaccgggacgtgatgagagagacataccggaatctgacctccgtgggcatcaactgggaatgttgggaccttgaagcctgcttcagaagcctgggaagaaacctgagagtgcaggtggtgaagagaaagtgcgagctgaccaacagcggcccctgcgccgagggcggcccaagcagcggcgcccctcctcccagcggcggcagcccagccggctccccaacctctaccgaggagggcacctctgagtccgccacccccgagagcggccctggcacctccaccgagcccagcgagggcagcgcacccggcagccctgccggcagccccacctccacagaggagggaaccagcaccgagcccagcgaaggcagcgccccaggcaccagcaccgagcctagtgagcaggagattaaacggatcaacaagatcagaagaagacttgtgaaagacagcaacaccaagaaggccggcaagacaggccccatgaaaaccctgctggttagagtgatgacacccgatctgagagagcggctggaaaacctgagaaagaagcctgaaaatatcccccagcccatcagcaatacatctagagccaacctgaataagctgctgaccgattacaccgaaatgaagaaggcgatcctgcatgtgtactgggaagagttccagaaggaccctgtgggcctgatgagccgggtggcccagcctgccagcaagaagatcgatcagaacaagctgaaacctgagatggacgagaagggcaacctgaccaccgccggctttgcctgctctcagtgtggccagcccctgttcgtgtacaagctggagcaggtgtctgagaagggcaaggcttacaccaactacttcggacggtgcaatgtggccgagcacgaaaagctgatcctgctggcccagctgaagcccgagaaggatagcgacgaagccgtgacatatagcctgggaaagtttgggcagagggccctggatttctacagcattcatgtgaccaaggagtccacccaccccgtgaagcccctggcccagatcgccggaaacagatacgcctccggacctgtgggaaaggccctgagcgacgcatgtatgggcacaatcgcctccttcctgtctaagtaccaggacatcatcatcgaacaccagaaggtggtgaagggcaaccagaagagactggagagcctgcgggagctggccggcaaggaaaacctggaataccctagcgtgaccctgccacctcagcctcacaccaaggagggcgttgatgcctacaacgaagtgatcgcccgggtgcgaatgtgggtgaacctgaacctgtggcagaagctgaagctaagcagagatgatgccaagcctctgctgagactgaagggattcccttcctttcctctggtcgagagacaggccaacgaagtggactggtgggacatggtgtgtaacgtgaagaagctgatcaacgagaaaaaggaggatggcaaggtgttttggcagaatctggctggctacaagagacaggaagccctgagaccatacctgagcagcgaggaagatcggaagaagggaaagaaattcgctcggtaccagctgggcgacctgctgctgcacctggaaaagaagcacggcgaggactggggaaaggtgtacgacgaggcctgggagcggattgacaagaaagtggaaggcctgagcaagcacatcaagctggaagaggaacggagaagcgaggacgcccagagcaaggccgccctgaccgactggctgcgggctaaggccagcttcgtgatcgagggcctgaaggaggccgacaaggacgagttctgcagatgcgagctgaagctgcagaagtggtacggggacctgcggggaaagcccttcgccatcgaagccgagaacagcatcctggacatcagcggcttcagcaagcagtacaactgtgccttcatctggcagaaggacggcgtgaagaagctgaacctgtacctgatcatcaactacttcaagggcggcaagctgcggttcaagaagatcaaacctgaagccttcgaagccaacagattctacaccgtgatcaacaaaaagagcggcgagatcgtgcccatggaggtgaacttcaacttcgacgaccccaacctgatcatcctgcctctggcctttggcaagagacagggcagagaattcatctggaacgacctgctgtccctggaaaccggcagcctgaagctggccaacggaagagtgatcgagaagacactgtacaacagaagaacccggcaggatgagcctgccctgttcgtggccctgaccttcgagcggcgggaggtcctggactcctccaatatcaaaccaatgaacctgatcggcgtggcaagaggcgaaaacatccccgccgtgatcgccctgaccgaccccgagggctgcccactgagccggtttaaggatagcctgggaaacccaacccacatcctgagaatcggcgagagctataaggagaagcagcggaccatccaggccaagaaggaggtggagcagcggagagccggcggctacagccggaagtacgccagcaaagccaagaatctggcagacgatatggtgagaaacaccgctagagatctgctgtactacgccgtgacccaggatgccatgctgatcttcgccaacctgagccggggcttcggccggcagggcaagcggaccttcatggccgagagacagtacacacggatggaggactggctgaccgccaagctggcctacgagggcctgagcaagacctacctgtccaagacactggcccagtacacctccaagacatgcagcaactgtgggtttaccatcaccagcgccgactacgacagggtgctggagaagctgaagaagacagcaacaggctggatgaccacaattaacggcaaggagctgaaggtggagggccagattacctactacaacagatacaagagacagaacgtagtcaaggacctgtccgtcgagctggatagactgagcgaagaatctgtgaacaacgacatctcctcctggacaaagggcagaagcggagaagctctgagcctcctgaagaaaagattctcccatagacccgtgcaggagaagttcgtgtgcctgaactgcggcttcgagacacacgcagccgagcaagccgccctgaacatcgccagatcctggctgttcctgcggagccaggagtacaagaaataccagacaaacaagacaaccggcaacaccgataagagagccttcgtcgagacctggcagtccttttaccggaagaagcttaaggaggtgtggaaacctgccgtgcggtctggcggatctggcggaggctccggcagcctggaggagggcagaagagccaccggcctgcccgccgcccaggtgcaggagcccgtgaccttcaaggacgtggccgtggacttcacccaggaggagtggggccagctggacctggtgcagagaaccctgtacagagacgtgatgctggagacctacggccacctgctgagcgtgggcaaccagatcgccaagcccgaggtgatcagcctgctggagcagggcgaggagccctggggcggcccaagcagcggcgcccctcctcccagcggcggcagcccagccggctccccaacctctaccgaggagggcacctctgagtccgccacccccgagagcggccctggcacctccaccgagcccagcgagggcagcgcacccggcagccctgccggcagccccacctccacagaggagggaaccagcaccgagcccagcgaaggcagcgccccaggcaccagcaccgagcctagtgagcaggagattaaacggatcaacaagatcagaagaagacttgtgaaagacagcaacaccaagaaggccggcaagacaggccccatgaaaaccctgctggttagagtgatgacacccgatctgagagagcggctggaaaacctgagaaagaagcctgaaaatatcccccagcccatcagcaatacatctagagccaacctgaataagctgctgaccgattacaccgaaatgaagaaggcgatcctgcatgtgtactgggaagagttccagaaggaccctgtgggcctgatgagccgggtggcccagcctgccagcaagaagatcgatcagaacaagctgaaacctgagatggacgagaagggcaacctgaccaccgccggctttgcctgctctcagtgtggccagcccctgttcgtgtacaagctggagcaggtgtctgagaagggcaaggcttacaccaactacttcggacggtgcaatgtggccgagcacgaaaagctgatcctgctggcccagctgaagcccgagaaggatagcgacgaagccgtgacatatagcctgggaaagtttgggcagagggccctggatttctacagcattcatgtgaccaaggagtccacccaccccgtgaagcccctggcccagatcgccggaaacagatacgcctccggacctgtgggaaaggccctgagcgacgcatgtatgggcacaatcgcctccttcctgtctaagtaccaggacatcatcatcgaacaccagaaggtggtgaagggcaaccagaagagactggagagcctgcgggagctggccggcaaggaaaacctggaataccctagcgtgaccctgccacctcagcctcacaccaaggagggcgttgatgcctacaacgaagtgatcgcccgggtgcgaatgtgggtgaacctgaacctgtggcagaagctgaagctaagcagagatgatgccaagcctctgctgagactgaagggattcccttcctttcctctggtcgagagacaggccaacgaagtggactggtgggacatggtgtgtaacgtgaagaagctgatcaacgagaaaaaggaggatggcaaggtgttttggcagaatctggctggctacaagagacaggaagccctgagaccatacctgagcagcgaggaagatcggaagaagggaaagaaattcgctcggtaccagctgggcgacctgctgctgcacctggaaaagaagcacggcgaggactggggaaaggtgtacgacgaggcctgggagcggattgacaagaaagtggaaggcctgagcaagcacatcaagctggaagaggaacggagaagcgaggacgcccagagcaaggccgccctgaccgactggctgcgggctaaggccagcttcgtgatcgagggcctgaaggaggccgacaaggacgagttctgcagatgcgagctgaagctgcagaagtggtacggggacctgcggggaaagcccttcgccatcgaagccgagaacagcatcctggacatcagcggcttcagcaagcagtacaactgtgccttcatctggcagaaggacggcgtgaagaagctgaacctgtacctgatcatcaactacttcaagggcggcaagctgcggttcaagaagatcaaacctgaagccttcgaagccaacagattctacaccgtgatcaacaaaaagagcggcgagatcgtgcccatggaggtgaacttcaacttcgacgaccccaacctgatcatcctgcctctggcctttggcaagagacagggcagagaattcatctggaacgacctgctgtccctggaaaccggcagcctgaagctggccaacggaagagtgatcgagaagacactgtacaacagaagaacccggcaggatgagcctgccctgttcgtggccctgaccttcgagcggcgggaggtcctggactcctccaatatcaaaccaatgaacctgatcggcgtggcaagaggcgaaaacatccccgccgtgatcgccctgaccgaccccgagggctgcccactgagccggtttaaggatagcctgggaaacccaacccacatcctgagaatcggcgagagctataaggagaagcagcggaccatccaggccaagaaggaggtggagcagcggagagccggcggctacagccggaagtacgccagcaaagccaagaatctggcagacgatatggtgagaaacaccgctagagatctgctgtactacgccgtgacccaggatgccatgctgatcttcgccaacctgagccggggcttcggccggcagggcaagcggaccttcatggccgagagacagtacacacggatggaggactggctgaccgccaagctggcctacgagggcctgagcaagacctacctgtccaagacactggcccagtacacctccaagacatgcagcaactgtgggtttaccatcaccagcgccgactacgacagggtgctggagaagctgaagaagacagcaacaggctggatgaccacaattaacggcaaggagctgaaggtggagggccagattacctactacaacagatacaagagacagaacgtagtcaaggacctgtccgtcgagctggatagactgagcgaagaatctgtgaacaacgacatctcctcctggacaaagggcagaagcggagaagctctgagcctcctgaagaaaagattctcccatagacccgtgcaggagaagttcgtgtgcctgaactgcggcttcgagacacacgcagccgagcaagccgccctgaacatcgccagatcctggctgttcctgcggagccaggagtacaagaaataccagacaaacaagacaaccggcaacaccgataagagagccttcgtcgagacctggcagtccttttaccggaagaagcttaaggaggtgtggaaacctgccgtgcggtctggcggatctggcggaggctcctggcagcctggaggagggcagaagagccaccggcctgcccgccgcccaggtgcaggagcccgtgaccttcaaggacgtggccgtggacttcacccaggaggagtggggccagctggacctggtgcagagaaccctgtacagagacgtgatgctggagacctacggccacctgctgagcgtgggcaaccagatcgccaagcccgaggtgatcagcctgctggagcagggcgaggagccctggggatctggctccggcagcggccccaagaaaaagagaaaagtctaagctgccttctgcggggcttgccttctggccatgcccttcttctctcccttgcacctgtacctcttggtctttgaataaagcctgagtaggaaggctagcaaaaaaaaaaaaaaaaaaaaaaaaaaaaaaaaaaaaaaaaaaaaaaaaaaaaaaaaaaaaaaaaaaaaaaaaaaaaaaaa

SEQ ID NO: 16348 - RNA, 9485 nt, synthetic construct
  source 1..9485: mol_type = other RNA
aggaaataagagagaaaagaagagtaagaagaaatataagagccaccatggcccctaagaagaagcgtaaagtgagccggatggaacgcctcgtctacgaggtgcggcagaagtgcagaaacatcgaggacatctgcatctcctgcggatctctgaacgtgaccctggagcacccactgttcatcggcggcatgtgccagaactgtaaaaactgttttctggagtgtgcctatcaatacgacgatgacggctaccagagctactgcaccatctgttgcggcggaagagaggtgctgatgtgtggaaataacaactgctgccggtgcttctgcgtggaatgcgtggacctgctggtgggccccggcgccgcccaggccgctattaaggaagatccttggaactgctacatgtgcggccacaagggcacatacggcctgctgagacggagagaggactggcctagcagactgcagatgttcttcgccaataaccacgaccaggagttcgacccccctaaggtgtaccctcccgtccccgccgagaagagaaagcccatccgggtcctgagcctgttcgatggcatcgccaccggtctgctggtgctgaaggacctgggcatccaggtggataggtacattgcctccgaggtgtgcgaggactccatcaccgtgggaatggtgcgtcatcagggcaagatcatgtacgtgggcgacgtgcggagcgtgacacagaagcatatccaggagtggggccctttcgacctggtgatcggcggcagcccttgcaatgacctgagcatcgtgaacccagcccggaagggcctgtacgagggaaccggcagactgttcttcgagttttacagactgctgcacgacgcccggcctaaggaaggcgacgaccggcccttcttttggctgttcgagaatgtggtggccatgggagtcagcgacaagcgggatattagccggttcctggagagcaaccccgtgatgatcgatgccaaggaagtgagcgccgcccaccgggccagatacttctggggcaatctgcctggcatgaacagacccctggccagcaccgtgaacgacaagctggagctgcaggagtgcctggagcacggccggatcgccaagttcagcaaggtgagaaccatcaccacccgaagcaacagcatcaaacaaggcaaggaccagcactttcctgtgttcatgaacgagaaggaggacatcctgtggtgtaccgagatggagagagtgttcgggttcccagtccactacacagatgtcagcaacatgtctagactggccagacagagactgctgggaagaagctggtccgtccctgtgatcagacacctgttcgcccctctgaaggagtacttcgcctgcgtgagcagcggcaacagcaacgccaacagccggggccccagcttctctagcggcctggtgccactgtccctgagagggagccacatgggccccatggagatctacaaaaccgtgagcgcctggaagcggcagcctgtgcgcgtgctgagcctgtttcggaatatcgataaagtcctgaaaagcctgggattcctggagagcggctctggctccggcggtggcaccctgaagtacgtggaggatgtgacaaacgtggtcagacgggatgtggagaagtggggccccttcgatctggtgtacggcagcacccaacccctgggcagctcttgtgaccggtgccctggctggtacatgtttcagttccaccggatcctgcagtacgccctgccgagacaggagtcccagcggccattcttttggattttcatggacaacttgctgctgaccgaggatgaccaggaaactaccactcggttcctgcagaccgaagccgtgaccctgcaggacgtgagaggccgggactaccagaacgccatgcgggtgtggtccaacatccctggactgaaaagcaagcacgcacctctgacccctaaagaagaggagtacctgcaggcccaggtgcggagcagaagcaagctggacgcccctaaggtggatctgctggtgaagaattgcctcctgcccctgagagagtacttcaagtatttcagccagaatagtctgcccctgggaggcagcggcggcggcgccctggtgacatttgaggacgtcgccgtgcggttcacccaggaggaatgggctctgctggatccttctcagaaaatcctgtaccgggacgtgatgagagagacataccggaatctgacctccgtgggcatcaactgggaatgttgggaccttgaagcctgcttcagaagcctgggaagaaacctgagagtgcaggtggtgaagagaaagtgcgagctgaccaacagcggcccctgcgccgagggcggcccaagcagcggcgcccctcctcccagcggcggcagcccagccggctccccaacctctaccgaggagggcacctctgagtccgccacccccgagagcggccctggcacctccaccgagcccagcgagggcagcgcacccggcagccctgccggcagccccacctccacagaggagggaaccagcaccgagcccagcgaaggcagcgccccaggcaccagcaccgagcctagtgagcaggagattaaacggatcaacaagatcagaagaagacttgtgaaagacagcaacaccaagaaggccggcaagacaggccccatgaaaaccctgctggttagagtgatgacacccgatctgagagagcggctggaaaacctgagaaagaagcctgaaaatatcccccagcccatcagcaatacatctagagccaacctgaataagctgctgaccgattacaccgaaatgaagaaggcgatcctgcatgtgtactgggaagagttccagaaggaccctgtgggcctgatgagccgggtggcccagcctgccagcaagaagatcgatcagaacaagctgaaacctgagatggacgagaagggcaacctgaccaccgccggctttgcctgctctcagtgtggccagcccctgttcgtgtacaagctggagcaggtgtctgagaagggcaaggcttacaccaactacttcggacggtgcaatgtggccgagcacgaaaagctgatcctgctggcccagctgaagcccgagaaggatagcgacgaagccgtgacatatagcctgggaaagtttgggcagagggccctggatttctacagcattcatgtgaccaaggagtccacccaccccgtgaagcccctggcccagatcgccggaaacagatacgcctccggacctgtgggaaaggccctgagcgacgcatgtatgggcacaatcgcctccttcctgtctaagtaccaggacatcatcatcgaacaccagaaggtggtgaagggcaaccagaagagactggagagcctgcgggagctggccggcaaggaaaacctggaataccctagcgtgaccctgccacctcagcctcacaccaaggagggcgttgatgcctacaacgaagtgatcgcccgggtgcgaatgtgggtgaacctgaacctgtggcagaagctgaagctaagcagagatgatgccaagcctctgctgagactgaagggattcccttcctttcctctggtcgagagacaggccaacgaagtggactggtgggacatggtgtgtaacgtgaagaagctgatcaacgagaaaaaggaggatggcaaggtgttttggcagaatctggctggctacaagagacaggaagccctgagaccatacctgagcagcgaggaagatcggaagaagggaaagaaattcgctcggtaccagctgggcgacctgctgctgcacctggaaaagaagcacggcgaggactggggaaaggtgtacgacgaggcctgggagcggattgacaagaaagtggaaggcctgagcaagcacatcaagctggaagaggaacggagaagcgaggacgcccagagcaaggccgccctgaccgactggctgcgggctaaggccagcttcgtgatcgagggcctgaaggaggccgacaaggacgagttctgcagatgcgagctgaagctgcagaagtggtacggggacctgcggggaaagcccttcgccatcgaagccgagaacagcatcctggacatcagcggcttcagcaagcagtacaactgtgccttcatctggcagaaggacggcgtgaagaagctgaacctgtacctgatcatcaactacttcaagggcggcaagctgcggttcaagaagatcaaacctgaagccttcgaagccaacagattctacaccgtgatcaacaaaaagagcggcgagatcgtgcccatggaggtgaacttcaacttcgacgaccccaacctgatcatcctgcctctggcctttggcaagagacagggcagagaattcatctggaacgacctgctgtccctggaaaccggcagcctgaagctggccaacggaagagtgatcgagaagacactgtacaacagaagaacccggcaggatgagcctgccctgttcgtggccctgaccttcgagcggcgggaggtcctggactcctccaatatcaaaccaatgaacctgatcggcgtggcaagaggcgaaaacatccccgccgtgatcgccctgaccgaccccgagggctgcccactgagccggtttaaggatagcctgggaaacccaacccacatcctgagaatcggcgagagctataaggagaagcagcggaccatccaggccaagaaggaggtggagcagcggagagccggcggctacagccggaagtacgccagcaaagccaagaatctggcagacgatatggtgagaaacaccgctagagatctgctgtactacgccgtgacccaggatgccatgctgatcttcgccaacctgagccggggcttcggccggcagggcaagcggaccttcatggccgagagacagtacacacggatggaggactggctgaccgccaagctggcctacgagggcctgagcaagacctacctgtccaagacactggcccagtacacctccaagacatgcagcaactgtgggtttaccatcaccagcgccgactacgacagggtgctggagaagctgaagaagacagcaacaggctggatgaccacaattaacggcaaggagctgaaggtggagggccagattacctactacaacagatacaagagacagaacgtagtcaaggacctgtccgtcgagctggatagactgagcgaagaatctgtgaacaacgacatctcctcctggacaaagggcagaagcggagaagctctgagcctcctgaagaaaagattctcccatagacccgtgcaggagaagttcgtgtgcctgaactgcggcttcgagacacacgcagccgagcaagccgccctgaacatcgccagatcctggctgttcctgcggagccaggagtacaagaaataccagacaaacaagacaaccggcaacaccgataagagagccttcgtcgagacctggcagtccttttaccggaagaagcttaaggaggtgtggaaacctgccgtgcggtctggcggatctggcggaggctccggccccctgaccttcagggacgtggccatcgagttcagccaggaggagtggaagagcctggaccccgtgcagaaggccctgtactgggacgtgatgctggagaactacaggaacctggtgttcctgggcatcctgcccaagtgcatgaccaaggagctgccccccatcggcaacagcaacaccggcgagaagtgccagaccgtgatgctggagaggcacgagtgctacgacgtggagaacttcggcggcccaagcagcggcgcccctcctcccagcggcggcagcccagccggctccccaacctctaccgaggagggcacctctgagtccgccacccccgagagcggccctggcacctccaccgagcccagcgagggcagcgcacccggcagccctgccggcagccccacctccacagaggagggaaccagcaccgagcccagcgaaggcagcgccccaggcaccagcaccgagcctagtgagcaggagattaaacggatcaacaagatcagaagaagacttgtgaaagacagcaacaccaagaaggccggcaagacaggccccatgaaaaccctgctggttagagtgatgacacccgatctgagagagcggctggaaaacctgagaaagaagcctgaaaatatcccccagcccatcagcaatacatctagagccaacctgaataagctgctgaccgattacaccgaaatgaagaaggcgatcctgcatgtgtactgggaagagttccagaaggaccctgtgggcctgatgagccgggtggcccagcctgccagcaagaagatcgatcagaacaagctgaaacctgagatggacgagaagggcaacctgaccaccgccggctttgcctgctctcagtgtggccagcccctgttcgtgtacaagctggagcaggtgtctgagaagggcaaggcttacaccaactacttcggacggtgcaatgtggccgagcacgaaaagctgatcctgctggcccagctgaagcccgagaaggatagcgacgaagccgtgacatatagcctgggaaagtttgggcagagggccctggatttctacagcattcatgtgaccaaggagtccacccaccccgtgaagcccctggcccagatcgccggaaacagatacgcctccggacctgtgggaaaggccctgagcgacgcatgtatgggcacaatcgcctccttcctgtctaagtaccaggacatcatcatcgaacaccagaaggtggtgaagggcaaccagaagagactggagagcctgcgggagctggccggcaaggaaaacctggaataccctagcgtgaccctgccacctcagcctcacaccaaggagggcgttgatgcctacaacgaagtgatcgcccgggtgcgaatgtgggtgaacctgaacctgtggcagaagctgaagctaagcagagatgatgccaagcctctgctgagactgaagggattcccttcctttcctctggtcgagagacaggccaacgaagtggactggtgggacatggtgtgtaacgtgaagaagctgatcaacgagaaaaaggaggatggcaaggtgttttggcagaatctggctggctacaagagacaggaagccctgagaccatacctgagcagcgaggaagatcggaagaagggaaagaaattcgctcggtaccagctgggcgacctgctgctgcacctggaaaagaagcacggcgaggactggggaaaggtgtacgacgaggcctgggagcggattgacaagaaagtggaaggcctgagcaagcacatcaagctggaagaggaacggagaagcgaggacgcccagagcaaggccgccctgaccgactggctgcgggctaaggccagcttcgtgatcgagggcctgaaggaggccgacaaggacgagttctgcagatgcgagctgaagctgcagaagtggtacggggacctgcggggaaagcccttcgccatcgaagccgagaacagcatcctggacatcagcggcttcagcaagcagtacaactgtgccttcatctggcagaaggacggcgtgaagaagctgaacctgtacctgatcatcaactacttcaagggcggcaagctgcggttcaagaagatcaaacctgaagccttcgaagccaacagattctacaccgtgatcaacaaaaagagcggcgagatcgtgcccatggaggtgaacttcaacttcgacgaccccaacctgatcatcctgcctctggcctttggcaagagacagggcagagaattcatctggaacgacctgctgtccctggaaaccggcagcctgaagctggccaacggaagagtgatcgagaagacactgtacaacagaagaacccggcaggatgagcctgccctgttcgtggccctgaccttcgagcggcgggaggtcctggactcctccaatatcaaaccaatgaacctgatcggcgtggcaagaggcgaaaacatccccgccgtgatcgccctgaccgaccccgagggctgcccactgagccggtttaaggatagcctgggaaacccaacccacatcctgagaatcggcgagagctataaggagaagcagcggaccatccaggccaagaaggaggtggagcagcggagagccggcggctacagccggaagtacgccagcaaagccaagaatctggcagacgatatggtgagaaacaccgctagagatctgctgtactacgccgtgacccaggatgccatgctgatcttcgccaacctgagccggggcttcggccggcagggcaagcggaccttcatggccgagagacagtacacacggatggaggactggctgaccgccaagctggcctacgagggcctgagcaagacctacctgtccaagacactggcccagtacacctccaagacatgcagcaactgtgggtttaccatcaccagcgccgactacgacagggtgctggagaagctgaagaagacagcaacaggctggatgaccacaattaacggcaaggagctgaaggtggagggccagattacctactacaacagatacaagagacagaacgtagtcaaggacctgtccgtcgagctggatagactgagcgaagaatctgtgaacaacgacatctcctcctggacaaagggcagaagcggagaagctctgagcctcctgaagaaaagattctcccatagacccgtgcaggagaagttcgtgtgcctgaactgcggcttcgagacacacgcagccgagcaagccgccctgaacatcgccagatcctggctgttcctgcggagccaggagtacaagaaataccagacaaacaagacaaccggcaacaccgataagagagccttcgtcgagacctggcagtccttttaccggaagaagcttaaggaggtgtggaaacctgccgtgcggtctggcggatctggcggaggctcctggccccctgaccttcagggacgtggccatcgagttcagccaggaggagtggaagagcctggaccccgtgcagaaggccctgtactgggacgtgatgctggagaactacaggaacctggtgttcctgggcatcctgcccaagtgcatgaccaaggagctgccccccatcggcaacagcaacaccggcgagaagtgccagaccgtgatgctggagaggcacgagtgctacgacgtggagaacttcggatctggctccggcagcggccccaagaaaaagagaaaagtctaagctgccttctgcggggcttgccttctggccatgcccttcttctctcccttgcacctgtacctcttggtctttgaataaagcctgagtaggaaggctagcaaaaaaaaaaaaaaaaaaaaaaaaaaaaaaaaaaaaaaaaaaaaaaaaaaaaaaaaaaaaaaaaaaaaaaaaaaaaaaaa

SEQ ID NO: 16349 - RNA, 9485 nt, synthetic construct
  source 1..9485: mol_type = other RNA
aggaaataagagagaaaagaagagtaagaagaaatataagagccaccatggcccctaagaagaagcgtaaagtgagccggatggaacgcctcgtctacgaggtgcggcagaagtgcagaaacatcgaggacatctgcatctcctgcggatctctgaacgtgaccctggagcacccactgttcatcggcggcatgtgccagaactgtaaaaactgttttctggagtgtgcctatcaatacgacgatgacggctaccagagctactgcaccatctgttgcggcggaagagaggtgctgatgtgtggaaataacaactgctgccggtgcttctgcgtggaatgcgtggacctgctggtgggccccggcgccgcccaggccgctattaaggaagatccttggaactgctacatgtgcggccacaagggcacatacggcctgctgagacggagagaggactggcctagcagactgcagatgttcttcgccaataaccacgaccaggagttcgacccccctaaggtgtaccctcccgtccccgccgagaagagaaagcccatccgggtcctgagcctgttcgatggcatcgccaccggtctgctggtgctgaaggacctgggcatccaggtggataggtacattgcctccgaggtgtgcgaggactccatcaccgtgggaatggtgcgtcatcagggcaagatcatgtacgtgggcgacgtgcggagcgtgacacagaagcatatccaggagtggggccctttcgacctggtgatcggcggcagcccttgcaatgacctgagcatcgtgaacccagcccggaagggcctgtacgagggaaccggcagactgttcttcgagttttacagactgctgcacgacgcccggcctaaggaaggcgacgaccggcccttcttttggctgttcgagaatgtggtggccatgggagtcagcgacaagcgggatattagccggttcctggagagcaaccccgtgatgatcgatgccaaggaagtgagcgccgcccaccgggccagatacttctggggcaatctgcctggcatgaacagacccctggccagcaccgtgaacgacaagctggagctgcaggagtgcctggagcacggccggatcgccaagttcagcaaggtgagaaccatcaccacccgaagcaacagcatcaaacaaggcaaggaccagcactttcctgtgttcatgaacgagaaggaggacatcctgtggtgtaccgagatggagagagtgttcgggttcccagtccactacacagatgtcagcaacatgtctagactggccagacagagactgctgggaagaagctggtccgtccctgtgatcagacacctgttcgcccctctgaaggagtacttcgcctgcgtgagcagcggcaacagcaacgccaacagccggggccccagcttctctagcggcctggtgccactgtccctgagagggagccacatgggccccatggagatctacaaaaccgtgagcgcctggaagcggcagcctgtgcgcgtgctgagcctgtttcggaatatcgataaagtcctgaaaagcctgggattcctggagagcggctctggctccggcggtggcaccctgaagtacgtggaggatgtgacaaacgtggtcagacgggatgtggagaagtggggccccttcgatctggtgtacggcagcacccaacccctgggcagctcttgtgaccggtgccctggctggtacatgtttcagttccaccggatcctgcagtacgccctgccgagacaggagtcccagcggccattcttttggattttcatggacaacttgctgctgaccgaggatgaccaggaaactaccactcggttcctgcagaccgaagccgtgaccctgcaggacgtgagaggccgggactaccagaacgccatgcgggtgtggtccaacatccctggactgaaaagcaagcacgcacctctgacccctaaagaagaggagtacctgcaggcccaggtgcggagcagaagcaagctggacgcccctaaggtggatctgctggtgaagaattgcctcctgcccctgagagagtacttcaagtatttcagccagaatagtctgcccctgggaggcagcggcggcggcgccctggtgacatttgaggacgtcgccgtgcggttcacccaggaggaatgggctctgctggatccttctcagaaaatcctgtaccgggacgtgatgagagagacataccggaatctgacctccgtgggcatcaactgggaatgttgggaccttgaagcctgcttcagaagcctgggaagaaacctgagagtgcaggtggtgaagagaaagtgcgagctgaccaacagcggcccctgcgccgagggcggcccaagcagcggcgcccctcctcccagcggcggcagcccagccggctccccaacctctaccgaggagggcacctctgagtccgccacccccgagagcggccctggcacctccaccgagcccagcgagggcagcgcacccggcagccctgccggcagccccacctccacagaggagggaaccagcaccgagcccagcgaaggcagcgccccaggcaccagcaccgagcctagtgagcaggagattaaacggatcaacaagatcagaagaagacttgtgaaagacagcaacaccaagaaggccggcaagacaggccccatgaaaaccctgctggttagagtgatgacacccgatctgagagagcggctggaaaacctgagaaagaagcctgaaaatatcccccagcccatcagcaatacatctagagccaacctgaataagctgctgaccgattacaccgaaatgaagaaggcgatcctgcatgtgtactgggaagagttccagaaggaccctgtgggcctgatgagccgggtggcccagcctgccagcaagaagatcgatcagaacaagctgaaacctgagatggacgagaagggcaacctgaccaccgccggctttgcctgctctcagtgtggccagcccctgttcgtgtacaagctggagcaggtgtctgagaagggcaaggcttacaccaactacttcggacggtgcaatgtggccgagcacgaaaagctgatcctgctggcccagctgaagcccgagaaggatagcgacgaagccgtgacatatagcctgggaaagtttgggcagagggccctggatttctacagcattcatgtgaccaaggagtccacccaccccgtgaagcccctggcccagatcgccggaaacagatacgcctccggacctgtgggaaaggccctgagcgacgcatgtatgggcacaatcgcctccttcctgtctaagtaccaggacatcatcatcgaacaccagaaggtggtgaagggcaaccagaagagactggagagcctgcgggagctggccggcaaggaaaacctggaataccctagcgtgaccctgccacctcagcctcacaccaaggagggcgttgatgcctacaacgaagtgatcgcccgggtgcgaatgtgggtgaacctgaacctgtggcagaagctgaagctaagcagagatgatgccaagcctctgctgagactgaagggattcccttcctttcctctggtcgagagacaggccaacgaagtggactggtgggacatggtgtgtaacgtgaagaagctgatcaacgagaaaaaggaggatggcaaggtgttttggcagaatctggctggctacaagagacaggaagccctgagaccatacctgagcagcgaggaagatcggaagaagggaaagaaattcgctcggtaccagctgggcgacctgctgctgcacctggaaaagaagcacggcgaggactggggaaaggtgtacgacgaggcctgggagcggattgacaagaaagtggaaggcctgagcaagcacatcaagctggaagaggaacggagaagcgaggacgcccagagcaaggccgccctgaccgactggctgcgggctaaggccagcttcgtgatcgagggcctgaaggaggccgacaaggacgagttctgcagatgcgagctgaagctgcagaagtggtacggggacctgcggggaaagcccttcgccatcgaagccgagaacagcatcctggacatcagcggcttcagcaagcagtacaactgtgccttcatctggcagaaggacggcgtgaagaagctgaacctgtacctgatcatcaactacttcaagggcggcaagctgcggttcaagaagatcaaacctgaagccttcgaagccaacagattctacaccgtgatcaacaaaaagagcggcgagatcgtgcccatggaggtgaacttcaacttcgacgaccccaacctgatcatcctgcctctggcctttggcaagagacagggcagagaattcatctggaacgacctgctgtccctggaaaccggcagcctgaagctggccaacggaagagtgatcgagaagacactgtacaacagaagaacccggcaggatgagcctgccctgttcgtggccctgaccttcgagcggcgggaggtcctggactcctccaatatcaaaccaatgaacctgatcggcgtggcaagaggcgaaaacatccccgccgtgatcgccctgaccgaccccgagggctgcccactgagccggtttaaggatagcctgggaaacccaacccacatcctgagaatcggcgagagctataaggagaagcagcggaccatccaggccaagaaggaggtggagcagcggagagccggcggctacagccggaagtacgccagcaaagccaagaatctggcagacgatatggtgagaaacaccgctagagatctgctgtactacgccgtgacccaggatgccatgctgatcttcgccaacctgagccggggcttcggccggcagggcaagcggaccttcatggccgagagacagtacacacggatggaggactggctgaccgccaagctggcctacgagggcctgagcaagacctacctgtccaagacactggcccagtacacctccaagacatgcagcaactgtgggtttaccatcaccagcgccgactacgacagggtgctggagaagctgaagaagacagcaacaggctggatgaccacaattaacggcaaggagctgaaggtggagggccagattacctactacaacagatacaagagacagaacgtagtcaaggacctgtccgtcgagctggatagactgagcgaagaatctgtgaacaacgacatctcctcctggacaaagggcagaagcggagaagctctgagcctcctgaagaaaagattctcccatagacccgtgcaggagaagttcgtgtgcctgaactgcggcttcgagacacacgcagccgagcaagccgccctgaacatcgccagatcctggctgttcctgcggagccaggagtacaagaaataccagacaaacaagacaaccggcaacaccgataagagagccttcgtcgagacctggcagtccttttaccggaagaagcttaaggaggtgtggaaacctgccgtgcggtctggcggatctggcggaggctccgcccaggacgccctgaccttccaggacgtggccgtggacttcacctgggaggagtggggccagctggaccccgcccagcagaacctgtacagggacgtgatgctggagaactaccagaacctgatcagcctgggcttccccgtgagcaagcccgaggtgatcagccagctggagcagggcgaggtgccctgggccctgaagagggccgtggccgagggcagctgccccgactgggaggccaggggcggcccaagcagcggcgcccctcctcccagcggcggcagcccagccggctccccaacctctaccgaggagggcacctctgagtccgccacccccgagagcggccctggcacctccaccgagcccagcgagggcagcgcacccggcagccctgccggcagccccacctccacagaggagggaaccagcaccgagcccagcgaaggcagcgccccaggcaccagcaccgagcctagtgagcaggagattaaacggatcaacaagatcagaagaagacttgtgaaagacagcaacaccaagaaggccggcaagacaggccccatgaaaaccctgctggttagagtgatgacacccgatctgagagagcggctggaaaacctgagaaagaagcctgaaaatatcccccagcccatcagcaatacatctagagccaacctgaataagctgctgaccgattacaccgaaatgaagaaggcgatcctgcatgtgtactgggaagagttccagaaggaccctgtgggcctgatgagccgggtggcccagcctgccagcaagaagatcgatcagaacaagctgaaacctgagatggacgagaagggcaacctgaccaccgccggctttgcctgctctcagtgtggccagcccctgttcgtgtacaagctggagcaggtgtctgagaagggcaaggcttacaccaactacttcggacggtgcaatgtggccgagcacgaaaagctgatcctgctggcccagctgaagcccgagaaggatagcgacgaagccgtgacatatagcctgggaaagtttgggcagagggccctggatttctacagcattcatgtgaccaaggagtccacccaccccgtgaagcccctggcccagatcgccggaaacagatacgcctccggacctgtgggaaaggccctgagcgacgcatgtatgggcacaatcgcctccttcctgtctaagtaccaggacatcatcatcgaacaccagaaggtggtgaagggcaaccagaagagactggagagcctgcgggagctggccggcaaggaaaacctggaataccctagcgtgaccctgccacctcagcctcacaccaaggagggcgttgatgcctacaacgaagtgatcgcccgggtgcgaatgtgggtgaacctgaacctgtggcagaagctgaagctaagcagagatgatgccaagcctctgctgagactgaagggattcccttcctttcctctggtcgagagacaggccaacgaagtggactggtgggacatggtgtgtaacgtgaagaagctgatcaacgagaaaaaggaggatggcaaggtgttttggcagaatctggctggctacaagagacaggaagccctgagaccatacctgagcagcgaggaagatcggaagaagggaaagaaattcgctcggtaccagctgggcgacctgctgctgcacctggaaaagaagcacggcgaggactggggaaaggtgtacgacgaggcctgggagcggattgacaagaaagtggaaggcctgagcaagcacatcaagctggaagaggaacggagaagcgaggacgcccagagcaaggccgccctgaccgactggctgcgggctaaggccagcttcgtgatcgagggcctgaaggaggccgacaaggacgagttctgcagatgcgagctgaagctgcagaagtggtacggggacctgcggggaaagcccttcgccatcgaagccgagaacagcatcctggacatcagcggcttcagcaagcagtacaactgtgccttcatctggcagaaggacggcgtgaagaagctgaacctgtacctgatcatcaactacttcaagggcggcaagctgcggttcaagaagatcaaacctgaagccttcgaagccaacagattctacaccgtgatcaacaaaaagagcggcgagatcgtgcccatggaggtgaacttcaacttcgacgaccccaacctgatcatcctgcctctggcctttggcaagagacagggcagagaattcatctggaacgacctgctgtccctggaaaccggcagcctgaagctggccaacggaagagtgatcgagaagacactgtacaacagaagaacccggcaggatgagcctgccctgttcgtggccctgaccttcgagcggcgggaggtcctggactcctccaatatcaaaccaatgaacctgatcggcgtggcaagaggcgaaaacatccccgccgtgatcgccctgaccgaccccgagggctgcccactgagccggtttaaggatagcctgggaaacccaacccacatcctgagaatcggcgagagctataaggagaagcagcggaccatccaggccaagaaggaggtggagcagcggagagccggcggctacagccggaagtacgccagcaaagccaagaatctggcagacgatatggtgagaaacaccgctagagatctgctgtactacgccgtgacccaggatgccatgctgatcttcgccaacctgagccggggcttcggccggcagggcaagcggaccttcatggccgagagacagtacacacggatggaggactggctgaccgccaagctggcctacgagggcctgagcaagacctacctgtccaagacactggcccagtacacctccaagacatgcagcaactgtgggtttaccatcaccagcgccgactacgacagggtgctggagaagctgaagaagacagcaacaggctggatgaccacaattaacggcaaggagctgaaggtggagggccagattacctactacaacagatacaagagacagaacgtagtcaaggacctgtccgtcgagctggatagactgagcgaagaatctgtgaacaacgacatctcctcctggacaaagggcagaagcggagaagctctgagcctcctgaagaaaagattctcccatagacccgtgcaggagaagttcgtgtgcctgaactgcggcttcgagacacacgcagccgagcaagccgccctgaacatcgccagatcctggctgttcctgcggagccaggagtacaagaaataccagacaaacaagacaaccggcaacaccgataagagagccttcgtcgagacctggcagtccttttaccggaagaagcttaaggaggtgtggaaacctgccgtgcggtctggcggatctggcggaggctcctgcccaggacgccctgaccttccaggacgtggccgtggacttcacctgggaggagtggggccagctggaccccgcccagcagaacctgtacagggacgtgatgctggagaactaccagaacctgatcagcctgggcttccccgtgagcaagcccgaggtgatcagccagctggagcagggcgaggtgccctgggccctgaagagggccgtggccgagggcagctgccccgactgggaggccaggggatctggctccggcagcggccccaagaaaaagagaaaagtctaagctgccttctgcggggcttgccttctggccatgcccttcttctctcccttgcacctgtacctcttggtctttgaataaagcctgagtaggaaggctagcaaaaaaaaaaaaaaaaaaaaaaaaaaaaaaaaaaaaaaaaaaaaaaaaaaaaaaaaaaaaaaaaaaaaaaaaaaaaaaaa

SEQ ID NO: 16350 - RNA, 9485 nt, synthetic construct
  source 1..9485: mol_type = other RNA
aggaaataagagagaaaagaagagtaagaagaaatataagagccaccatggcccctaagaagaagcgtaaagtgagccggatggaacgcctcgtctacgaggtgcggcagaagtgcagaaacatcgaggacatctgcatctcctgcggatctctgaacgtgaccctggagcacccactgttcatcggcggcatgtgccagaactgtaaaaactgttttctggagtgtgcctatcaatacgacgatgacggctaccagagctactgcaccatctgttgcggcggaagagaggtgctgatgtgtggaaataacaactgctgccggtgcttctgcgtggaatgcgtggacctgctggtgggccccggcgccgcccaggccgctattaaggaagatccttggaactgctacatgtgcggccacaagggcacatacggcctgctgagacggagagaggactggcctagcagactgcagatgttcttcgccaataaccacgaccaggagttcgacccccctaaggtgtaccctcccgtccccgccgagaagagaaagcccatccgggtcctgagcctgttcgatggcatcgccaccggtctgctggtgctgaaggacctgggcatccaggtggataggtacattgcctccgaggtgtgcgaggactccatcaccgtgggaatggtgcgtcatcagggcaagatcatgtacgtgggcgacgtgcggagcgtgacacagaagcatatccaggagtggggccctttcgacctggtgatcggcggcagcccttgcaatgacctgagcatcgtgaacccagcccggaagggcctgtacgagggaaccggcagactgttcttcgagttttacagactgctgcacgacgcccggcctaaggaaggcgacgaccggcccttcttttggctgttcgagaatgtggtggccatgggagtcagcgacaagcgggatattagccggttcctggagagcaaccccgtgatgatcgatgccaaggaagtgagcgccgcccaccgggccagatacttctggggcaatctgcctggcatgaacagacccctggccagcaccgtgaacgacaagctggagctgcaggagtgcctggagcacggccggatcgccaagttcagcaaggtgagaaccatcaccacccgaagcaacagcatcaaacaaggcaaggaccagcactttcctgtgttcatgaacgagaaggaggacatcctgtggtgtaccgagatggagagagtgttcgggttcccagtccactacacagatgtcagcaacatgtctagactggccagacagagactgctgggaagaagctggtccgtccctgtgatcagacacctgttcgcccctctgaaggagtacttcgcctgcgtgagcagcggcaacagcaacgccaacagccggggccccagcttctctagcggcctggtgccactgtccctgagagggagccacatgggccccatggagatctacaaaaccgtgagcgcctggaagcggcagcctgtgcgcgtgctgagcctgtttcggaatatcgataaagtcctgaaaagcctgggattcctggagagcggctctggctccggcggtggcaccctgaagtacgtggaggatgtgacaaacgtggtcagacgggatgtggagaagtggggccccttcgatctggtgtacggcagcacccaacccctgggcagctcttgtgaccggtgccctggctggtacatgtttcagttccaccggatcctgcagtacgccctgccgagacaggagtcccagcggccattcttttggattttcatggacaacttgctgctgaccgaggatgaccaggaaactaccactcggttcctgcagaccgaagccgtgaccctgcaggacgtgagaggccgggactaccagaacgccatgcgggtgtggtccaacatccctggactgaaaagcaagcacgcacctctgacccctaaagaagaggagtacctgcaggcccaggtgcggagcagaagcaagctggacgcccctaaggtggatctgctggtgaagaattgcctcctgcccctgagagagtacttcaagtatttcagccagaatagtctgcccctgggaggcagcggcggcggcgccctggtgacatttgaggacgtcgccgtgcggttcacccaggaggaatgggctctgctggatccttctcagaaaatcctgtaccgggacgtgatgagagagacataccggaatctgacctccgtgggcatcaactgggaatgttgggaccttgaagcctgcttcagaagcctgggaagaaacctgagagtgcaggtggtgaagagaaagtgcgagctgaccaacagcggcccctgcgccgagggcggcccaagcagcggcgcccctcctcccagcggcggcagcccagccggctccccaacctctaccgaggagggcacctctgagtccgccacccccgagagcggccctggcacctccaccgagcccagcgagggcagcgcacccggcagccctgccggcagccccacctccacagaggagggaaccagcaccgagcccagcgaaggcagcgccccaggcaccagcaccgagcctagtgagcaggagattaaacggatcaacaagatcagaagaagacttgtgaaagacagcaacaccaagaaggccggcaagacaggccccatgaaaaccctgctggttagagtgatgacacccgatctgagagagcggctggaaaacctgagaaagaagcctgaaaatatcccccagcccatcagcaatacatctagagccaacctgaataagctgctgaccgattacaccgaaatgaagaaggcgatcctgcatgtgtactgggaagagttccagaaggaccctgtgggcctgatgagccgggtggcccagcctgccagcaagaagatcgatcagaacaagctgaaacctgagatggacgagaagggcaacctgaccaccgccggctttgcctgctctcagtgtggccagcccctgttcgtgtacaagctggagcaggtgtctgagaagggcaaggcttacaccaactacttcggacggtgcaatgtggccgagcacgaaaagctgatcctgctggcccagctgaagcccgagaaggatagcgacgaagccgtgacatatagcctgggaaagtttgggcagagggccctggatttctacagcattcatgtgaccaaggagtccacccaccccgtgaagcccctggcccagatcgccggaaacagatacgcctccggacctgtgggaaaggccctgagcgacgcatgtatgggcacaatcgcctccttcctgtctaagtaccaggacatcatcatcgaacaccagaaggtggtgaagggcaaccagaagagactggagagcctgcgggagctggccggcaaggaaaacctggaataccctagcgtgaccctgccacctcagcctcacaccaaggagggcgttgatgcctacaacgaagtgatcgcccgggtgcgaatgtgggtgaacctgaacctgtggcagaagctgaagctaagcagagatgatgccaagcctctgctgagactgaagggattcccttcctttcctctggtcgagagacaggccaacgaagtggactggtgggacatggtgtgtaacgtgaagaagctgatcaacgagaaaaaggaggatggcaaggtgttttggcagaatctggctggctacaagagacaggaagccctgagaccatacctgagcagcgaggaagatcggaagaagggaaagaaattcgctcggtaccagctgggcgacctgctgctgcacctggaaaagaagcacggcgaggactggggaaaggtgtacgacgaggcctgggagcggattgacaagaaagtggaaggcctgagcaagcacatcaagctggaagaggaacggagaagcgaggacgcccagagcaaggccgccctgaccgactggctgcgggctaaggccagcttcgtgatcgagggcctgaaggaggccgacaaggacgagttctgcagatgcgagctgaagctgcagaagtggtacggggacctgcggggaaagcccttcgccatcgaagccgagaacagcatcctggacatcagcggcttcagcaagcagtacaactgtgccttcatctggcagaaggacggcgtgaagaagctgaacctgtacctgatcatcaactacttcaagggcggcaagctgcggttcaagaagatcaaacctgaagccttcgaagccaacagattctacaccgtgatcaacaaaaagagcggcgagatcgtgcccatggaggtgaacttcaacttcgacgaccccaacctgatcatcctgcctctggcctttggcaagagacagggcagagaattcatctggaacgacctgctgtccctggaaaccggcagcctgaagctggccaacggaagagtgatcgagaagacactgtacaacagaagaacccggcaggatgagcctgccctgttcgtggccctgaccttcgagcggcgggaggtcctggactcctccaatatcaaaccaatgaacctgatcggcgtggcaagaggcgaaaacatccccgccgtgatcgccctgaccgaccccgagggctgcccactgagccggtttaaggatagcctgggaaacccaacccacatcctgagaatcggcgagagctataaggagaagcagcggaccatccaggccaagaaggaggtggagcagcggagagccggcggctacagccggaagtacgccagcaaagccaagaatctggcagacgatatggtgagaaacaccgctagagatctgctgtactacgccgtgacccaggatgccatgctgatcttcgccaacctgagccggggcttcggccggcagggcaagcggaccttcatggccgagagacagtacacacggatggaggactggctgaccgccaagctggcctacgagggcctgagcaagacctacctgtccaagacactggcccagtacacctccaagacatgcagcaactgtgggtttaccatcaccagcgccgactacgacagggtgctggagaagctgaagaagacagcaacaggctggatgaccacaattaacggcaaggagctgaaggtggagggccagattacctactacaacagatacaagagacagaacgtagtcaaggacctgtccgtcgagctggatagactgagcgaagaatctgtgaacaacgacatctcctcctggacaaagggcagaagcggagaagctctgagcctcctgaagaaaagattctcccatagacccgtgcaggagaagttcgtgtgcctgaactgcggcttcgagacacacgcagccgagcaagccgccctgaacatcgccagatcctggctgttcctgcggagccaggagtacaagaaataccagacaaacaagacaaccggcaacaccgataagagagccttcgtcgagacctggcagtccttttaccggaagaagcttaaggaggtgtggaaacctgccgtgcggtctggcggatctggcggaggctcccaggtgcccgtgatcttcgaggacgtggccgtgtacttctgggaggaggagtgggagatgctggaggagtggcagaaggagctgtacaaggagaccatgaaggagaactacaagaccctggtgagcctgggcatggagctgcccaccgagaagcccgacctgatcgtgaggatcgagagggaggagaacccctgcgtgaaggcccagtgggacagcagggacaagaccaggtggaggaacagcggcggcccaagcagcggcgcccctcctcccagcggcggcagcccagccggctccccaacctctaccgaggagggcacctctgagtccgccacccccgagagcggccctggcacctccaccgagcccagcgagggcagcgcacccggcagccctgccggcagccccacctccacagaggagggaaccagcaccgagcccagcgaaggcagcgccccaggcaccagcaccgagcctagtgagcaggagattaaacggatcaacaagatcagaagaagacttgtgaaagacagcaacaccaagaaggccggcaagacaggccccatgaaaaccctgctggttagagtgatgacacccgatctgagagagcggctggaaaacctgagaaagaagcctgaaaatatcccccagcccatcagcaatacatctagagccaacctgaataagctgctgaccgattacaccgaaatgaagaaggcgatcctgcatgtgtactgggaagagttccagaaggaccctgtgggcctgatgagccgggtggcccagcctgccagcaagaagatcgatcagaacaagctgaaacctgagatggacgagaagggcaacctgaccaccgccggctttgcctgctctcagtgtggccagcccctgttcgtgtacaagctggagcaggtgtctgagaagggcaaggcttacaccaactacttcggacggtgcaatgtggccgagcacgaaaagctgatcctgctggcccagctgaagcccgagaaggatagcgacgaagccgtgacatatagcctgggaaagtttgggcagagggccctggatttctacagcattcatgtgaccaaggagtccacccaccccgtgaagcccctggcccagatcgccggaaacagatacgcctccggacctgtgggaaaggccctgagcgacgcatgtatgggcacaatcgcctccttcctgtctaagtaccaggacatcatcatcgaacaccagaaggtggtgaagggcaaccagaagagactggagagcctgcgggagctggccggcaaggaaaacctggaataccctagcgtgaccctgccacctcagcctcacaccaaggagggcgttgatgcctacaacgaagtgatcgcccgggtgcgaatgtgggtgaacctgaacctgtggcagaagctgaagctaagcagagatgatgccaagcctctgctgagactgaagggattcccttcctttcctctggtcgagagacaggccaacgaagtggactggtgggacatggtgtgtaacgtgaagaagctgatcaacgagaaaaaggaggatggcaaggtgttttggcagaatctggctggctacaagagacaggaagccctgagaccatacctgagcagcgaggaagatcggaagaagggaaagaaattcgctcggtaccagctgggcgacctgctgctgcacctggaaaagaagcacggcgaggactggggaaaggtgtacgacgaggcctgggagcggattgacaagaaagtggaaggcctgagcaagcacatcaagctggaagaggaacggagaagcgaggacgcccagagcaaggccgccctgaccgactggctgcgggctaaggccagcttcgtgatcgagggcctgaaggaggccgacaaggacgagttctgcagatgcgagctgaagctgcagaagtggtacggggacctgcggggaaagcccttcgccatcgaagccgagaacagcatcctggacatcagcggcttcagcaagcagtacaactgtgccttcatctggcagaaggacggcgtgaagaagctgaacctgtacctgatcatcaactacttcaagggcggcaagctgcggttcaagaagatcaaacctgaagccttcgaagccaacagattctacaccgtgatcaacaaaaagagcggcgagatcgtgcccatggaggtgaacttcaacttcgacgaccccaacctgatcatcctgcctctggcctttggcaagagacagggcagagaattcatctggaacgacctgctgtccctggaaaccggcagcctgaagctggccaacggaagagtgatcgagaagacactgtacaacagaagaacccggcaggatgagcctgccctgttcgtggccctgaccttcgagcggcgggaggtcctggactcctccaatatcaaaccaatgaacctgatcggcgtggcaagaggcgaaaacatccccgccgtgatcgccctgaccgaccccgagggctgcccactgagccggtttaaggatagcctgggaaacccaacccacatcctgagaatcggcgagagctataaggagaagcagcggaccatccaggccaagaaggaggtggagcagcggagagccggcggctacagccggaagtacgccagcaaagccaagaatctggcagacgatatggtgagaaacaccgctagagatctgctgtactacgccgtgacccaggatgccatgctgatcttcgccaacctgagccggggcttcggccggcagggcaagcggaccttcatggccgagagacagtacacacggatggaggactggctgaccgccaagctggcctacgagggcctgagcaagacctacctgtccaagacactggcccagtacacctccaagacatgcagcaactgtgggtttaccatcaccagcgccgactacgacagggtgctggagaagctgaagaagacagcaacaggctggatgaccacaattaacggcaaggagctgaaggtggagggccagattacctactacaacagatacaagagacagaacgtagtcaaggacctgtccgtcgagctggatagactgagcgaagaatctgtgaacaacgacatctcctcctggacaaagggcagaagcggagaagctctgagcctcctgaagaaaagattctcccatagacccgtgcaggagaagttcgtgtgcctgaactgcggcttcgagacacacgcagccgagcaagccgccctgaacatcgccagatcctggctgttcctgcggagccaggagtacaagaaataccagacaaacaagacaaccggcaacaccgataagagagccttcgtcgagacctggcagtccttttaccggaagaagcttaaggaggtgtggaaacctgccgtgcggtctggcggatctggcggaggctcctcaggtgcccgtgatcttcgaggacgtggccgtgtacttctgggaggaggagtgggagatgctggaggagtggcagaaggagctgtacaaggagaccatgaaggagaactacaagaccctggtgagcctgggcatggagctgcccaccgagaagcccgacctgatcgtgaggatcgagagggaggagaacccctgcgtgaaggcccagtgggacagcagggacaagaccaggtggaggaacagcggatctggctccggcagcggccccaagaaaaagagaaaagtctaagctgccttctgcggggcttgccttctggccatgcccttcttctctcccttgcacctgtacctcttggtctttgaataaagcctgagtaggaaggctagcaaaaaaaaaaaaaaaaaaaaaaaaaaaaaaaaaaaaaaaaaaaaaaaaaaaaaaaaaaaaaaaaaaaaaaaaaaaaaaaa

SEQ ID NO: 16351 - RNA, 9485 nt, synthetic construct
  source 1..9485: mol_type = other RNA
aggaaataagagagaaaagaagagtaagaagaaatataagagccaccatggcccctaagaagaagcgtaaagtgagccggatggaacgcctcgtctacgaggtgcggcagaagtgcagaaacatcgaggacatctgcatctcctgcggatctctgaacgtgaccctggagcacccactgttcatcggcggcatgtgccagaactgtaaaaactgttttctggagtgtgcctatcaatacgacgatgacggctaccagagctactgcaccatctgttgcggcggaagagaggtgctgatgtgtggaaataacaactgctgccggtgcttctgcgtggaatgcgtggacctgctggtgggccccggcgccgcccaggccgctattaaggaagatccttggaactgctacatgtgcggccacaagggcacatacggcctgctgagacggagagaggactggcctagcagactgcagatgttcttcgccaataaccacgaccaggagttcgacccccctaaggtgtaccctcccgtccccgccgagaagagaaagcccatccgggtcctgagcctgttcgatggcatcgccaccggtctgctggtgctgaaggacctgggcatccaggtggataggtacattgcctccgaggtgtgcgaggactccatcaccgtgggaatggtgcgtcatcagggcaagatcatgtacgtgggcgacgtgcggagcgtgacacagaagcatatccaggagtggggccctttcgacctggtgatcggcggcagcccttgcaatgacctgagcatcgtgaacccagcccggaagggcctgtacgagggaaccggcagactgttcttcgagttttacagactgctgcacgacgcccggcctaaggaaggcgacgaccggcccttcttttggctgttcgagaatgtggtggccatgggagtcagcgacaagcgggatattagccggttcctggagagcaaccccgtgatgatcgatgccaaggaagtgagcgccgcccaccgggccagatacttctggggcaatctgcctggcatgaacagacccctggccagcaccgtgaacgacaagctggagctgcaggagtgcctggagcacggccggatcgccaagttcagcaaggtgagaaccatcaccacccgaagcaacagcatcaaacaaggcaaggaccagcactttcctgtgttcatgaacgagaaggaggacatcctgtggtgtaccgagatggagagagtgttcgggttcccagtccactacacagatgtcagcaacatgtctagactggccagacagagactgctgggaagaagctggtccgtccctgtgatcagacacctgttcgcccctctgaaggagtacttcgcctgcgtgagcagcggcaacagcaacgccaacagccggggccccagcttctctagcggcctggtgccactgtccctgagagggagccacatgggccccatggagatctacaaaaccgtgagcgcctggaagcggcagcctgtgcgcgtgctgagcctgtttcggaatatcgataaagtcctgaaaagcctgggattcctggagagcggctctggctccggcggtggcaccctgaagtacgtggaggatgtgacaaacgtggtcagacgggatgtggagaagtggggccccttcgatctggtgtacggcagcacccaacccctgggcagctcttgtgaccggtgccctggctggtacatgtttcagttccaccggatcctgcagtacgccctgccgagacaggagtcccagcggccattcttttggattttcatggacaacttgctgctgaccgaggatgaccaggaaactaccactcggttcctgcagaccgaagccgtgaccctgcaggacgtgagaggccgggactaccagaacgccatgcgggtgtggtccaacatccctggactgaaaagcaagcacgcacctctgacccctaaagaagaggagtacctgcaggcccaggtgcggagcagaagcaagctggacgcccctaaggtggatctgctggtgaagaattgcctcctgcccctgagagagtacttcaagtatttcagccagaatagtctgcccctgggaggcagcggcggcggcgccctggtgacatttgaggacgtcgccgtgcggttcacccaggaggaatgggctctgctggatccttctcagaaaatcctgtaccgggacgtgatgagagagacataccggaatctgacctccgtgggcatcaactgggaatgttgggaccttgaagcctgcttcagaagcctgggaagaaacctgagagtgcaggtggtgaagagaaagtgcgagctgaccaacagcggcccctgcgccgagggcggcccaagcagcggcgcccctcctcccagcggcggcagcccagccggctccccaacctctaccgaggagggcacctctgagtccgccacccccgagagcggccctggcacctccaccgagcccagcgagggcagcgcacccggcagccctgccggcagccccacctccacagaggagggaaccagcaccgagcccagcgaaggcagcgccccaggcaccagcaccgagcctagtgagcaggagattaaacggatcaacaagatcagaagaagacttgtgaaagacagcaacaccaagaaggccggcaagacaggccccatgaaaaccctgctggttagagtgatgacacccgatctgagagagcggctggaaaacctgagaaagaagcctgaaaatatcccccagcccatcagcaatacatctagagccaacctgaataagctgctgaccgattacaccgaaatgaagaaggcgatcctgcatgtgtactgggaagagttccagaaggaccctgtgggcctgatgagccgggtggcccagcctgccagcaagaagatcgatcagaacaagctgaaacctgagatggacgagaagggcaacctgaccaccgccggctttgcctgctctcagtgtggccagcccctgttcgtgtacaagctggagcaggtgtctgagaagggcaaggcttacaccaactacttcggacggtgcaatgtggccgagcacgaaaagctgatcctgctggcccagctgaagcccgagaaggatagcgacgaagccgtgacatatagcctgggaaagtttgggcagagggccctggatttctacagcattcatgtgaccaaggagtccacccaccccgtgaagcccctggcccagatcgccggaaacagatacgcctccggacctgtgggaaaggccctgagcgacgcatgtatgggcacaatcgcctccttcctgtctaagtaccaggacatcatcatcgaacaccagaaggtggtgaagggcaaccagaagagactggagagcctgcgggagctggccggcaaggaaaacctggaataccctagcgtgaccctgccacctcagcctcacaccaaggagggcgttgatgcctacaacgaagtgatcgcccgggtgcgaatgtgggtgaacctgaacctgtggcagaagctgaagctaagcagagatgatgccaagcctctgctgagactgaagggattcccttcctttcctctggtcgagagacaggccaacgaagtggactggtgggacatggtgtgtaacgtgaagaagctgatcaacgagaaaaaggaggatggcaaggtgttttggcagaatctggctggctacaagagacaggaagccctgagaccatacctgagcagcgaggaagatcggaagaagggaaagaaattcgctcggtaccagctgggcgacctgctgctgcacctggaaaagaagcacggcgaggactggggaaaggtgtacgacgaggcctgggagcggattgacaagaaagtggaaggcctgagcaagcacatcaagctggaagaggaacggagaagcgaggacgcccagagcaaggccgccctgaccgactggctgcgggctaaggccagcttcgtgatcgagggcctgaaggaggccgacaaggacgagttctgcagatgcgagctgaagctgcagaagtggtacggggacctgcggggaaagcccttcgccatcgaagccgagaacagcatcctggacatcagcggcttcagcaagcagtacaactgtgccttcatctggcagaaggacggcgtgaagaagctgaacctgtacctgatcatcaactacttcaagggcggcaagctgcggttcaagaagatcaaacctgaagccttcgaagccaacagattctacaccgtgatcaacaaaaagagcggcgagatcgtgcccatggaggtgaacttcaacttcgacgaccccaacctgatcatcctgcctctggcctttggcaagagacagggcagagaattcatctggaacgacctgctgtccctggaaaccggcagcctgaagctggccaacggaagagtgatcgagaagacactgtacaacagaagaacccggcaggatgagcctgccctgttcgtggccctgaccttcgagcggcgggaggtcctggactcctccaatatcaaaccaatgaacctgatcggcgtggcaagaggcgaaaacatccccgccgtgatcgccctgaccgaccccgagggctgcccactgagccggtttaaggatagcctgggaaacccaacccacatcctgagaatcggcgagagctataaggagaagcagcggaccatccaggccaagaaggaggtggagcagcggagagccggcggctacagccggaagtacgccagcaaagccaagaatctggcagacgatatggtgagaaacaccgctagagatctgctgtactacgccgtgacccaggatgccatgctgatcttcgccaacctgagccggggcttcggccggcagggcaagcggaccttcatggccgagagacagtacacacggatggaggactggctgaccgccaagctggcctacgagggcctgagcaagacctacctgtccaagacactggcccagtacacctccaagacatgcagcaactgtgggtttaccatcaccagcgccgactacgacagggtgctggagaagctgaagaagacagcaacaggctggatgaccacaattaacggcaaggagctgaaggtggagggccagattacctactacaacagatacaagagacagaacgtagtcaaggacctgtccgtcgagctggatagactgagcgaagaatctgtgaacaacgacatctcctcctggacaaagggcagaagcggagaagctctgagcctcctgaagaaaagattctcccatagacccgtgcaggagaagttcgtgtgcctgaactgcggcttcgagacacacgcagccgagcaagccgccctgaacatcgccagatcctggctgttcctgcggagccaggagtacaagaaataccagacaaacaagacaaccggcaacaccgataagagagccttcgtcgagacctggcagtccttttaccggaagaagcttaaggaggtgtggaaacctgccgtgcggtctggcggatctggcggaggctccgaggagctgcccgtggccttcgaggacgtggccgtgtacttcaccagggaggagtggggcatgctggacaagaggaggaaggagctgtacagggacgtgatgaggaggaactacgagctgctggccagcctgggccccgccgccgccaagcccgacctgatcagcaagctggagaggggcgccgccccctggatcaaggaccccaacggccccaagtggggcaagggcaagaagaagatggtgggcggcccaagcagcggcgcccctcctcccagcggcggcagcccagccggctccccaacctctaccgaggagggcacctctgagtccgccacccccgagagcggccctggcacctccaccgagcccagcgagggcagcgcacccggcagccctgccggcagccccacctccacagaggagggaaccagcaccgagcccagcgaaggcagcgccccaggcaccagcaccgagcctagtgagcaggagattaaacggatcaacaagatcagaagaagacttgtgaaagacagcaacaccaagaaggccggcaagacaggccccatgaaaaccctgctggttagagtgatgacacccgatctgagagagcggctggaaaacctgagaaagaagcctgaaaatatcccccagcccatcagcaatacatctagagccaacctgaataagctgctgaccgattacaccgaaatgaagaaggcgatcctgcatgtgtactgggaagagttccagaaggaccctgtgggcctgatgagccgggtggcccagcctgccagcaagaagatcgatcagaacaagctgaaacctgagatggacgagaagggcaacctgaccaccgccggctttgcctgctctcagtgtggccagcccctgttcgtgtacaagctggagcaggtgtctgagaagggcaaggcttacaccaactacttcggacggtgcaatgtggccgagcacgaaaagctgatcctgctggcccagctgaagcccgagaaggatagcgacgaagccgtgacatatagcctgggaaagtttgggcagagggccctggatttctacagcattcatgtgaccaaggagtccacccaccccgtgaagcccctggcccagatcgccggaaacagatacgcctccggacctgtgggaaaggccctgagcgacgcatgtatgggcacaatcgcctccttcctgtctaagtaccaggacatcatcatcgaacaccagaaggtggtgaagggcaaccagaagagactggagagcctgcgggagctggccggcaaggaaaacctggaataccctagcgtgaccctgccacctcagcctcacaccaaggagggcgttgatgcctacaacgaagtgatcgcccgggtgcgaatgtgggtgaacctgaacctgtggcagaagctgaagctaagcagagatgatgccaagcctctgctgagactgaagggattcccttcctttcctctggtcgagagacaggccaacgaagtggactggtgggacatggtgtgtaacgtgaagaagctgatcaacgagaaaaaggaggatggcaaggtgttttggcagaatctggctggctacaagagacaggaagccctgagaccatacctgagcagcgaggaagatcggaagaagggaaagaaattcgctcggtaccagctgggcgacctgctgctgcacctggaaaagaagcacggcgaggactggggaaaggtgtacgacgaggcctgggagcggattgacaagaaagtggaaggcctgagcaagcacatcaagctggaagaggaacggagaagcgaggacgcccagagcaaggccgccctgaccgactggctgcgggctaaggccagcttcgtgatcgagggcctgaaggaggccgacaaggacgagttctgcagatgcgagctgaagctgcagaagtggtacggggacctgcggggaaagcccttcgccatcgaagccgagaacagcatcctggacatcagcggcttcagcaagcagtacaactgtgccttcatctggcagaaggacggcgtgaagaagctgaacctgtacctgatcatcaactacttcaagggcggcaagctgcggttcaagaagatcaaacctgaagccttcgaagccaacagattctacaccgtgatcaacaaaaagagcggcgagatcgtgcccatggaggtgaacttcaacttcgacgaccccaacctgatcatcctgcctctggcctttggcaagagacagggcagagaattcatctggaacgacctgctgtccctggaaaccggcagcctgaagctggccaacggaagagtgatcgagaagacactgtacaacagaagaacccggcaggatgagcctgccctgttcgtggccctgaccttcgagcggcgggaggtcctggactcctccaatatcaaaccaatgaacctgatcggcgtggcaagaggcgaaaacatccccgccgtgatcgccctgaccgaccccgagggctgcccactgagccggtttaaggatagcctgggaaacccaacccacatcctgagaatcggcgagagctataaggagaagcagcggaccatccaggccaagaaggaggtggagcagcggagagccggcggctacagccggaagtacgccagcaaagccaagaatctggcagacgatatggtgagaaacaccgctagagatctgctgtactacgccgtgacccaggatgccatgctgatcttcgccaacctgagccggggcttcggccggcagggcaagcggaccttcatggccgagagacagtacacacggatggaggactggctgaccgccaagctggcctacgagggcctgagcaagacctacctgtccaagacactggcccagtacacctccaagacatgcagcaactgtgggtttaccatcaccagcgccgactacgacagggtgctggagaagctgaagaagacagcaacaggctggatgaccacaattaacggcaaggagctgaaggtggagggccagattacctactacaacagatacaagagacagaacgtagtcaaggacctgtccgtcgagctggatagactgagcgaagaatctgtgaacaacgacatctcctcctggacaaagggcagaagcggagaagctctgagcctcctgaagaaaagattctcccatagacccgtgcaggagaagttcgtgtgcctgaactgcggcttcgagacacacgcagccgagcaagccgccctgaacatcgccagatcctggctgttcctgcggagccaggagtacaagaaataccagacaaacaagacaaccggcaacaccgataagagagccttcgtcgagacctggcagtccttttaccggaagaagcttaaggaggtgtggaaacctgccgtgcggtctggcggatctggcggaggctcctgaggagctgcccgtggccttcgaggacgtggccgtgtacttcaccagggaggagtggggcatgctggacaagaggaggaaggagctgtacagggacgtgatgaggaggaactacgagctgctggccagcctgggccccgccgccgccaagcccgacctgatcagcaagctggagaggggcgccgccccctggatcaaggaccccaacggccccaagtggggcaagggcaagaagaagatggtgggatctggctccggcagcggccccaagaaaaagagaaaagtctaagctgccttctgcggggcttgccttctggccatgcccttcttctctcccttgcacctgtacctcttggtctttgaataaagcctgagtaggaaggctagcaaaaaaaaaaaaaaaaaaaaaaaaaaaaaaaaaaaaaaaaaaaaaaaaaaaaaaaaaaaaaaaaaaaaaaaaaaaaaaaa

SEQ ID NO: 16352 - RNA, 9485 nt, synthetic construct
  source 1..9485: mol_type = other RNA
aggaaataagagagaaaagaagagtaagaagaaatataagagccaccatggcccctaagaagaagcgtaaagtgagccggatggaacgcctcgtctacgaggtgcggcagaagtgcagaaacatcgaggacatctgcatctcctgcggatctctgaacgtgaccctggagcacccactgttcatcggcggcatgtgccagaactgtaaaaactgttttctggagtgtgcctatcaatacgacgatgacggctaccagagctactgcaccatctgttgcggcggaagagaggtgctgatgtgtggaaataacaactgctgccggtgcttctgcgtggaatgcgtggacctgctggtgggccccggcgccgcccaggccgctattaaggaagatccttggaactgctacatgtgcggccacaagggcacatacggcctgctgagacggagagaggactggcctagcagactgcagatgttcttcgccaataaccacgaccaggagttcgacccccctaaggtgtaccctcccgtccccgccgagaagagaaagcccatccgggtcctgagcctgttcgatggcatcgccaccggtctgctggtgctgaaggacctgggcatccaggtggataggtacattgcctccgaggtgtgcgaggactccatcaccgtgggaatggtgcgtcatcagggcaagatcatgtacgtgggcgacgtgcggagcgtgacacagaagcatatccaggagtggggccctttcgacctggtgatcggcggcagcccttgcaatgacctgagcatcgtgaacccagcccggaagggcctgtacgagggaaccggcagactgttcttcgagttttacagactgctgcacgacgcccggcctaaggaaggcgacgaccggcccttcttttggctgttcgagaatgtggtggccatgggagtcagcgacaagcgggatattagccggttcctggagagcaaccccgtgatgatcgatgccaaggaagtgagcgccgcccaccgggccagatacttctggggcaatctgcctggcatgaacagacccctggccagcaccgtgaacgacaagctggagctgcaggagtgcctggagcacggccggatcgccaagttcagcaaggtgagaaccatcaccacccgaagcaacagcatcaaacaaggcaaggaccagcactttcctgtgttcatgaacgagaaggaggacatcctgtggtgtaccgagatggagagagtgttcgggttcccagtccactacacagatgtcagcaacatgtctagactggccagacagagactgctgggaagaagctggtccgtccctgtgatcagacacctgttcgcccctctgaaggagtacttcgcctgcgtgagcagcggcaacagcaacgccaacagccggggccccagcttctctagcggcctggtgccactgtccctgagagggagccacatgggccccatggagatctacaaaaccgtgagcgcctggaagcggcagcctgtgcgcgtgctgagcctgtttcggaatatcgataaagtcctgaaaagcctgggattcctggagagcggctctggctccggcggtggcaccctgaagtacgtggaggatgtgacaaacgtggtcagacgggatgtggagaagtggggccccttcgatctggtgtacggcagcacccaacccctgggcagctcttgtgaccggtgccctggctggtacatgtttcagttccaccggatcctgcagtacgccctgccgagacaggagtcccagcggccattcttttggattttcatggacaacttgctgctgaccgaggatgaccaggaaactaccactcggttcctgcagaccgaagccgtgaccctgcaggacgtgagaggccgggactaccagaacgccatgcgggtgtggtccaacatccctggactgaaaagcaagcacgcacctctgacccctaaagaagaggagtacctgcaggcccaggtgcggagcagaagcaagctggacgcccctaaggtggatctgctggtgaagaattgcctcctgcccctgagagagtacttcaagtatttcagccagaatagtctgcccctgggaggcagcggcggcggcgccctggtgacatttgaggacgtcgccgtgcggttcacccaggaggaatgggctctgctggatccttctcagaaaatcctgtaccgggacgtgatgagagagacataccggaatctgacctccgtgggcatcaactgggaatgttgggaccttgaagcctgcttcagaagcctgggaagaaacctgagagtgcaggtggtgaagagaaagtgcgagctgaccaacagcggcccctgcgccgagggcggcccaagcagcggcgcccctcctcccagcggcggcagcccagccggctccccaacctctaccgaggagggcacctctgagtccgccacccccgagagcggccctggcacctccaccgagcccagcgagggcagcgcacccggcagccctgccggcagccccacctccacagaggagggaaccagcaccgagcccagcgaaggcagcgccccaggcaccagcaccgagcctagtgagcaggagattaaacggatcaacaagatcagaagaagacttgtgaaagacagcaacaccaagaaggccggcaagacaggccccatgaaaaccctgctggttagagtgatgacacccgatctgagagagcggctggaaaacctgagaaagaagcctgaaaatatcccccagcccatcagcaatacatctagagccaacctgaataagctgctgaccgattacaccgaaatgaagaaggcgatcctgcatgtgtactgggaagagttccagaaggaccctgtgggcctgatgagccgggtggcccagcctgccagcaagaagatcgatcagaacaagctgaaacctgagatggacgagaagggcaacctgaccaccgccggctttgcctgctctcagtgtggccagcccctgttcgtgtacaagctggagcaggtgtctgagaagggcaaggcttacaccaactacttcggacggtgcaatgtggccgagcacgaaaagctgatcctgctggcccagctgaagcccgagaaggatagcgacgaagccgtgacatatagcctgggaaagtttgggcagagggccctggatttctacagcattcatgtgaccaaggagtccacccaccccgtgaagcccctggcccagatcgccggaaacagatacgcctccggacctgtgggaaaggccctgagcgacgcatgtatgggcacaatcgcctccttcctgtctaagtaccaggacatcatcatcgaacaccagaaggtggtgaagggcaaccagaagagactggagagcctgcgggagctggccggcaaggaaaacctggaataccctagcgtgaccctgccacctcagcctcacaccaaggagggcgttgatgcctacaacgaagtgatcgcccgggtgcgaatgtgggtgaacctgaacctgtggcagaagctgaagctaagcagagatgatgccaagcctctgctgagactgaagggattcccttcctttcctctggtcgagagacaggccaacgaagtggactggtgggacatggtgtgtaacgtgaagaagctgatcaacgagaaaaaggaggatggcaaggtgttttggcagaatctggctggctacaagagacaggaagccctgagaccatacctgagcagcgaggaagatcggaagaagggaaagaaattcgctcggtaccagctgggcgacctgctgctgcacctggaaaagaagcacggcgaggactggggaaaggtgtacgacgaggcctgggagcggattgacaagaaagtggaaggcctgagcaagcacatcaagctggaagaggaacggagaagcgaggacgcccagagcaaggccgccctgaccgactggctgcgggctaaggccagcttcgtgatcgagggcctgaaggaggccgacaaggacgagttctgcagatgcgagctgaagctgcagaagtggtacggggacctgcggggaaagcccttcgccatcgaagccgagaacagcatcctggacatcagcggcttcagcaagcagtacaactgtgccttcatctggcagaaggacggcgtgaagaagctgaacctgtacctgatcatcaactacttcaagggcggcaagctgcggttcaagaagatcaaacctgaagccttcgaagccaacagattctacaccgtgatcaacaaaaagagcggcgagatcgtgcccatggaggtgaacttcaacttcgacgaccccaacctgatcatcctgcctctggcctttggcaagagacagggcagagaattcatctggaacgacctgctgtccctggaaaccggcagcctgaagctggccaacggaagagtgatcgagaagacactgtacaacagaagaacccggcaggatgagcctgccctgttcgtggccctgaccttcgagcggcgggaggtcctggactcctccaatatcaaaccaatgaacctgatcggcgtggcaagaggcgaaaacatccccgccgtgatcgccctgaccgaccccgagggctgcccactgagccggtttaaggatagcctgggaaacccaacccacatcctgagaatcggcgagagctataaggagaagcagcggaccatccaggccaagaaggaggtggagcagcggagagccggcggctacagccggaagtacgccagcaaagccaagaatctggcagacgatatggtgagaaacaccgctagagatctgctgtactacgccgtgacccaggatgccatgctgatcttcgccaacctgagccggggcttcggccggcagggcaagcggaccttcatggccgagagacagtacacacggatggaggactggctgaccgccaagctggcctacgagggcctgagcaagacctacctgtccaagacactggcccagtacacctccaagacatgcagcaactgtgggtttaccatcaccagcgccgactacgacagggtgctggagaagctgaagaagacagcaacaggctggatgaccacaattaacggcaaggagctgaaggtggagggccagattacctactacaacagatacaagagacagaacgtagtcaaggacctgtccgtcgagctggatagactgagcgaagaatctgtgaacaacgacatctcctcctggacaaagggcagaagcggagaagctctgagcctcctgaagaaaagattctcccatagacccgtgcaggagaagttcgtgtgcctgaactgcggcttcgagacacacgcagccgagcaagccgccctgaacatcgccagatcctggctgttcctgcggagccaggagtacaagaaataccagacaaacaagacaaccggcaacaccgataagagagccttcgtcgagacctggcagtccttttaccggaagaagcttaaggaggtgtggaaacctgccgtgcggtctggcggatctggcggaggctcccccctggagctggtgaccttcaaggacgtggccgtggacttcagctgggaggagtggggccacctggagcccagccagaaggagctgtacagggaggtgatgctggagaactacaggaacctggtgtgcctgggcctggccatcagcaagcccgacgtgatcttccagctggagcagggcgaggccccctggatgcccgagagggagggccccaagtgcaggtgcgccgactggaagaccaggggcggcccaagcagcggcgcccctcctcccagcggcggcagcccagccggctccccaacctctaccgaggagggcacctctgagtccgccacccccgagagcggccctggcacctccaccgagcccagcgagggcagcgcacccggcagccctgccggcagccccacctccacagaggagggaaccagcaccgagcccagcgaaggcagcgccccaggcaccagcaccgagcctagtgagcaggagattaaacggatcaacaagatcagaagaagacttgtgaaagacagcaacaccaagaaggccggcaagacaggccccatgaaaaccctgctggttagagtgatgacacccgatctgagagagcggctggaaaacctgagaaagaagcctgaaaatatcccccagcccatcagcaatacatctagagccaacctgaataagctgctgaccgattacaccgaaatgaagaaggcgatcctgcatgtgtactgggaagagttccagaaggaccctgtgggcctgatgagccgggtggcccagcctgccagcaagaagatcgatcagaacaagctgaaacctgagatggacgagaagggcaacctgaccaccgccggctttgcctgctctcagtgtggccagcccctgttcgtgtacaagctggagcaggtgtctgagaagggcaaggcttacaccaactacttcggacggtgcaatgtggccgagcacgaaaagctgatcctgctggcccagctgaagcccgagaaggatagcgacgaagccgtgacatatagcctgggaaagtttgggcagagggccctggatttctacagcattcatgtgaccaaggagtccacccaccccgtgaagcccctggcccagatcgccggaaacagatacgcctccggacctgtgggaaaggccctgagcgacgcatgtatgggcacaatcgcctccttcctgtctaagtaccaggacatcatcatcgaacaccagaaggtggtgaagggcaaccagaagagactggagagcctgcgggagctggccggcaaggaaaacctggaataccctagcgtgaccctgccacctcagcctcacaccaaggagggcgttgatgcctacaacgaagtgatcgcccgggtgcgaatgtgggtgaacctgaacctgtggcagaagctgaagctaagcagagatgatgccaagcctctgctgagactgaagggattcccttcctttcctctggtcgagagacaggccaacgaagtggactggtgggacatggtgtgtaacgtgaagaagctgatcaacgagaaaaaggaggatggcaaggtgttttggcagaatctggctggctacaagagacaggaagccctgagaccatacctgagcagcgaggaagatcggaagaagggaaagaaattcgctcggtaccagctgggcgacctgctgctgcacctggaaaagaagcacggcgaggactggggaaaggtgtacgacgaggcctgggagcggattgacaagaaagtggaaggcctgagcaagcacatcaagctggaagaggaacggagaagcgaggacgcccagagcaaggccgccctgaccgactggctgcgggctaaggccagcttcgtgatcgagggcctgaaggaggccgacaaggacgagttctgcagatgcgagctgaagctgcagaagtggtacggggacctgcggggaaagcccttcgccatcgaagccgagaacagcatcctggacatcagcggcttcagcaagcagtacaactgtgccttcatctggcagaaggacggcgtgaagaagctgaacctgtacctgatcatcaactacttcaagggcggcaagctgcggttcaagaagatcaaacctgaagccttcgaagccaacagattctacaccgtgatcaacaaaaagagcggcgagatcgtgcccatggaggtgaacttcaacttcgacgaccccaacctgatcatcctgcctctggcctttggcaagagacagggcagagaattcatctggaacgacctgctgtccctggaaaccggcagcctgaagctggccaacggaagagtgatcgagaagacactgtacaacagaagaacccggcaggatgagcctgccctgttcgtggccctgaccttcgagcggcgggaggtcctggactcctccaatatcaaaccaatgaacctgatcggcgtggcaagaggcgaaaacatccccgccgtgatcgccctgaccgaccccgagggctgcccactgagccggtttaaggatagcctgggaaacccaacccacatcctgagaatcggcgagagctataaggagaagcagcggaccatccaggccaagaaggaggtggagcagcggagagccggcggctacagccggaagtacgccagcaaagccaagaatctggcagacgatatggtgagaaacaccgctagagatctgctgtactacgccgtgacccaggatgccatgctgatcttcgccaacctgagccggggcttcggccggcagggcaagcggaccttcatggccgagagacagtacacacggatggaggactggctgaccgccaagctggcctacgagggcctgagcaagacctacctgtccaagacactggcccagtacacctccaagacatgcagcaactgtgggtttaccatcaccagcgccgactacgacagggtgctggagaagctgaagaagacagcaacaggctggatgaccacaattaacggcaaggagctgaaggtggagggccagattacctactacaacagatacaagagacagaacgtagtcaaggacctgtccgtcgagctggatagactgagcgaagaatctgtgaacaacgacatctcctcctggacaaagggcagaagcggagaagctctgagcctcctgaagaaaagattctcccatagacccgtgcaggagaagttcgtgtgcctgaactgcggcttcgagacacacgcagccgagcaagccgccctgaacatcgccagatcctggctgttcctgcggagccaggagtacaagaaataccagacaaacaagacaaccggcaacaccgataagagagccttcgtcgagacctggcagtccttttaccggaagaagcttaaggaggtgtggaaacctgccgtgcggtctggcggatctggcggaggctcctcccctggagctggtgaccttcaaggacgtggccgtggacttcagctgggaggagtggggccacctggagcccagccagaaggagctgtacagggaggtgatgctggagaactacaggaacctggtgtgcctgggcctggccatcagcaagcccgacgtgatcttccagctggagcagggcgaggccccctggatgcccgagagggagggccccaagtgcaggtgcgccgactggaagaccaggggatctggctccggcagcggccccaagaaaaagagaaaagtctaagctgccttctgcggggcttgccttctggccatgcccttcttctctcccttgcacctgtacctcttggtctttgaataaagcctgagtaggaaggctagcaaaaaaaaaaaaaaaaaaaaaaaaaaaaaaaaaaaaaaaaaaaaaaaaaaaaaaaaaaaaaaaaaaaaaaaaaaaaaaaa

SEQ ID NO: 16353 - RNA, 9485 nt, synthetic construct
  source 1..9485: mol_type = other RNA
aggaaataagagagaaaagaagagtaagaagaaatataagagccaccatggcccctaagaagaagcgtaaagtgagccggatggaacgcctcgtctacgaggtgcggcagaagtgcagaaacatcgaggacatctgcatctcctgcggatctctgaacgtgaccctggagcacccactgttcatcggcggcatgtgccagaactgtaaaaactgttttctggagtgtgcctatcaatacgacgatgacggctaccagagctactgcaccatctgttgcggcggaagagaggtgctgatgtgtggaaataacaactgctgccggtgcttctgcgtggaatgcgtggacctgctggtgggccccggcgccgcccaggccgctattaaggaagatccttggaactgctacatgtgcggccacaagggcacatacggcctgctgagacggagagaggactggcctagcagactgcagatgttcttcgccaataaccacgaccaggagttcgacccccctaaggtgtaccctcccgtccccgccgagaagagaaagcccatccgggtcctgagcctgttcgatggcatcgccaccggtctgctggtgctgaaggacctgggcatccaggtggataggtacattgcctccgaggtgtgcgaggactccatcaccgtgggaatggtgcgtcatcagggcaagatcatgtacgtgggcgacgtgcggagcgtgacacagaagcatatccaggagtggggccctttcgacctggtgatcggcggcagcccttgcaatgacctgagcatcgtgaacccagcccggaagggcctgtacgagggaaccggcagactgttcttcgagttttacagactgctgcacgacgcccggcctaaggaaggcgacgaccggcccttcttttggctgttcgagaatgtggtggccatgggagtcagcgacaagcgggatattagccggttcctggagagcaaccccgtgatgatcgatgccaaggaagtgagcgccgcccaccgggccagatacttctggggcaatctgcctggcatgaacagacccctggccagcaccgtgaacgacaagctggagctgcaggagtgcctggagcacggccggatcgccaagttcagcaaggtgagaaccatcaccacccgaagcaacagcatcaaacaaggcaaggaccagcactttcctgtgttcatgaacgagaaggaggacatcctgtggtgtaccgagatggagagagtgttcgggttcccagtccactacacagatgtcagcaacatgtctagactggccagacagagactgctgggaagaagctggtccgtccctgtgatcagacacctgttcgcccctctgaaggagtacttcgcctgcgtgagcagcggcaacagcaacgccaacagccggggccccagcttctctagcggcctggtgccactgtccctgagagggagccacatgggccccatggagatctacaaaaccgtgagcgcctggaagcggcagcctgtgcgcgtgctgagcctgtttcggaatatcgataaagtcctgaaaagcctgggattcctggagagcggctctggctccggcggtggcaccctgaagtacgtggaggatgtgacaaacgtggtcagacgggatgtggagaagtggggccccttcgatctggtgtacggcagcacccaacccctgggcagctcttgtgaccggtgccctggctggtacatgtttcagttccaccggatcctgcagtacgccctgccgagacaggagtcccagcggccattcttttggattttcatggacaacttgctgctgaccgaggatgaccaggaaactaccactcggttcctgcagaccgaagccgtgaccctgcaggacgtgagaggccgggactaccagaacgccatgcgggtgtggtccaacatccctggactgaaaagcaagcacgcacctctgacccctaaagaagaggagtacctgcaggcccaggtgcggagcagaagcaagctggacgcccctaaggtggatctgctggtgaagaattgcctcctgcccctgagagagtacttcaagtatttcagccagaatagtctgcccctgggaggcagcggcggcggcgccctggtgacatttgaggacgtcgccgtgcggttcacccaggaggaatgggctctgctggatccttctcagaaaatcctgtaccgggacgtgatgagagagacataccggaatctgacctccgtgggcatcaactgggaatgttgggaccttgaagcctgcttcagaagcctgggaagaaacctgagagtgcaggtggtgaagagaaagtgcgagctgaccaacagcggcccctgcgccgagggcggcccaagcagcggcgcccctcctcccagcggcggcagcccagccggctccccaacctctaccgaggagggcacctctgagtccgccacccccgagagcggccctggcacctccaccgagcccagcgagggcagcgcacccggcagccctgccggcagccccacctccacagaggagggaaccagcaccgagcccagcgaaggcagcgccccaggcaccagcaccgagcctagtgagcaggagattaaacggatcaacaagatcagaagaagacttgtgaaagacagcaacaccaagaaggccggcaagacaggccccatgaaaaccctgctggttagagtgatgacacccgatctgagagagcggctggaaaacctgagaaagaagcctgaaaatatcccccagcccatcagcaatacatctagagccaacctgaataagctgctgaccgattacaccgaaatgaagaaggcgatcctgcatgtgtactgggaagagttccagaaggaccctgtgggcctgatgagccgggtggcccagcctgccagcaagaagatcgatcagaacaagctgaaacctgagatggacgagaagggcaacctgaccaccgccggctttgcctgctctcagtgtggccagcccctgttcgtgtacaagctggagcaggtgtctgagaagggcaaggcttacaccaactacttcggacggtgcaatgtggccgagcacgaaaagctgatcctgctggcccagctgaagcccgagaaggatagcgacgaagccgtgacatatagcctgggaaagtttgggcagagggccctggatttctacagcattcatgtgaccaaggagtccacccaccccgtgaagcccctggcccagatcgccggaaacagatacgcctccggacctgtgggaaaggccctgagcgacgcatgtatgggcacaatcgcctccttcctgtctaagtaccaggacatcatcatcgaacaccagaaggtggtgaagggcaaccagaagagactggagagcctgcgggagctggccggcaaggaaaacctggaataccctagcgtgaccctgccacctcagcctcacaccaaggagggcgttgatgcctacaacgaagtgatcgcccgggtgcgaatgtgggtgaacctgaacctgtggcagaagctgaagctaagcagagatgatgccaagcctctgctgagactgaagggattcccttcctttcctctggtcgagagacaggccaacgaagtggactggtgggacatggtgtgtaacgtgaagaagctgatcaacgagaaaaaggaggatggcaaggtgttttggcagaatctggctggctacaagagacaggaagccctgagaccatacctgagcagcgaggaagatcggaagaagggaaagaaattcgctcggtaccagctgggcgacctgctgctgcacctggaaaagaagcacggcgaggactggggaaaggtgtacgacgaggcctgggagcggattgacaagaaagtggaaggcctgagcaagcacatcaagctggaagaggaacggagaagcgaggacgcccagagcaaggccgccctgaccgactggctgcgggctaaggccagcttcgtgatcgagggcctgaaggaggccgacaaggacgagttctgcagatgcgagctgaagctgcagaagtggtacggggacctgcggggaaagcccttcgccatcgaagccgagaacagcatcctggacatcagcggcttcagcaagcagtacaactgtgccttcatctggcagaaggacggcgtgaagaagctgaacctgtacctgatcatcaactacttcaagggcggcaagctgcggttcaagaagatcaaacctgaagccttcgaagccaacagattctacaccgtgatcaacaaaaagagcggcgagatcgtgcccatggaggtgaacttcaacttcgacgaccccaacctgatcatcctgcctctggcctttggcaagagacagggcagagaattcatctggaacgacctgctgtccctggaaaccggcagcctgaagctggccaacggaagagtgatcgagaagacactgtacaacagaagaacccggcaggatgagcctgccctgttcgtggccctgaccttcgagcggcgggaggtcctggactcctccaatatcaaaccaatgaacctgatcggcgtggcaagaggcgaaaacatccccgccgtgatcgccctgaccgaccccgagggctgcccactgagccggtttaaggatagcctgggaaacccaacccacatcctgagaatcggcgagagctataaggagaagcagcggaccatccaggccaagaaggaggtggagcagcggagagccggcggctacagccggaagtacgccagcaaagccaagaatctggcagacgatatggtgagaaacaccgctagagatctgctgtactacgccgtgacccaggatgccatgctgatcttcgccaacctgagccggggcttcggccggcagggcaagcggaccttcatggccgagagacagtacacacggatggaggactggctgaccgccaagctggcctacgagggcctgagcaagacctacctgtccaagacactggcccagtacacctccaagacatgcagcaactgtgggtttaccatcaccagcgccgactacgacagggtgctggagaagctgaagaagacagcaacaggctggatgaccacaattaacggcaaggagctgaaggtggagggccagattacctactacaacagatacaagagacagaacgtagtcaaggacctgtccgtcgagctggatagactgagcgaagaatctgtgaacaacgacatctcctcctggacaaagggcagaagcggagaagctctgagcctcctgaagaaaagattctcccatagacccgtgcaggagaagttcgtgtgcctgaactgcggcttcgagacacacgcagccgagcaagccgccctgaacatcgccagatcctggctgttcctgcggagccaggagtacaagaaataccagacaaacaagacaaccggcaacaccgataagagagccttcgtcgagacctggcagtccttttaccggaagaagcttaaggaggtgtggaaacctgccgtgcggtctggcggatctggcggaggctccgagatgggcctgctgaccttcagggacatcgccatcgagttcagcctggccgagtggcagtgcctggaccacgcccagaggaacctgtacagggacgtgatgctggagaactacaggaacctggtgagcctgggcatcgccgtgagcaagcccgacctgatcacctgcctggagcagaacaaggagcccaggaacatcaagaggaacgagatggtggccaagcaccccggcagggagaagagcggcggcccaagcagcggcgcccctcctcccagcggcggcagcccagccggctccccaacctctaccgaggagggcacctctgagtccgccacccccgagagcggccctggcacctccaccgagcccagcgagggcagcgcacccggcagccctgccggcagccccacctccacagaggagggaaccagcaccgagcccagcgaaggcagcgccccaggcaccagcaccgagcctagtgagcaggagattaaacggatcaacaagatcagaagaagacttgtgaaagacagcaacaccaagaaggccggcaagacaggccccatgaaaaccctgctggttagagtgatgacacccgatctgagagagcggctggaaaacctgagaaagaagcctgaaaatatcccccagcccatcagcaatacatctagagccaacctgaataagctgctgaccgattacaccgaaatgaagaaggcgatcctgcatgtgtactgggaagagttccagaaggaccctgtgggcctgatgagccgggtggcccagcctgccagcaagaagatcgatcagaacaagctgaaacctgagatggacgagaagggcaacctgaccaccgccggctttgcctgctctcagtgtggccagcccctgttcgtgtacaagctggagcaggtgtctgagaagggcaaggcttacaccaactacttcggacggtgcaatgtggccgagcacgaaaagctgatcctgctggcccagctgaagcccgagaaggatagcgacgaagccgtgacatatagcctgggaaagtttgggcagagggccctggatttctacagcattcatgtgaccaaggagtccacccaccccgtgaagcccctggcccagatcgccggaaacagatacgcctccggacctgtgggaaaggccctgagcgacgcatgtatgggcacaatcgcctccttcctgtctaagtaccaggacatcatcatcgaacaccagaaggtggtgaagggcaaccagaagagactggagagcctgcgggagctggccggcaaggaaaacctggaataccctagcgtgaccctgccacctcagcctcacaccaaggagggcgttgatgcctacaacgaagtgatcgcccgggtgcgaatgtgggtgaacctgaacctgtggcagaagctgaagctaagcagagatgatgccaagcctctgctgagactgaagggattcccttcctttcctctggtcgagagacaggccaacgaagtggactggtgggacatggtgtgtaacgtgaagaagctgatcaacgagaaaaaggaggatggcaaggtgttttggcagaatctggctggctacaagagacaggaagccctgagaccatacctgagcagcgaggaagatcggaagaagggaaagaaattcgctcggtaccagctgggcgacctgctgctgcacctggaaaagaagcacggcgaggactggggaaaggtgtacgacgaggcctgggagcggattgacaagaaagtggaaggcctgagcaagcacatcaagctggaagaggaacggagaagcgaggacgcccagagcaaggccgccctgaccgactggctgcgggctaaggccagcttcgtgatcgagggcctgaaggaggccgacaaggacgagttctgcagatgcgagctgaagctgcagaagtggtacggggacctgcggggaaagcccttcgccatcgaagccgagaacagcatcctggacatcagcggcttcagcaagcagtacaactgtgccttcatctggcagaaggacggcgtgaagaagctgaacctgtacctgatcatcaactacttcaagggcggcaagctgcggttcaagaagatcaaacctgaagccttcgaagccaacagattctacaccgtgatcaacaaaaagagcggcgagatcgtgcccatggaggtgaacttcaacttcgacgaccccaacctgatcatcctgcctctggcctttggcaagagacagggcagagaattcatctggaacgacctgctgtccctggaaaccggcagcctgaagctggccaacggaagagtgatcgagaagacactgtacaacagaagaacccggcaggatgagcctgccctgttcgtggccctgaccttcgagcggcgggaggtcctggactcctccaatatcaaaccaatgaacctgatcggcgtggcaagaggcgaaaacatccccgccgtgatcgccctgaccgaccccgagggctgcccactgagccggtttaaggatagcctgggaaacccaacccacatcctgagaatcggcgagagctataaggagaagcagcggaccatccaggccaagaaggaggtggagcagcggagagccggcggctacagccggaagtacgccagcaaagccaagaatctggcagacgatatggtgagaaacaccgctagagatctgctgtactacgccgtgacccaggatgccatgctgatcttcgccaacctgagccggggcttcggccggcagggcaagcggaccttcatggccgagagacagtacacacggatggaggactggctgaccgccaagctggcctacgagggcctgagcaagacctacctgtccaagacactggcccagtacacctccaagacatgcagcaactgtgggtttaccatcaccagcgccgactacgacagggtgctggagaagctgaagaagacagcaacaggctggatgaccacaattaacggcaaggagctgaaggtggagggccagattacctactacaacagatacaagagacagaacgtagtcaaggacctgtccgtcgagctggatagactgagcgaagaatctgtgaacaacgacatctcctcctggacaaagggcagaagcggagaagctctgagcctcctgaagaaaagattctcccatagacccgtgcaggagaagttcgtgtgcctgaactgcggcttcgagacacacgcagccgagcaagccgccctgaacatcgccagatcctggctgttcctgcggagccaggagtacaagaaataccagacaaacaagacaaccggcaacaccgataagagagccttcgtcgagacctggcagtccttttaccggaagaagcttaaggaggtgtggaaacctgccgtgcggtctggcggatctggcggaggctcctgagatgggcctgctgaccttcagggacatcgccatcgagttcagcctggccgagtggcagtgcctggaccacgcccagaggaacctgtacagggacgtgatgctggagaactacaggaacctggtgagcctgggcatcgccgtgagcaagcccgacctgatcacctgcctggagcagaacaaggagcccaggaacatcaagaggaacgagatggtggccaagcaccccggcagggagaagagcggatctggctccggcagcggccccaagaaaaagagaaaagtctaagctgccttctgcggggcttgccttctggccatgcccttcttctctcccttgcacctgtacctcttggtctttgaataaagcctgagtaggaaggctagcaaaaaaaaaaaaaaaaaaaaaaaaaaaaaaaaaaaaaaaaaaaaaaaaaaaaaaaaaaaaaaaaaaaaaaaaaaaaaaaa

SEQ ID NO: 16354 - RNA, 9485 nt, synthetic construct
  source 1..9485: mol_type = other RNA
aggaaataagagagaaaagaagagtaagaagaaatataagagccaccatggcccctaagaagaagcgtaaagtgagccggatggaacgcctcgtctacgaggtgcggcagaagtgcagaaacatcgaggacatctgcatctcctgcggatctctgaacgtgaccctggagcacccactgttcatcggcggcatgtgccagaactgtaaaaactgttttctggagtgtgcctatcaatacgacgatgacggctaccagagctactgcaccatctgttgcggcggaagagaggtgctgatgtgtggaaataacaactgctgccggtgcttctgcgtggaatgcgtggacctgctggtgggccccggcgccgcccaggccgctattaaggaagatccttggaactgctacatgtgcggccacaagggcacatacggcctgctgagacggagagaggactggcctagcagactgcagatgttcttcgccaataaccacgaccaggagttcgacccccctaaggtgtaccctcccgtccccgccgagaagagaaagcccatccgggtcctgagcctgttcgatggcatcgccaccggtctgctggtgctgaaggacctgggcatccaggtggataggtacattgcctccgaggtgtgcgaggactccatcaccgtgggaatggtgcgtcatcagggcaagatcatgtacgtgggcgacgtgcggagcgtgacacagaagcatatccaggagtggggccctttcgacctggtgatcggcggcagcccttgcaatgacctgagcatcgtgaacccagcccggaagggcctgtacgagggaaccggcagactgttcttcgagttttacagactgctgcacgacgcccggcctaaggaaggcgacgaccggcccttcttttggctgttcgagaatgtggtggccatgggagtcagcgacaagcgggatattagccggttcctggagagcaaccccgtgatgatcgatgccaaggaagtgagcgccgcccaccgggccagatacttctggggcaatctgcctggcatgaacagacccctggccagcaccgtgaacgacaagctggagctgcaggagtgcctggagcacggccggatcgccaagttcagcaaggtgagaaccatcaccacccgaagcaacagcatcaaacaaggcaaggaccagcactttcctgtgttcatgaacgagaaggaggacatcctgtggtgtaccgagatggagagagtgttcgggttcccagtccactacacagatgtcagcaacatgtctagactggccagacagagactgctgggaagaagctggtccgtccctgtgatcagacacctgttcgcccctctgaaggagtacttcgcctgcgtgagcagcggcaacagcaacgccaacagccggggccccagcttctctagcggcctggtgccactgtccctgagagggagccacatgggccccatggagatctacaaaaccgtgagcgcctggaagcggcagcctgtgcgcgtgctgagcctgtttcggaatatcgataaagtcctgaaaagcctgggattcctggagagcggctctggctccggcggtggcaccctgaagtacgtggaggatgtgacaaacgtggtcagacgggatgtggagaagtggggccccttcgatctggtgtacggcagcacccaacccctgggcagctcttgtgaccggtgccctggctggtacatgtttcagttccaccggatcctgcagtacgccctgccgagacaggagtcccagcggccattcttttggattttcatggacaacttgctgctgaccgaggatgaccaggaaactaccactcggttcctgcagaccgaagccgtgaccctgcaggacgtgagaggccgggactaccagaacgccatgcgggtgtggtccaacatccctggactgaaaagcaagcacgcacctctgacccctaaagaagaggagtacctgcaggcccaggtgcggagcagaagcaagctggacgcccctaaggtggatctgctggtgaagaattgcctcctgcccctgagagagtacttcaagtatttcagccagaatagtctgcccctgggaggcagcggcggcggcgccctggtgacatttgaggacgtcgccgtgcggttcacccaggaggaatgggctctgctggatccttctcagaaaatcctgtaccgggacgtgatgagagagacataccggaatctgacctccgtgggcatcaactgggaatgttgggaccttgaagcctgcttcagaagcctgggaagaaacctgagagtgcaggtggtgaagagaaagtgcgagctgaccaacagcggcccctgcgccgagggcggcccaagcagcggcgcccctcctcccagcggcggcagcccagccggctccccaacctctaccgaggagggcacctctgagtccgccacccccgagagcggccctggcacctccaccgagcccagcgagggcagcgcacccggcagccctgccggcagccccacctccacagaggagggaaccagcaccgagcccagcgaaggcagcgccccaggcaccagcaccgagcctagtgagcaggagattaaacggatcaacaagatcagaagaagacttgtgaaagacagcaacaccaagaaggccggcaagacaggccccatgaaaaccctgctggttagagtgatgacacccgatctgagagagcggctggaaaacctgagaaagaagcctgaaaatatcccccagcccatcagcaatacatctagagccaacctgaataagctgctgaccgattacaccgaaatgaagaaggcgatcctgcatgtgtactgggaagagttccagaaggaccctgtgggcctgatgagccgggtggcccagcctgccagcaagaagatcgatcagaacaagctgaaacctgagatggacgagaagggcaacctgaccaccgccggctttgcctgctctcagtgtggccagcccctgttcgtgtacaagctggagcaggtgtctgagaagggcaaggcttacaccaactacttcggacggtgcaatgtggccgagcacgaaaagctgatcctgctggcccagctgaagcccgagaaggatagcgacgaagccgtgacatatagcctgggaaagtttgggcagagggccctggatttctacagcattcatgtgaccaaggagtccacccaccccgtgaagcccctggcccagatcgccggaaacagatacgcctccggacctgtgggaaaggccctgagcgacgcatgtatgggcacaatcgcctccttcctgtctaagtaccaggacatcatcatcgaacaccagaaggtggtgaagggcaaccagaagagactggagagcctgcgggagctggccggcaaggaaaacctggaataccctagcgtgaccctgccacctcagcctcacaccaaggagggcgttgatgcctacaacgaagtgatcgcccgggtgcgaatgtgggtgaacctgaacctgtggcagaagctgaagctaagcagagatgatgccaagcctctgctgagactgaagggattcccttcctttcctctggtcgagagacaggccaacgaagtggactggtgggacatggtgtgtaacgtgaagaagctgatcaacgagaaaaaggaggatggcaaggtgttttggcagaatctggctggctacaagagacaggaagccctgagaccatacctgagcagcgaggaagatcggaagaagggaaagaaattcgctcggtaccagctgggcgacctgctgctgcacctggaaaagaagcacggcgaggactggggaaaggtgtacgacgaggcctgggagcggattgacaagaaagtggaaggcctgagcaagcacatcaagctggaagaggaacggagaagcgaggacgcccagagcaaggccgccctgaccgactggctgcgggctaaggccagcttcgtgatcgagggcctgaaggaggccgacaaggacgagttctgcagatgcgagctgaagctgcagaagtggtacggggacctgcggggaaagcccttcgccatcgaagccgagaacagcatcctggacatcagcggcttcagcaagcagtacaactgtgccttcatctggcagaaggacggcgtgaagaagctgaacctgtacctgatcatcaactacttcaagggcggcaagctgcggttcaagaagatcaaacctgaagccttcgaagccaacagattctacaccgtgatcaacaaaaagagcggcgagatcgtgcccatggaggtgaacttcaacttcgacgaccccaacctgatcatcctgcctctggcctttggcaagagacagggcagagaattcatctggaacgacctgctgtccctggaaaccggcagcctgaagctggccaacggaagagtgatcgagaagacactgtacaacagaagaacccggcaggatgagcctgccctgttcgtggccctgaccttcgagcggcgggaggtcctggactcctccaatatcaaaccaatgaacctgatcggcgtggcaagaggcgaaaacatccccgccgtgatcgccctgaccgaccccgagggctgcccactgagccggtttaaggatagcctgggaaacccaacccacatcctgagaatcggcgagagctataaggagaagcagcggaccatccaggccaagaaggaggtggagcagcggagagccggcggctacagccggaagtacgccagcaaagccaagaatctggcagacgatatggtgagaaacaccgctagagatctgctgtactacgccgtgacccaggatgccatgctgatcttcgccaacctgagccggggcttcggccggcagggcaagcggaccttcatggccgagagacagtacacacggatggaggactggctgaccgccaagctggcctacgagggcctgagcaagacctacctgtccaagacactggcccagtacacctccaagacatgcagcaactgtgggtttaccatcaccagcgccgactacgacagggtgctggagaagctgaagaagacagcaacaggctggatgaccacaattaacggcaaggagctgaaggtggagggccagattacctactacaacagatacaagagacagaacgtagtcaaggacctgtccgtcgagctggatagactgagcgaagaatctgtgaacaacgacatctcctcctggacaaagggcagaagcggagaagctctgagcctcctgaagaaaagattctcccatagacccgtgcaggagaagttcgtgtgcctgaactgcggcttcgagacacacgcagccgagcaagccgccctgaacatcgccagatcctggctgttcctgcggagccaggagtacaagaaataccagacaaacaagacaaccggcaacaccgataagagagccttcgtcgagacctggcagtccttttaccggaagaagcttaaggaggtgtggaaacctgccgtgcggtctggcggatctggcggaggctccagccagggcctggtgaccttcagggacgtggccctggacttcagccaggaggagtgggagtggctggaccccagccagaaggacctgtacagggacgtgatgctggagaactacaggaacctggtgtgcctgggcctgagcatcagcaagcccaacatgatcagcctgctggagcagggcaaggagccctggatggtgcagagggagatgagcgacgacccctacaccgactgggagagctggggcggcccaagcagcggcgcccctcctcccagcggcggcagcccagccggctccccaacctctaccgaggagggcacctctgagtccgccacccccgagagcggccctggcacctccaccgagcccagcgagggcagcgcacccggcagccctgccggcagccccacctccacagaggagggaaccagcaccgagcccagcgaaggcagcgccccaggcaccagcaccgagcctagtgagcaggagattaaacggatcaacaagatcagaagaagacttgtgaaagacagcaacaccaagaaggccggcaagacaggccccatgaaaaccctgctggttagagtgatgacacccgatctgagagagcggctggaaaacctgagaaagaagcctgaaaatatcccccagcccatcagcaatacatctagagccaacctgaataagctgctgaccgattacaccgaaatgaagaaggcgatcctgcatgtgtactgggaagagttccagaaggaccctgtgggcctgatgagccgggtggcccagcctgccagcaagaagatcgatcagaacaagctgaaacctgagatggacgagaagggcaacctgaccaccgccggctttgcctgctctcagtgtggccagcccctgttcgtgtacaagctggagcaggtgtctgagaagggcaaggcttacaccaactacttcggacggtgcaatgtggccgagcacgaaaagctgatcctgctggcccagctgaagcccgagaaggatagcgacgaagccgtgacatatagcctgggaaagtttgggcagagggccctggatttctacagcattcatgtgaccaaggagtccacccaccccgtgaagcccctggcccagatcgccggaaacagatacgcctccggacctgtgggaaaggccctgagcgacgcatgtatgggcacaatcgcctccttcctgtctaagtaccaggacatcatcatcgaacaccagaaggtggtgaagggcaaccagaagagactggagagcctgcgggagctggccggcaaggaaaacctggaataccctagcgtgaccctgccacctcagcctcacaccaaggagggcgttgatgcctacaacgaagtgatcgcccgggtgcgaatgtgggtgaacctgaacctgtggcagaagctgaagctaagcagagatgatgccaagcctctgctgagactgaagggattcccttcctttcctctggtcgagagacaggccaacgaagtggactggtgggacatggtgtgtaacgtgaagaagctgatcaacgagaaaaaggaggatggcaaggtgttttggcagaatctggctggctacaagagacaggaagccctgagaccatacctgagcagcgaggaagatcggaagaagggaaagaaattcgctcggtaccagctgggcgacctgctgctgcacctggaaaagaagcacggcgaggactggggaaaggtgtacgacgaggcctgggagcggattgacaagaaagtggaaggcctgagcaagcacatcaagctggaagaggaacggagaagcgaggacgcccagagcaaggccgccctgaccgactggctgcgggctaaggccagcttcgtgatcgagggcctgaaggaggccgacaaggacgagttctgcagatgcgagctgaagctgcagaagtggtacggggacctgcggggaaagcccttcgccatcgaagccgagaacagcatcctggacatcagcggcttcagcaagcagtacaactgtgccttcatctggcagaaggacggcgtgaagaagctgaacctgtacctgatcatcaactacttcaagggcggcaagctgcggttcaagaagatcaaacctgaagccttcgaagccaacagattctacaccgtgatcaacaaaaagagcggcgagatcgtgcccatggaggtgaacttcaacttcgacgaccccaacctgatcatcctgcctctggcctttggcaagagacagggcagagaattcatctggaacgacctgctgtccctggaaaccggcagcctgaagctggccaacggaagagtgatcgagaagacactgtacaacagaagaacccggcaggatgagcctgccctgttcgtggccctgaccttcgagcggcgggaggtcctggactcctccaatatcaaaccaatgaacctgatcggcgtggcaagaggcgaaaacatccccgccgtgatcgccctgaccgaccccgagggctgcccactgagccggtttaaggatagcctgggaaacccaacccacatcctgagaatcggcgagagctataaggagaagcagcggaccatccaggccaagaaggaggtggagcagcggagagccggcggctacagccggaagtacgccagcaaagccaagaatctggcagacgatatggtgagaaacaccgctagagatctgctgtactacgccgtgacccaggatgccatgctgatcttcgccaacctgagccggggcttcggccggcagggcaagcggaccttcatggccgagagacagtacacacggatggaggactggctgaccgccaagctggcctacgagggcctgagcaagacctacctgtccaagacactggcccagtacacctccaagacatgcagcaactgtgggtttaccatcaccagcgccgactacgacagggtgctggagaagctgaagaagacagcaacaggctggatgaccacaattaacggcaaggagctgaaggtggagggccagattacctactacaacagatacaagagacagaacgtagtcaaggacctgtccgtcgagctggatagactgagcgaagaatctgtgaacaacgacatctcctcctggacaaagggcagaagcggagaagctctgagcctcctgaagaaaagattctcccatagacccgtgcaggagaagttcgtgtgcctgaactgcggcttcgagacacacgcagccgagcaagccgccctgaacatcgccagatcctggctgttcctgcggagccaggagtacaagaaataccagacaaacaagacaaccggcaacaccgataagagagccttcgtcgagacctggcagtccttttaccggaagaagcttaaggaggtgtggaaacctgccgtgcggtctggcggatctggcggaggctcctagccagggcctggtgaccttcagggacgtggccctggacttcagccaggaggagtgggagtggctggaccccagccagaaggacctgtacagggacgtgatgctggagaactacaggaacctggtgtgcctgggcctgagcatcagcaagcccaacatgatcagcctgctggagcagggcaaggagccctggatggtgcagagggagatgagcgacgacccctacaccgactgggagagctggggatctggctccggcagcggccccaagaaaaagagaaaagtctaagctgccttctgcggggcttgccttctggccatgcccttcttctctcccttgcacctgtacctcttggtctttgaataaagcctgagtaggaaggctagcaaaaaaaaaaaaaaaaaaaaaaaaaaaaaaaaaaaaaaaaaaaaaaaaaaaaaaaaaaaaaaaaaaaaaaaaaaaaaaaa

SEQ ID NO: 16355 - RNA, 9485 nt, synthetic construct
  source 1..9485: mol_type = other RNA
aggaaataagagagaaaagaagagtaagaagaaatataagagccaccatggcccctaagaagaagcgtaaagtgagccggatggaacgcctcgtctacgaggtgcggcagaagtgcagaaacatcgaggacatctgcatctcctgcggatctctgaacgtgaccctggagcacccactgttcatcggcggcatgtgccagaactgtaaaaactgttttctggagtgtgcctatcaatacgacgatgacggctaccagagctactgcaccatctgttgcggcggaagagaggtgctgatgtgtggaaataacaactgctgccggtgcttctgcgtggaatgcgtggacctgctggtgggccccggcgccgcccaggccgctattaaggaagatccttggaactgctacatgtgcggccacaagggcacatacggcctgctgagacggagagaggactggcctagcagactgcagatgttcttcgccaataaccacgaccaggagttcgacccccctaaggtgtaccctcccgtccccgccgagaagagaaagcccatccgggtcctgagcctgttcgatggcatcgccaccggtctgctggtgctgaaggacctgggcatccaggtggataggtacattgcctccgaggtgtgcgaggactccatcaccgtgggaatggtgcgtcatcagggcaagatcatgtacgtgggcgacgtgcggagcgtgacacagaagcatatccaggagtggggccctttcgacctggtgatcggcggcagcccttgcaatgacctgagcatcgtgaacccagcccggaagggcctgtacgagggaaccggcagactgttcttcgagttttacagactgctgcacgacgcccggcctaaggaaggcgacgaccggcccttcttttggctgttcgagaatgtggtggccatgggagtcagcgacaagcgggatattagccggttcctggagagcaaccccgtgatgatcgatgccaaggaagtgagcgccgcccaccgggccagatacttctggggcaatctgcctggcatgaacagacccctggccagcaccgtgaacgacaagctggagctgcaggagtgcctggagcacggccggatcgccaagttcagcaaggtgagaaccatcaccacccgaagcaacagcatcaaacaaggcaaggaccagcactttcctgtgttcatgaacgagaaggaggacatcctgtggtgtaccgagatggagagagtgttcgggttcccagtccactacacagatgtcagcaacatgtctagactggccagacagagactgctgggaagaagctggtccgtccctgtgatcagacacctgttcgcccctctgaaggagtacttcgcctgcgtgagcagcggcaacagcaacgccaacagccggggccccagcttctctagcggcctggtgccactgtccctgagagggagccacatgggccccatggagatctacaaaaccgtgagcgcctggaagcggcagcctgtgcgcgtgctgagcctgtttcggaatatcgataaagtcctgaaaagcctgggattcctggagagcggctctggctccggcggtggcaccctgaagtacgtggaggatgtgacaaacgtggtcagacgggatgtggagaagtggggccccttcgatctggtgtacggcagcacccaacccctgggcagctcttgtgaccggtgccctggctggtacatgtttcagttccaccggatcctgcagtacgccctgccgagacaggagtcccagcggccattcttttggattttcatggacaacttgctgctgaccgaggatgaccaggaaactaccactcggttcctgcagaccgaagccgtgaccctgcaggacgtgagaggccgggactaccagaacgccatgcgggtgtggtccaacatccctggactgaaaagcaagcacgcacctctgacccctaaagaagaggagtacctgcaggcccaggtgcggagcagaagcaagctggacgcccctaaggtggatctgctggtgaagaattgcctcctgcccctgagagagtacttcaagtatttcagccagaatagtctgcccctgggaggcagcggcggcggcgccctggtgacatttgaggacgtcgccgtgcggttcacccaggaggaatgggctctgctggatccttctcagaaaatcctgtaccgggacgtgatgagagagacataccggaatctgacctccgtgggcatcaactgggaatgttgggaccttgaagcctgcttcagaagcctgggaagaaacctgagagtgcaggtggtgaagagaaagtgcgagctgaccaacagcggcccctgcgccgagggcggcccaagcagcggcgcccctcctcccagcggcggcagcccagccggctccccaacctctaccgaggagggcacctctgagtccgccacccccgagagcggccctggcacctccaccgagcccagcgagggcagcgcacccggcagccctgccggcagccccacctccacagaggagggaaccagcaccgagcccagcgaaggcagcgccccaggcaccagcaccgagcctagtgagcaggagattaaacggatcaacaagatcagaagaagacttgtgaaagacagcaacaccaagaaggccggcaagacaggccccatgaaaaccctgctggttagagtgatgacacccgatctgagagagcggctggaaaacctgagaaagaagcctgaaaatatcccccagcccatcagcaatacatctagagccaacctgaataagctgctgaccgattacaccgaaatgaagaaggcgatcctgcatgtgtactgggaagagttccagaaggaccctgtgggcctgatgagccgggtggcccagcctgccagcaagaagatcgatcagaacaagctgaaacctgagatggacgagaagggcaacctgaccaccgccggctttgcctgctctcagtgtggccagcccctgttcgtgtacaagctggagcaggtgtctgagaagggcaaggcttacaccaactacttcggacggtgcaatgtggccgagcacgaaaagctgatcctgctggcccagctgaagcccgagaaggatagcgacgaagccgtgacatatagcctgggaaagtttgggcagagggccctggatttctacagcattcatgtgaccaaggagtccacccaccccgtgaagcccctggcccagatcgccggaaacagatacgcctccggacctgtgggaaaggccctgagcgacgcatgtatgggcacaatcgcctccttcctgtctaagtaccaggacatcatcatcgaacaccagaaggtggtgaagggcaaccagaagagactggagagcctgcgggagctggccggcaaggaaaacctggaataccctagcgtgaccctgccacctcagcctcacaccaaggagggcgttgatgcctacaacgaagtgatcgcccgggtgcgaatgtgggtgaacctgaacctgtggcagaagctgaagctaagcagagatgatgccaagcctctgctgagactgaagggattcccttcctttcctctggtcgagagacaggccaacgaagtggactggtgggacatggtgtgtaacgtgaagaagctgatcaacgagaaaaaggaggatggcaaggtgttttggcagaatctggctggctacaagagacaggaagccctgagaccatacctgagcagcgaggaagatcggaagaagggaaagaaattcgctcggtaccagctgggcgacctgctgctgcacctggaaaagaagcacggcgaggactggggaaaggtgtacgacgaggcctgggagcggattgacaagaaagtggaaggcctgagcaagcacatcaagctggaagaggaacggagaagcgaggacgcccagagcaaggccgccctgaccgactggctgcgggctaaggccagcttcgtgatcgagggcctgaaggaggccgacaaggacgagttctgcagatgcgagctgaagctgcagaagtggtacggggacctgcggggaaagcccttcgccatcgaagccgagaacagcatcctggacatcagcggcttcagcaagcagtacaactgtgccttcatctggcagaaggacggcgtgaagaagctgaacctgtacctgatcatcaactacttcaagggcggcaagctgcggttcaagaagatcaaacctgaagccttcgaagccaacagattctacaccgtgatcaacaaaaagagcggcgagatcgtgcccatggaggtgaacttcaacttcgacgaccccaacctgatcatcctgcctctggcctttggcaagagacagggcagagaattcatctggaacgacctgctgtccctggaaaccggcagcctgaagctggccaacggaagagtgatcgagaagacactgtacaacagaagaacccggcaggatgagcctgccctgttcgtggccctgaccttcgagcggcgggaggtcctggactcctccaatatcaaaccaatgaacctgatcggcgtggcaagaggcgaaaacatccccgccgtgatcgccctgaccgaccccgagggctgcccactgagccggtttaaggatagcctgggaaacccaacccacatcctgagaatcggcgagagctataaggagaagcagcggaccatccaggccaagaaggaggtggagcagcggagagccggcggctacagccggaagtacgccagcaaagccaagaatctggcagacgatatggtgagaaacaccgctagagatctgctgtactacgccgtgacccaggatgccatgctgatcttcgccaacctgagccggggcttcggccggcagggcaagcggaccttcatggccgagagacagtacacacggatggaggactggctgaccgccaagctggcctacgagggcctgagcaagacctacctgtccaagacactggcccagtacacctccaagacatgcagcaactgtgggtttaccatcaccagcgccgactacgacagggtgctggagaagctgaagaagacagcaacaggctggatgaccacaattaacggcaaggagctgaaggtggagggccagattacctactacaacagatacaagagacagaacgtagtcaaggacctgtccgtcgagctggatagactgagcgaagaatctgtgaacaacgacatctcctcctggacaaagggcagaagcggagaagctctgagcctcctgaagaaaagattctcccatagacccgtgcaggagaagttcgtgtgcctgaactgcggcttcgagacacacgcagccgagcaagccgccctgaacatcgccagatcctggctgttcctgcggagccaggagtacaagaaataccagacaaacaagacaaccggcaacaccgataagagagccttcgtcgagacctggcagtccttttaccggaagaagcttaaggaggtgtggaaacctgccgtgcggtctggcggatctggcggaggctccctgtggctgcccctgaccttcgaggacatcgccatctacttcagcgagcaggagtggcagaacctggaggcctggcagaaggacctgtacaggaacgtgatgagggccaactacgagatcctggtgagcctggacgacggcctgcccaagcccgagctgatcagccacatcgagcagggcaaggagctgttctggaacctgggcgagacccagaagagcggcaacatcatctgcagcagcgccggcggcccaagcagcggcgcccctcctcccagcggcggcagcccagccggctccccaacctctaccgaggagggcacctctgagtccgccacccccgagagcggccctggcacctccaccgagcccagcgagggcagcgcacccggcagccctgccggcagccccacctccacagaggagggaaccagcaccgagcccagcgaaggcagcgccccaggcaccagcaccgagcctagtgagcaggagattaaacggatcaacaagatcagaagaagacttgtgaaagacagcaacaccaagaaggccggcaagacaggccccatgaaaaccctgctggttagagtgatgacacccgatctgagagagcggctggaaaacctgagaaagaagcctgaaaatatcccccagcccatcagcaatacatctagagccaacctgaataagctgctgaccgattacaccgaaatgaagaaggcgatcctgcatgtgtactgggaagagttccagaaggaccctgtgggcctgatgagccgggtggcccagcctgccagcaagaagatcgatcagaacaagctgaaacctgagatggacgagaagggcaacctgaccaccgccggctttgcctgctctcagtgtggccagcccctgttcgtgtacaagctggagcaggtgtctgagaagggcaaggcttacaccaactacttcggacggtgcaatgtggccgagcacgaaaagctgatcctgctggcccagctgaagcccgagaaggatagcgacgaagccgtgacatatagcctgggaaagtttgggcagagggccctggatttctacagcattcatgtgaccaaggagtccacccaccccgtgaagcccctggcccagatcgccggaaacagatacgcctccggacctgtgggaaaggccctgagcgacgcatgtatgggcacaatcgcctccttcctgtctaagtaccaggacatcatcatcgaacaccagaaggtggtgaagggcaaccagaagagactggagagcctgcgggagctggccggcaaggaaaacctggaataccctagcgtgaccctgccacctcagcctcacaccaaggagggcgttgatgcctacaacgaagtgatcgcccgggtgcgaatgtgggtgaacctgaacctgtggcagaagctgaagctaagcagagatgatgccaagcctctgctgagactgaagggattcccttcctttcctctggtcgagagacaggccaacgaagtggactggtgggacatggtgtgtaacgtgaagaagctgatcaacgagaaaaaggaggatggcaaggtgttttggcagaatctggctggctacaagagacaggaagccctgagaccatacctgagcagcgaggaagatcggaagaagggaaagaaattcgctcggtaccagctgggcgacctgctgctgcacctggaaaagaagcacggcgaggactggggaaaggtgtacgacgaggcctgggagcggattgacaagaaagtggaaggcctgagcaagcacatcaagctggaagaggaacggagaagcgaggacgcccagagcaaggccgccctgaccgactggctgcgggctaaggccagcttcgtgatcgagggcctgaaggaggccgacaaggacgagttctgcagatgcgagctgaagctgcagaagtggtacggggacctgcggggaaagcccttcgccatcgaagccgagaacagcatcctggacatcagcggcttcagcaagcagtacaactgtgccttcatctggcagaaggacggcgtgaagaagctgaacctgtacctgatcatcaactacttcaagggcggcaagctgcggttcaagaagatcaaacctgaagccttcgaagccaacagattctacaccgtgatcaacaaaaagagcggcgagatcgtgcccatggaggtgaacttcaacttcgacgaccccaacctgatcatcctgcctctggcctttggcaagagacagggcagagaattcatctggaacgacctgctgtccctggaaaccggcagcctgaagctggccaacggaagagtgatcgagaagacactgtacaacagaagaacccggcaggatgagcctgccctgttcgtggccctgaccttcgagcggcgggaggtcctggactcctccaatatcaaaccaatgaacctgatcggcgtggcaagaggcgaaaacatccccgccgtgatcgccctgaccgaccccgagggctgcccactgagccggtttaaggatagcctgggaaacccaacccacatcctgagaatcggcgagagctataaggagaagcagcggaccatccaggccaagaaggaggtggagcagcggagagccggcggctacagccggaagtacgccagcaaagccaagaatctggcagacgatatggtgagaaacaccgctagagatctgctgtactacgccgtgacccaggatgccatgctgatcttcgccaacctgagccggggcttcggccggcagggcaagcggaccttcatggccgagagacagtacacacggatggaggactggctgaccgccaagctggcctacgagggcctgagcaagacctacctgtccaagacactggcccagtacacctccaagacatgcagcaactgtgggtttaccatcaccagcgccgactacgacagggtgctggagaagctgaagaagacagcaacaggctggatgaccacaattaacggcaaggagctgaaggtggagggccagattacctactacaacagatacaagagacagaacgtagtcaaggacctgtccgtcgagctggatagactgagcgaagaatctgtgaacaacgacatctcctcctggacaaagggcagaagcggagaagctctgagcctcctgaagaaaagattctcccatagacccgtgcaggagaagttcgtgtgcctgaactgcggcttcgagacacacgcagccgagcaagccgccctgaacatcgccagatcctggctgttcctgcggagccaggagtacaagaaataccagacaaacaagacaaccggcaacaccgataagagagccttcgtcgagacctggcagtccttttaccggaagaagcttaaggaggtgtggaaacctgccgtgcggtctggcggatctggcggaggctcctctgtggctgcccctgaccttcgaggacatcgccatctacttcagcgagcaggagtggcagaacctggaggcctggcagaaggacctgtacaggaacgtgatgagggccaactacgagatcctggtgagcctggacgacggcctgcccaagcccgagctgatcagccacatcgagcagggcaaggagctgttctggaacctgggcgagacccagaagagcggcaacatcatctgcagcagcgccggatctggctccggcagcggccccaagaaaaagagaaaagtctaagctgccttctgcggggcttgccttctggccatgcccttcttctctcccttgcacctgtacctcttggtctttgaataaagcctgagtaggaaggctagcaaaaaaaaaaaaaaaaaaaaaaaaaaaaaaaaaaaaaaaaaaaaaaaaaaaaaaaaaaaaaaaaaaaaaaaaaaaaaaaa

SEQ ID NO: 16356 - RNA, 9485 nt, synthetic construct
  source 1..9485: mol_type = other RNA
aggaaataagagagaaaagaagagtaagaagaaatataagagccaccatggcccctaagaagaagcgtaaagtgagccggatggaacgcctcgtctacgaggtgcggcagaagtgcagaaacatcgaggacatctgcatctcctgcggatctctgaacgtgaccctggagcacccactgttcatcggcggcatgtgccagaactgtaaaaactgttttctggagtgtgcctatcaatacgacgatgacggctaccagagctactgcaccatctgttgcggcggaagagaggtgctgatgtgtggaaataacaactgctgccggtgcttctgcgtggaatgcgtggacctgctggtgggccccggcgccgcccaggccgctattaaggaagatccttggaactgctacatgtgcggccacaagggcacatacggcctgctgagacggagagaggactggcctagcagactgcagatgttcttcgccaataaccacgaccaggagttcgacccccctaaggtgtaccctcccgtccccgccgagaagagaaagcccatccgggtcctgagcctgttcgatggcatcgccaccggtctgctggtgctgaaggacctgggcatccaggtggataggtacattgcctccgaggtgtgcgaggactccatcaccgtgggaatggtgcgtcatcagggcaagatcatgtacgtgggcgacgtgcggagcgtgacacagaagcatatccaggagtggggccctttcgacctggtgatcggcggcagcccttgcaatgacctgagcatcgtgaacccagcccggaagggcctgtacgagggaaccggcagactgttcttcgagttttacagactgctgcacgacgcccggcctaaggaaggcgacgaccggcccttcttttggctgttcgagaatgtggtggccatgggagtcagcgacaagcgggatattagccggttcctggagagcaaccccgtgatgatcgatgccaaggaagtgagcgccgcccaccgggccagatacttctggggcaatctgcctggcatgaacagacccctggccagcaccgtgaacgacaagctggagctgcaggagtgcctggagcacggccggatcgccaagttcagcaaggtgagaaccatcaccacccgaagcaacagcatcaaacaaggcaaggaccagcactttcctgtgttcatgaacgagaaggaggacatcctgtggtgtaccgagatggagagagtgttcgggttcccagtccactacacagatgtcagcaacatgtctagactggccagacagagactgctgggaagaagctggtccgtccctgtgatcagacacctgttcgcccctctgaaggagtacttcgcctgcgtgagcagcggcaacagcaacgccaacagccggggccccagcttctctagcggcctggtgccactgtccctgagagggagccacatgggccccatggagatctacaaaaccgtgagcgcctggaagcggcagcctgtgcgcgtgctgagcctgtttcggaatatcgataaagtcctgaaaagcctgggattcctggagagcggctctggctccggcggtggcaccctgaagtacgtggaggatgtgacaaacgtggtcagacgggatgtggagaagtggggccccttcgatctggtgtacggcagcacccaacccctgggcagctcttgtgaccggtgccctggctggtacatgtttcagttccaccggatcctgcagtacgccctgccgagacaggagtcccagcggccattcttttggattttcatggacaacttgctgctgaccgaggatgaccaggaaactaccactcggttcctgcagaccgaagccgtgaccctgcaggacgtgagaggccgggactaccagaacgccatgcgggtgtggtccaacatccctggactgaaaagcaagcacgcacctctgacccctaaagaagaggagtacctgcaggcccaggtgcggagcagaagcaagctggacgcccctaaggtggatctgctggtgaagaattgcctcctgcccctgagagagtacttcaagtatttcagccagaatagtctgcccctgggaggcagcggcggcggcgccctggtgacatttgaggacgtcgccgtgcggttcacccaggaggaatgggctctgctggatccttctcagaaaatcctgtaccgggacgtgatgagagagacataccggaatctgacctccgtgggcatcaactgggaatgttgggaccttgaagcctgcttcagaagcctgggaagaaacctgagagtgcaggtggtgaagagaaagtgcgagctgaccaacagcggcccctgcgccgagggcggcccaagcagcggcgcccctcctcccagcggcggcagcccagccggctccccaacctctaccgaggagggcacctctgagtccgccacccccgagagcggccctggcacctccaccgagcccagcgagggcagcgcacccggcagccctgccggcagccccacctccacagaggagggaaccagcaccgagcccagcgaaggcagcgccccaggcaccagcaccgagcctagtgagcaggagattaaacggatcaacaagatcagaagaagacttgtgaaagacagcaacaccaagaaggccggcaagacaggccccatgaaaaccctgctggttagagtgatgacacccgatctgagagagcggctggaaaacctgagaaagaagcctgaaaatatcccccagcccatcagcaatacatctagagccaacctgaataagctgctgaccgattacaccgaaatgaagaaggcgatcctgcatgtgtactgggaagagttccagaaggaccctgtgggcctgatgagccgggtggcccagcctgccagcaagaagatcgatcagaacaagctgaaacctgagatggacgagaagggcaacctgaccaccgccggctttgcctgctctcagtgtggccagcccctgttcgtgtacaagctggagcaggtgtctgagaagggcaaggcttacaccaactacttcggacggtgcaatgtggccgagcacgaaaagctgatcctgctggcccagctgaagcccgagaaggatagcgacgaagccgtgacatatagcctgggaaagtttgggcagagggccctggatttctacagcattcatgtgaccaaggagtccacccaccccgtgaagcccctggcccagatcgccggaaacagatacgcctccggacctgtgggaaaggccctgagcgacgcatgtatgggcacaatcgcctccttcctgtctaagtaccaggacatcatcatcgaacaccagaaggtggtgaagggcaaccagaagagactggagagcctgcgggagctggccggcaaggaaaacctggaataccctagcgtgaccctgccacctcagcctcacaccaaggagggcgttgatgcctacaacgaagtgatcgcccgggtgcgaatgtgggtgaacctgaacctgtggcagaagctgaagctaagcagagatgatgccaagcctctgctgagactgaagggattcccttcctttcctctggtcgagagacaggccaacgaagtggactggtgggacatggtgtgtaacgtgaagaagctgatcaacgagaaaaaggaggatggcaaggtgttttggcagaatctggctggctacaagagacaggaagccctgagaccatacctgagcagcgaggaagatcggaagaagggaaagaaattcgctcggtaccagctgggcgacctgctgctgcacctggaaaagaagcacggcgaggactggggaaaggtgtacgacgaggcctgggagcggattgacaagaaagtggaaggcctgagcaagcacatcaagctggaagaggaacggagaagcgaggacgcccagagcaaggccgccctgaccgactggctgcgggctaaggccagcttcgtgatcgagggcctgaaggaggccgacaaggacgagttctgcagatgcgagctgaagctgcagaagtggtacggggacctgcggggaaagcccttcgccatcgaagccgagaacagcatcctggacatcagcggcttcagcaagcagtacaactgtgccttcatctggcagaaggacggcgtgaagaagctgaacctgtacctgatcatcaactacttcaagggcggcaagctgcggttcaagaagatcaaacctgaagccttcgaagccaacagattctacaccgtgatcaacaaaaagagcggcgagatcgtgcccatggaggtgaacttcaacttcgacgaccccaacctgatcatcctgcctctggcctttggcaagagacagggcagagaattcatctggaacgacctgctgtccctggaaaccggcagcctgaagctggccaacggaagagtgatcgagaagacactgtacaacagaagaacccggcaggatgagcctgccctgttcgtggccctgaccttcgagcggcgggaggtcctggactcctccaatatcaaaccaatgaacctgatcggcgtggcaagaggcgaaaacatccccgccgtgatcgccctgaccgaccccgagggctgcccactgagccggtttaaggatagcctgggaaacccaacccacatcctgagaatcggcgagagctataaggagaagcagcggaccatccaggccaagaaggaggtggagcagcggagagccggcggctacagccggaagtacgccagcaaagccaagaatctggcagacgatatggtgagaaacaccgctagagatctgctgtactacgccgtgacccaggatgccatgctgatcttcgccaacctgagccggggcttcggccggcagggcaagcggaccttcatggccgagagacagtacacacggatggaggactggctgaccgccaagctggcctacgagggcctgagcaagacctacctgtccaagacactggcccagtacacctccaagacatgcagcaactgtgggtttaccatcaccagcgccgactacgacagggtgctggagaagctgaagaagacagcaacaggctggatgaccacaattaacggcaaggagctgaaggtggagggccagattacctactacaacagatacaagagacagaacgtagtcaaggacctgtccgtcgagctggatagactgagcgaagaatctgtgaacaacgacatctcctcctggacaaagggcagaagcggagaagctctgagcctcctgaagaaaagattctcccatagacccgtgcaggagaagttcgtgtgcctgaactgcggcttcgagacacacgcagccgagcaagccgccctgaacatcgccagatcctggctgttcctgcggagccaggagtacaagaaataccagacaaacaagacaaccggcaacaccgataagagagccttcgtcgagacctggcagtccttttaccggaagaagcttaaggaggtgtggaaacctgccgtgcggtctggcggatctggcggaggctccatgaacgtggaggtggtgaaggtgatgccccaggacctggtgaccttcaaggacgtggccatcgacttcagccaggaggagtggcagtggatgaaccccgcccagaagtgcctgtacaggagcatgatgctggagaactaccagagcctggtgagcctgggcctgtgcatcagcaagccctacgtgatcagcctgctggagcagggcagggagccctgggagatgaccagcgagatgaccaggggcggcccaagcagcggcgcccctcctcccagcggcggcagcccagccggctccccaacctctaccgaggagggcacctctgagtccgccacccccgagagcggccctggcacctccaccgagcccagcgagggcagcgcacccggcagccctgccggcagccccacctccacagaggagggaaccagcaccgagcccagcgaaggcagcgccccaggcaccagcaccgagcctagtgagcaggagattaaacggatcaacaagatcagaagaagacttgtgaaagacagcaacaccaagaaggccggcaagacaggccccatgaaaaccctgctggttagagtgatgacacccgatctgagagagcggctggaaaacctgagaaagaagcctgaaaatatcccccagcccatcagcaatacatctagagccaacctgaataagctgctgaccgattacaccgaaatgaagaaggcgatcctgcatgtgtactgggaagagttccagaaggaccctgtgggcctgatgagccgggtggcccagcctgccagcaagaagatcgatcagaacaagctgaaacctgagatggacgagaagggcaacctgaccaccgccggctttgcctgctctcagtgtggccagcccctgttcgtgtacaagctggagcaggtgtctgagaagggcaaggcttacaccaactacttcggacggtgcaatgtggccgagcacgaaaagctgatcctgctggcccagctgaagcccgagaaggatagcgacgaagccgtgacatatagcctgggaaagtttgggcagagggccctggatttctacagcattcatgtgaccaaggagtccacccaccccgtgaagcccctggcccagatcgccggaaacagatacgcctccggacctgtgggaaaggccctgagcgacgcatgtatgggcacaatcgcctccttcctgtctaagtaccaggacatcatcatcgaacaccagaaggtggtgaagggcaaccagaagagactggagagcctgcgggagctggccggcaaggaaaacctggaataccctagcgtgaccctgccacctcagcctcacaccaaggagggcgttgatgcctacaacgaagtgatcgcccgggtgcgaatgtgggtgaacctgaacctgtggcagaagctgaagctaagcagagatgatgccaagcctctgctgagactgaagggattcccttcctttcctctggtcgagagacaggccaacgaagtggactggtgggacatggtgtgtaacgtgaagaagctgatcaacgagaaaaaggaggatggcaaggtgttttggcagaatctggctggctacaagagacaggaagccctgagaccatacctgagcagcgaggaagatcggaagaagggaaagaaattcgctcggtaccagctgggcgacctgctgctgcacctggaaaagaagcacggcgaggactggggaaaggtgtacgacgaggcctgggagcggattgacaagaaagtggaaggcctgagcaagcacatcaagctggaagaggaacggagaagcgaggacgcccagagcaaggccgccctgaccgactggctgcgggctaaggccagcttcgtgatcgagggcctgaaggaggccgacaaggacgagttctgcagatgcgagctgaagctgcagaagtggtacggggacctgcggggaaagcccttcgccatcgaagccgagaacagcatcctggacatcagcggcttcagcaagcagtacaactgtgccttcatctggcagaaggacggcgtgaagaagctgaacctgtacctgatcatcaactacttcaagggcggcaagctgcggttcaagaagatcaaacctgaagccttcgaagccaacagattctacaccgtgatcaacaaaaagagcggcgagatcgtgcccatggaggtgaacttcaacttcgacgaccccaacctgatcatcctgcctctggcctttggcaagagacagggcagagaattcatctggaacgacctgctgtccctggaaaccggcagcctgaagctggccaacggaagagtgatcgagaagacactgtacaacagaagaacccggcaggatgagcctgccctgttcgtggccctgaccttcgagcggcgggaggtcctggactcctccaatatcaaaccaatgaacctgatcggcgtggcaagaggcgaaaacatccccgccgtgatcgccctgaccgaccccgagggctgcccactgagccggtttaaggatagcctgggaaacccaacccacatcctgagaatcggcgagagctataaggagaagcagcggaccatccaggccaagaaggaggtggagcagcggagagccggcggctacagccggaagtacgccagcaaagccaagaatctggcagacgatatggtgagaaacaccgctagagatctgctgtactacgccgtgacccaggatgccatgctgatcttcgccaacctgagccggggcttcggccggcagggcaagcggaccttcatggccgagagacagtacacacggatggaggactggctgaccgccaagctggcctacgagggcctgagcaagacctacctgtccaagacactggcccagtacacctccaagacatgcagcaactgtgggtttaccatcaccagcgccgactacgacagggtgctggagaagctgaagaagacagcaacaggctggatgaccacaattaacggcaaggagctgaaggtggagggccagattacctactacaacagatacaagagacagaacgtagtcaaggacctgtccgtcgagctggatagactgagcgaagaatctgtgaacaacgacatctcctcctggacaaagggcagaagcggagaagctctgagcctcctgaagaaaagattctcccatagacccgtgcaggagaagttcgtgtgcctgaactgcggcttcgagacacacgcagccgagcaagccgccctgaacatcgccagatcctggctgttcctgcggagccaggagtacaagaaataccagacaaacaagacaaccggcaacaccgataagagagccttcgtcgagacctggcagtccttttaccggaagaagcttaaggaggtgtggaaacctgccgtgcggtctggcggatctggcggaggctcctatgaacgtggaggtggtgaaggtgatgccccaggacctggtgaccttcaaggacgtggccatcgacttcagccaggaggagtggcagtggatgaaccccgcccagaagtgcctgtacaggagcatgatgctggagaactaccagagcctggtgagcctgggcctgtgcatcagcaagccctacgtgatcagcctgctggagcagggcagggagccctgggagatgaccagcgagatgaccaggggatctggctccggcagcggccccaagaaaaagagaaaagtctaagctgccttctgcggggcttgccttctggccatgcccttcttctctcccttgcacctgtacctcttggtctttgaataaagcctgagtaggaaggctagcaaaaaaaaaaaaaaaaaaaaaaaaaaaaaaaaaaaaaaaaaaaaaaaaaaaaaaaaaaaaaaaaaaaaaaaaaaaaaaaa

SEQ ID NO: 16357 - RNA, 9485 nt, synthetic construct
  source 1..9485: mol_type = other RNA
aggaaataagagagaaaagaagagtaagaagaaatataagagccaccatggcccctaagaagaagcgtaaagtgagccggatggaacgcctcgtctacgaggtgcggcagaagtgcagaaacatcgaggacatctgcatctcctgcggatctctgaacgtgaccctggagcacccactgttcatcggcggcatgtgccagaactgtaaaaactgttttctggagtgtgcctatcaatacgacgatgacggctaccagagctactgcaccatctgttgcggcggaagagaggtgctgatgtgtggaaataacaactgctgccggtgcttctgcgtggaatgcgtggacctgctggtgggccccggcgccgcccaggccgctattaaggaagatccttggaactgctacatgtgcggccacaagggcacatacggcctgctgagacggagagaggactggcctagcagactgcagatgttcttcgccaataaccacgaccaggagttcgacccccctaaggtgtaccctcccgtccccgccgagaagagaaagcccatccgggtcctgagcctgttcgatggcatcgccaccggtctgctggtgctgaaggacctgggcatccaggtggataggtacattgcctccgaggtgtgcgaggactccatcaccgtgggaatggtgcgtcatcagggcaagatcatgtacgtgggcgacgtgcggagcgtgacacagaagcatatccaggagtggggccctttcgacctggtgatcggcggcagcccttgcaatgacctgagcatcgtgaacccagcccggaagggcctgtacgagggaaccggcagactgttcttcgagttttacagactgctgcacgacgcccggcctaaggaaggcgacgaccggcccttcttttggctgttcgagaatgtggtggccatgggagtcagcgacaagcgggatattagccggttcctggagagcaaccccgtgatgatcgatgccaaggaagtgagcgccgcccaccgggccagatacttctggggcaatctgcctggcatgaacagacccctggccagcaccgtgaacgacaagctggagctgcaggagtgcctggagcacggccggatcgccaagttcagcaaggtgagaaccatcaccacccgaagcaacagcatcaaacaaggcaaggaccagcactttcctgtgttcatgaacgagaaggaggacatcctgtggtgtaccgagatggagagagtgttcgggttcccagtccactacacagatgtcagcaacatgtctagactggccagacagagactgctgggaagaagctggtccgtccctgtgatcagacacctgttcgcccctctgaaggagtacttcgcctgcgtgagcagcggcaacagcaacgccaacagccggggccccagcttctctagcggcctggtgccactgtccctgagagggagccacatgggccccatggagatctacaaaaccgtgagcgcctggaagcggcagcctgtgcgcgtgctgagcctgtttcggaatatcgataaagtcctgaaaagcctgggattcctggagagcggctctggctccggcggtggcaccctgaagtacgtggaggatgtgacaaacgtggtcagacgggatgtggagaagtggggccccttcgatctggtgtacggcagcacccaacccctgggcagctcttgtgaccggtgccctggctggtacatgtttcagttccaccggatcctgcagtacgccctgccgagacaggagtcccagcggccattcttttggattttcatggacaacttgctgctgaccgaggatgaccaggaaactaccactcggttcctgcagaccgaagccgtgaccctgcaggacgtgagaggccgggactaccagaacgccatgcgggtgtggtccaacatccctggactgaaaagcaagcacgcacctctgacccctaaagaagaggagtacctgcaggcccaggtgcggagcagaagcaagctggacgcccctaaggtggatctgctggtgaagaattgcctcctgcccctgagagagtacttcaagtatttcagccagaatagtctgcccctgggaggcagcggcggcggcgccctggtgacatttgaggacgtcgccgtgcggttcacccaggaggaatgggctctgctggatccttctcagaaaatcctgtaccgggacgtgatgagagagacataccggaatctgacctccgtgggcatcaactgggaatgttgggaccttgaagcctgcttcagaagcctgggaagaaacctgagagtgcaggtggtgaagagaaagtgcgagctgaccaacagcggcccctgcgccgagggcggcccaagcagcggcgcccctcctcccagcggcggcagcccagccggctccccaacctctaccgaggagggcacctctgagtccgccacccccgagagcggccctggcacctccaccgagcccagcgagggcagcgcacccggcagccctgccggcagccccacctccacagaggagggaaccagcaccgagcccagcgaaggcagcgccccaggcaccagcaccgagcctagtgagcaggagattaaacggatcaacaagatcagaagaagacttgtgaaagacagcaacaccaagaaggccggcaagacaggccccatgaaaaccctgctggttagagtgatgacacccgatctgagagagcggctggaaaacctgagaaagaagcctgaaaatatcccccagcccatcagcaatacatctagagccaacctgaataagctgctgaccgattacaccgaaatgaagaaggcgatcctgcatgtgtactgggaagagttccagaaggaccctgtgggcctgatgagccgggtggcccagcctgccagcaagaagatcgatcagaacaagctgaaacctgagatggacgagaagggcaacctgaccaccgccggctttgcctgctctcagtgtggccagcccctgttcgtgtacaagctggagcaggtgtctgagaagggcaaggcttacaccaactacttcggacggtgcaatgtggccgagcacgaaaagctgatcctgctggcccagctgaagcccgagaaggatagcgacgaagccgtgacatatagcctgggaaagtttgggcagagggccctggatttctacagcattcatgtgaccaaggagtccacccaccccgtgaagcccctggcccagatcgccggaaacagatacgcctccggacctgtgggaaaggccctgagcgacgcatgtatgggcacaatcgcctccttcctgtctaagtaccaggacatcatcatcgaacaccagaaggtggtgaagggcaaccagaagagactggagagcctgcgggagctggccggcaaggaaaacctggaataccctagcgtgaccctgccacctcagcctcacaccaaggagggcgttgatgcctacaacgaagtgatcgcccgggtgcgaatgtgggtgaacctgaacctgtggcagaagctgaagctaagcagagatgatgccaagcctctgctgagactgaagggattcccttcctttcctctggtcgagagacaggccaacgaagtggactggtgggacatggtgtgtaacgtgaagaagctgatcaacgagaaaaaggaggatggcaaggtgttttggcagaatctggctggctacaagagacaggaagccctgagaccatacctgagcagcgaggaagatcggaagaagggaaagaaattcgctcggtaccagctgggcgacctgctgctgcacctggaaaagaagcacggcgaggactggggaaaggtgtacgacgaggcctgggagcggattgacaagaaagtggaaggcctgagcaagcacatcaagctggaagaggaacggagaagcgaggacgcccagagcaaggccgccctgaccgactggctgcgggctaaggccagcttcgtgatcgagggcctgaaggaggccgacaaggacgagttctgcagatgcgagctgaagctgcagaagtggtacggggacctgcggggaaagcccttcgccatcgaagccgagaacagcatcctggacatcagcggcttcagcaagcagtacaactgtgccttcatctggcagaaggacggcgtgaagaagctgaacctgtacctgatcatcaactacttcaagggcggcaagctgcggttcaagaagatcaaacctgaagccttcgaagccaacagattctacaccgtgatcaacaaaaagagcggcgagatcgtgcccatggaggtgaacttcaacttcgacgaccccaacctgatcatcctgcctctggcctttggcaagagacagggcagagaattcatctggaacgacctgctgtccctggaaaccggcagcctgaagctggccaacggaagagtgatcgagaagacactgtacaacagaagaacccggcaggatgagcctgccctgttcgtggccctgaccttcgagcggcgggaggtcctggactcctccaatatcaaaccaatgaacctgatcggcgtggcaagaggcgaaaacatccccgccgtgatcgccctgaccgaccccgagggctgcccactgagccggtttaaggatagcctgggaaacccaacccacatcctgagaatcggcgagagctataaggagaagcagcggaccatccaggccaagaaggaggtggagcagcggagagccggcggctacagccggaagtacgccagcaaagccaagaatctggcagacgatatggtgagaaacaccgctagagatctgctgtactacgccgtgacccaggatgccatgctgatcttcgccaacctgagccggggcttcggccggcagggcaagcggaccttcatggccgagagacagtacacacggatggaggactggctgaccgccaagctggcctacgagggcctgagcaagacctacctgtccaagacactggcccagtacacctccaagacatgcagcaactgtgggtttaccatcaccagcgccgactacgacagggtgctggagaagctgaagaagacagcaacaggctggatgaccacaattaacggcaaggagctgaaggtggagggccagattacctactacaacagatacaagagacagaacgtagtcaaggacctgtccgtcgagctggatagactgagcgaagaatctgtgaacaacgacatctcctcctggacaaagggcagaagcggagaagctctgagcctcctgaagaaaagattctcccatagacccgtgcaggagaagttcgtgtgcctgaactgcggcttcgagacacacgcagccgagcaagccgccctgaacatcgccagatcctggctgttcctgcggagccaggagtacaagaaataccagacaaacaagacaaccggcaacaccgataagagagccttcgtcgagacctggcagtccttttaccggaagaagcttaaggaggtgtggaaacctgccgtgcggtctggcggatctggcggaggctccgaggagctgcccgccgtgttcgaggacgtggccgtgtacttcaccagggaggagtggggcatgctggacaagaggcagaaggagctgtacagggacgtgatgaggctgaactacgagctgctggccagcctgggccccgccgccgccaagcccgacctgatcagcaagctggagaggagggccgccccctggatcaaggaccccaacggccccaagtggggcaagggcggcccccccggcaagggcggcccaagcagcggcgcccctcctcccagcggcggcagcccagccggctccccaacctctaccgaggagggcacctctgagtccgccacccccgagagcggccctggcacctccaccgagcccagcgagggcagcgcacccggcagccctgccggcagccccacctccacagaggagggaaccagcaccgagcccagcgaaggcagcgccccaggcaccagcaccgagcctagtgagcaggagattaaacggatcaacaagatcagaagaagacttgtgaaagacagcaacaccaagaaggccggcaagacaggccccatgaaaaccctgctggttagagtgatgacacccgatctgagagagcggctggaaaacctgagaaagaagcctgaaaatatcccccagcccatcagcaatacatctagagccaacctgaataagctgctgaccgattacaccgaaatgaagaaggcgatcctgcatgtgtactgggaagagttccagaaggaccctgtgggcctgatgagccgggtggcccagcctgccagcaagaagatcgatcagaacaagctgaaacctgagatggacgagaagggcaacctgaccaccgccggctttgcctgctctcagtgtggccagcccctgttcgtgtacaagctggagcaggtgtctgagaagggcaaggcttacaccaactacttcggacggtgcaatgtggccgagcacgaaaagctgatcctgctggcccagctgaagcccgagaaggatagcgacgaagccgtgacatatagcctgggaaagtttgggcagagggccctggatttctacagcattcatgtgaccaaggagtccacccaccccgtgaagcccctggcccagatcgccggaaacagatacgcctccggacctgtgggaaaggccctgagcgacgcatgtatgggcacaatcgcctccttcctgtctaagtaccaggacatcatcatcgaacaccagaaggtggtgaagggcaaccagaagagactggagagcctgcgggagctggccggcaaggaaaacctggaataccctagcgtgaccctgccacctcagcctcacaccaaggagggcgttgatgcctacaacgaagtgatcgcccgggtgcgaatgtgggtgaacctgaacctgtggcagaagctgaagctaagcagagatgatgccaagcctctgctgagactgaagggattcccttcctttcctctggtcgagagacaggccaacgaagtggactggtgggacatggtgtgtaacgtgaagaagctgatcaacgagaaaaaggaggatggcaaggtgttttggcagaatctggctggctacaagagacaggaagccctgagaccatacctgagcagcgaggaagatcggaagaagggaaagaaattcgctcggtaccagctgggcgacctgctgctgcacctggaaaagaagcacggcgaggactggggaaaggtgtacgacgaggcctgggagcggattgacaagaaagtggaaggcctgagcaagcacatcaagctggaagaggaacggagaagcgaggacgcccagagcaaggccgccctgaccgactggctgcgggctaaggccagcttcgtgatcgagggcctgaaggaggccgacaaggacgagttctgcagatgcgagctgaagctgcagaagtggtacggggacctgcggggaaagcccttcgccatcgaagccgagaacagcatcctggacatcagcggcttcagcaagcagtacaactgtgccttcatctggcagaaggacggcgtgaagaagctgaacctgtacctgatcatcaactacttcaagggcggcaagctgcggttcaagaagatcaaacctgaagccttcgaagccaacagattctacaccgtgatcaacaaaaagagcggcgagatcgtgcccatggaggtgaacttcaacttcgacgaccccaacctgatcatcctgcctctggcctttggcaagagacagggcagagaattcatctggaacgacctgctgtccctggaaaccggcagcctgaagctggccaacggaagagtgatcgagaagacactgtacaacagaagaacccggcaggatgagcctgccctgttcgtggccctgaccttcgagcggcgggaggtcctggactcctccaatatcaaaccaatgaacctgatcggcgtggcaagaggcgaaaacatccccgccgtgatcgccctgaccgaccccgagggctgcccactgagccggtttaaggatagcctgggaaacccaacccacatcctgagaatcggcgagagctataaggagaagcagcggaccatccaggccaagaaggaggtggagcagcggagagccggcggctacagccggaagtacgccagcaaagccaagaatctggcagacgatatggtgagaaacaccgctagagatctgctgtactacgccgtgacccaggatgccatgctgatcttcgccaacctgagccggggcttcggccggcagggcaagcggaccttcatggccgagagacagtacacacggatggaggactggctgaccgccaagctggcctacgagggcctgagcaagacctacctgtccaagacactggcccagtacacctccaagacatgcagcaactgtgggtttaccatcaccagcgccgactacgacagggtgctggagaagctgaagaagacagcaacaggctggatgaccacaattaacggcaaggagctgaaggtggagggccagattacctactacaacagatacaagagacagaacgtagtcaaggacctgtccgtcgagctggatagactgagcgaagaatctgtgaacaacgacatctcctcctggacaaagggcagaagcggagaagctctgagcctcctgaagaaaagattctcccatagacccgtgcaggagaagttcgtgtgcctgaactgcggcttcgagacacacgcagccgagcaagccgccctgaacatcgccagatcctggctgttcctgcggagccaggagtacaagaaataccagacaaacaagacaaccggcaacaccgataagagagccttcgtcgagacctggcagtccttttaccggaagaagcttaaggaggtgtggaaacctgccgtgcggtctggcggatctggcggaggctcctgaggagctgcccgccgtgttcgaggacgtggccgtgtacttcaccagggaggagtggggcatgctggacaagaggcagaaggagctgtacagggacgtgatgaggctgaactacgagctgctggccagcctgggccccgccgccgccaagcccgacctgatcagcaagctggagaggagggccgccccctggatcaaggaccccaacggccccaagtggggcaagggcggcccccccggcaagggatctggctccggcagcggccccaagaaaaagagaaaagtctaagctgccttctgcggggcttgccttctggccatgcccttcttctctcccttgcacctgtacctcttggtctttgaataaagcctgagtaggaaggctagcaaaaaaaaaaaaaaaaaaaaaaaaaaaaaaaaaaaaaaaaaaaaaaaaaaaaaaaaaaaaaaaaaaaaaaaaaaaaaaaa

SEQ ID NO: 16358 - RNA, 9485 nt, synthetic construct
  source 1..9485: mol_type = other RNA
aggaaataagagagaaaagaagagtaagaagaaatataagagccaccatggcccctaagaagaagcgtaaagtgagccggatggaacgcctcgtctacgaggtgcggcagaagtgcagaaacatcgaggacatctgcatctcctgcggatctctgaacgtgaccctggagcacccactgttcatcggcggcatgtgccagaactgtaaaaactgttttctggagtgtgcctatcaatacgacgatgacggctaccagagctactgcaccatctgttgcggcggaagagaggtgctgatgtgtggaaataacaactgctgccggtgcttctgcgtggaatgcgtggacctgctggtgggccccggcgccgcccaggccgctattaaggaagatccttggaactgctacatgtgcggccacaagggcacatacggcctgctgagacggagagaggactggcctagcagactgcagatgttcttcgccaataaccacgaccaggagttcgacccccctaaggtgtaccctcccgtccccgccgagaagagaaagcccatccgggtcctgagcctgttcgatggcatcgccaccggtctgctggtgctgaaggacctgggcatccaggtggataggtacattgcctccgaggtgtgcgaggactccatcaccgtgggaatggtgcgtcatcagggcaagatcatgtacgtgggcgacgtgcggagcgtgacacagaagcatatccaggagtggggccctttcgacctggtgatcggcggcagcccttgcaatgacctgagcatcgtgaacccagcccggaagggcctgtacgagggaaccggcagactgttcttcgagttttacagactgctgcacgacgcccggcctaaggaaggcgacgaccggcccttcttttggctgttcgagaatgtggtggccatgggagtcagcgacaagcgggatattagccggttcctggagagcaaccccgtgatgatcgatgccaaggaagtgagcgccgcccaccgggccagatacttctggggcaatctgcctggcatgaacagacccctggccagcaccgtgaacgacaagctggagctgcaggagtgcctggagcacggccggatcgccaagttcagcaaggtgagaaccatcaccacccgaagcaacagcatcaaacaaggcaaggaccagcactttcctgtgttcatgaacgagaaggaggacatcctgtggtgtaccgagatggagagagtgttcgggttcccagtccactacacagatgtcagcaacatgtctagactggccagacagagactgctgggaagaagctggtccgtccctgtgatcagacacctgttcgcccctctgaaggagtacttcgcctgcgtgagcagcggcaacagcaacgccaacagccggggccccagcttctctagcggcctggtgccactgtccctgagagggagccacatgggccccatggagatctacaaaaccgtgagcgcctggaagcggcagcctgtgcgcgtgctgagcctgtttcggaatatcgataaagtcctgaaaagcctgggattcctggagagcggctctggctccggcggtggcaccctgaagtacgtggaggatgtgacaaacgtggtcagacgggatgtggagaagtggggccccttcgatctggtgtacggcagcacccaacccctgggcagctcttgtgaccggtgccctggctggtacatgtttcagttccaccggatcctgcagtacgccctgccgagacaggagtcccagcggccattcttttggattttcatggacaacttgctgctgaccgaggatgaccaggaaactaccactcggttcctgcagaccgaagccgtgaccctgcaggacgtgagaggccgggactaccagaacgccatgcgggtgtggtccaacatccctggactgaaaagcaagcacgcacctctgacccctaaagaagaggagtacctgcaggcccaggtgcggagcagaagcaagctggacgcccctaaggtggatctgctggtgaagaattgcctcctgcccctgagagagtacttcaagtatttcagccagaatagtctgcccctgggaggcagcggcggcggcgccctggtgacatttgaggacgtcgccgtgcggttcacccaggaggaatgggctctgctggatccttctcagaaaatcctgtaccgggacgtgatgagagagacataccggaatctgacctccgtgggcatcaactgggaatgttgggaccttgaagcctgcttcagaagcctgggaagaaacctgagagtgcaggtggtgaagagaaagtgcgagctgaccaacagcggcccctgcgccgagggcggcccaagcagcggcgcccctcctcccagcggcggcagcccagccggctccccaacctctaccgaggagggcacctctgagtccgccacccccgagagcggccctggcacctccaccgagcccagcgagggcagcgcacccggcagccctgccggcagccccacctccacagaggagggaaccagcaccgagcccagcgaaggcagcgccccaggcaccagcaccgagcctagtgagcaggagattaaacggatcaacaagatcagaagaagacttgtgaaagacagcaacaccaagaaggccggcaagacaggccccatgaaaaccctgctggttagagtgatgacacccgatctgagagagcggctggaaaacctgagaaagaagcctgaaaatatcccccagcccatcagcaatacatctagagccaacctgaataagctgctgaccgattacaccgaaatgaagaaggcgatcctgcatgtgtactgggaagagttccagaaggaccctgtgggcctgatgagccgggtggcccagcctgccagcaagaagatcgatcagaacaagctgaaacctgagatggacgagaagggcaacctgaccaccgccggctttgcctgctctcagtgtggccagcccctgttcgtgtacaagctggagcaggtgtctgagaagggcaaggcttacaccaactacttcggacggtgcaatgtggccgagcacgaaaagctgatcctgctggcccagctgaagcccgagaaggatagcgacgaagccgtgacatatagcctgggaaagtttgggcagagggccctggatttctacagcattcatgtgaccaaggagtccacccaccccgtgaagcccctggcccagatcgccggaaacagatacgcctccggacctgtgggaaaggccctgagcgacgcatgtatgggcacaatcgcctccttcctgtctaagtaccaggacatcatcatcgaacaccagaaggtggtgaagggcaaccagaagagactggagagcctgcgggagctggccggcaaggaaaacctggaataccctagcgtgaccctgccacctcagcctcacaccaaggagggcgttgatgcctacaacgaagtgatcgcccgggtgcgaatgtgggtgaacctgaacctgtggcagaagctgaagctaagcagagatgatgccaagcctctgctgagactgaagggattcccttcctttcctctggtcgagagacaggccaacgaagtggactggtgggacatggtgtgtaacgtgaagaagctgatcaacgagaaaaaggaggatggcaaggtgttttggcagaatctggctggctacaagagacaggaagccctgagaccatacctgagcagcgaggaagatcggaagaagggaaagaaattcgctcggtaccagctgggcgacctgctgctgcacctggaaaagaagcacggcgaggactggggaaaggtgtacgacgaggcctgggagcggattgacaagaaagtggaaggcctgagcaagcacatcaagctggaagaggaacggagaagcgaggacgcccagagcaaggccgccctgaccgactggctgcgggctaaggccagcttcgtgatcgagggcctgaaggaggccgacaaggacgagttctgcagatgcgagctgaagctgcagaagtggtacggggacctgcggggaaagcccttcgccatcgaagccgagaacagcatcctggacatcagcggcttcagcaagcagtacaactgtgccttcatctggcagaaggacggcgtgaagaagctgaacctgtacctgatcatcaactacttcaagggcggcaagctgcggttcaagaagatcaaacctgaagccttcgaagccaacagattctacaccgtgatcaacaaaaagagcggcgagatcgtgcccatggaggtgaacttcaacttcgacgaccccaacctgatcatcctgcctctggcctttggcaagagacagggcagagaattcatctggaacgacctgctgtccctggaaaccggcagcctgaagctggccaacggaagagtgatcgagaagacactgtacaacagaagaacccggcaggatgagcctgccctgttcgtggccctgaccttcgagcggcgggaggtcctggactcctccaatatcaaaccaatgaacctgatcggcgtggcaagaggcgaaaacatccccgccgtgatcgccctgaccgaccccgagggctgcccactgagccggtttaaggatagcctgggaaacccaacccacatcctgagaatcggcgagagctataaggagaagcagcggaccatccaggccaagaaggaggtggagcagcggagagccggcggctacagccggaagtacgccagcaaagccaagaatctggcagacgatatggtgagaaacaccgctagagatctgctgtactacgccgtgacccaggatgccatgctgatcttcgccaacctgagccggggcttcggccggcagggcaagcggaccttcatggccgagagacagtacacacggatggaggactggctgaccgccaagctggcctacgagggcctgagcaagacctacctgtccaagacactggcccagtacacctccaagacatgcagcaactgtgggtttaccatcaccagcgccgactacgacagggtgctggagaagctgaagaagacagcaacaggctggatgaccacaattaacggcaaggagctgaaggtggagggccagattacctactacaacagatacaagagacagaacgtagtcaaggacctgtccgtcgagctggatagactgagcgaagaatctgtgaacaacgacatctcctcctggacaaagggcagaagcggagaagctctgagcctcctgaagaaaagattctcccatagacccgtgcaggagaagttcgtgtgcctgaactgcggcttcgagacacacgcagccgagcaagccgccctgaacatcgccagatcctggctgttcctgcggagccaggagtacaagaaataccagacaaacaagacaaccggcaacaccgataagagagccttcgtcgagacctggcagtccttttaccggaagaagcttaaggaggtgtggaaacctgccgtgcggtctggcggatctggcggaggctccatggcccacatggccttcagggacgtggccgtggacttcacccaggacgagtggaggctgctgagccccgcccagaggaccctgtacagggaggtgatgctggagaactacagcaacctggtgagcctgggcatcagcttcagcaagcccgagatcatcacccagctggagcagggcaaggagacctggagggaggagaagaagtgcccccccgccacctgccccgccgaccccgagcccgagggcggcccaagcagcggcgcccctcctcccagcggcggcagcccagccggctccccaacctctaccgaggagggcacctctgagtccgccacccccgagagcggccctggcacctccaccgagcccagcgagggcagcgcacccggcagccctgccggcagccccacctccacagaggagggaaccagcaccgagcccagcgaaggcagcgccccaggcaccagcaccgagcctagtgagcaggagattaaacggatcaacaagatcagaagaagacttgtgaaagacagcaacaccaagaaggccggcaagacaggccccatgaaaaccctgctggttagagtgatgacacccgatctgagagagcggctggaaaacctgagaaagaagcctgaaaatatcccccagcccatcagcaatacatctagagccaacctgaataagctgctgaccgattacaccgaaatgaagaaggcgatcctgcatgtgtactgggaagagttccagaaggaccctgtgggcctgatgagccgggtggcccagcctgccagcaagaagatcgatcagaacaagctgaaacctgagatggacgagaagggcaacctgaccaccgccggctttgcctgctctcagtgtggccagcccctgttcgtgtacaagctggagcaggtgtctgagaagggcaaggcttacaccaactacttcggacggtgcaatgtggccgagcacgaaaagctgatcctgctggcccagctgaagcccgagaaggatagcgacgaagccgtgacatatagcctgggaaagtttgggcagagggccctggatttctacagcattcatgtgaccaaggagtccacccaccccgtgaagcccctggcccagatcgccggaaacagatacgcctccggacctgtgggaaaggccctgagcgacgcatgtatgggcacaatcgcctccttcctgtctaagtaccaggacatcatcatcgaacaccagaaggtggtgaagggcaaccagaagagactggagagcctgcgggagctggccggcaaggaaaacctggaataccctagcgtgaccctgccacctcagcctcacaccaaggagggcgttgatgcctacaacgaagtgatcgcccgggtgcgaatgtgggtgaacctgaacctgtggcagaagctgaagctaagcagagatgatgccaagcctctgctgagactgaagggattcccttcctttcctctggtcgagagacaggccaacgaagtggactggtgggacatggtgtgtaacgtgaagaagctgatcaacgagaaaaaggaggatggcaaggtgttttggcagaatctggctggctacaagagacaggaagccctgagaccatacctgagcagcgaggaagatcggaagaagggaaagaaattcgctcggtaccagctgggcgacctgctgctgcacctggaaaagaagcacggcgaggactggggaaaggtgtacgacgaggcctgggagcggattgacaagaaagtggaaggcctgagcaagcacatcaagctggaagaggaacggagaagcgaggacgcccagagcaaggccgccctgaccgactggctgcgggctaaggccagcttcgtgatcgagggcctgaaggaggccgacaaggacgagttctgcagatgcgagctgaagctgcagaagtggtacggggacctgcggggaaagcccttcgccatcgaagccgagaacagcatcctggacatcagcggcttcagcaagcagtacaactgtgccttcatctggcagaaggacggcgtgaagaagctgaacctgtacctgatcatcaactacttcaagggcggcaagctgcggttcaagaagatcaaacctgaagccttcgaagccaacagattctacaccgtgatcaacaaaaagagcggcgagatcgtgcccatggaggtgaacttcaacttcgacgaccccaacctgatcatcctgcctctggcctttggcaagagacagggcagagaattcatctggaacgacctgctgtccctggaaaccggcagcctgaagctggccaacggaagagtgatcgagaagacactgtacaacagaagaacccggcaggatgagcctgccctgttcgtggccctgaccttcgagcggcgggaggtcctggactcctccaatatcaaaccaatgaacctgatcggcgtggcaagaggcgaaaacatccccgccgtgatcgccctgaccgaccccgagggctgcccactgagccggtttaaggatagcctgggaaacccaacccacatcctgagaatcggcgagagctataaggagaagcagcggaccatccaggccaagaaggaggtggagcagcggagagccggcggctacagccggaagtacgccagcaaagccaagaatctggcagacgatatggtgagaaacaccgctagagatctgctgtactacgccgtgacccaggatgccatgctgatcttcgccaacctgagccggggcttcggccggcagggcaagcggaccttcatggccgagagacagtacacacggatggaggactggctgaccgccaagctggcctacgagggcctgagcaagacctacctgtccaagacactggcccagtacacctccaagacatgcagcaactgtgggtttaccatcaccagcgccgactacgacagggtgctggagaagctgaagaagacagcaacaggctggatgaccacaattaacggcaaggagctgaaggtggagggccagattacctactacaacagatacaagagacagaacgtagtcaaggacctgtccgtcgagctggatagactgagcgaagaatctgtgaacaacgacatctcctcctggacaaagggcagaagcggagaagctctgagcctcctgaagaaaagattctcccatagacccgtgcaggagaagttcgtgtgcctgaactgcggcttcgagacacacgcagccgagcaagccgccctgaacatcgccagatcctggctgttcctgcggagccaggagtacaagaaataccagacaaacaagacaaccggcaacaccgataagagagccttcgtcgagacctggcagtccttttaccggaagaagcttaaggaggtgtggaaacctgccgtgcggtctggcggatctggcggaggctcctatggcccacatggccttcagggacgtggccgtggacttcacccaggacgagtggaggctgctgagccccgcccagaggaccctgtacagggaggtgatgctggagaactacagcaacctggtgagcctgggcatcagcttcagcaagcccgagatcatcacccagctggagcagggcaaggagacctggagggaggagaagaagtgcccccccgccacctgccccgccgaccccgagcccgagggatctggctccggcagcggccccaagaaaaagagaaaagtctaagctgccttctgcggggcttgccttctggccatgcccttcttctctcccttgcacctgtacctcttggtctttgaataaagcctgagtaggaaggctagcaaaaaaaaaaaaaaaaaaaaaaaaaaaaaaaaaaaaaaaaaaaaaaaaaaaaaaaaaaaaaaaaaaaaaaaaaaaaaaaa

SEQ ID NO: 16359 - RNA, 9485 nt, synthetic construct
  source 1..9485: mol_type = other RNA
aggaaataagagagaaaagaagagtaagaagaaatataagagccaccatggcccctaagaagaagcgtaaagtgagccggatggaacgcctcgtctacgaggtgcggcagaagtgcagaaacatcgaggacatctgcatctcctgcggatctctgaacgtgaccctggagcacccactgttcatcggcggcatgtgccagaactgtaaaaactgttttctggagtgtgcctatcaatacgacgatgacggctaccagagctactgcaccatctgttgcggcggaagagaggtgctgatgtgtggaaataacaactgctgccggtgcttctgcgtggaatgcgtggacctgctggtgggccccggcgccgcccaggccgctattaaggaagatccttggaactgctacatgtgcggccacaagggcacatacggcctgctgagacggagagaggactggcctagcagactgcagatgttcttcgccaataaccacgaccaggagttcgacccccctaaggtgtaccctcccgtccccgccgagaagagaaagcccatccgggtcctgagcctgttcgatggcatcgccaccggtctgctggtgctgaaggacctgggcatccaggtggataggtacattgcctccgaggtgtgcgaggactccatcaccgtgggaatggtgcgtcatcagggcaagatcatgtacgtgggcgacgtgcggagcgtgacacagaagcatatccaggagtggggccctttcgacctggtgatcggcggcagcccttgcaatgacctgagcatcgtgaacccagcccggaagggcctgtacgagggaaccggcagactgttcttcgagttttacagactgctgcacgacgcccggcctaaggaaggcgacgaccggcccttcttttggctgttcgagaatgtggtggccatgggagtcagcgacaagcgggatattagccggttcctggagagcaaccccgtgatgatcgatgccaaggaagtgagcgccgcccaccgggccagatacttctggggcaatctgcctggcatgaacagacccctggccagcaccgtgaacgacaagctggagctgcaggagtgcctggagcacggccggatcgccaagttcagcaaggtgagaaccatcaccacccgaagcaacagcatcaaacaaggcaaggaccagcactttcctgtgttcatgaacgagaaggaggacatcctgtggtgtaccgagatggagagagtgttcgggttcccagtccactacacagatgtcagcaacatgtctagactggccagacagagactgctgggaagaagctggtccgtccctgtgatcagacacctgttcgcccctctgaaggagtacttcgcctgcgtgagcagcggcaacagcaacgccaacagccggggccccagcttctctagcggcctggtgccactgtccctgagagggagccacatgggccccatggagatctacaaaaccgtgagcgcctggaagcggcagcctgtgcgcgtgctgagcctgtttcggaatatcgataaagtcctgaaaagcctgggattcctggagagcggctctggctccggcggtggcaccctgaagtacgtggaggatgtgacaaacgtggtcagacgggatgtggagaagtggggccccttcgatctggtgtacggcagcacccaacccctgggcagctcttgtgaccggtgccctggctggtacatgtttcagttccaccggatcctgcagtacgccctgccgagacaggagtcccagcggccattcttttggattttcatggacaacttgctgctgaccgaggatgaccaggaaactaccactcggttcctgcagaccgaagccgtgaccctgcaggacgtgagaggccgggactaccagaacgccatgcgggtgtggtccaacatccctggactgaaaagcaagcacgcacctctgacccctaaagaagaggagtacctgcaggcccaggtgcggagcagaagcaagctggacgcccctaaggtggatctgctggtgaagaattgcctcctgcccctgagagagtacttcaagtatttcagccagaatagtctgcccctgggaggcagcggcggcggcgccctggtgacatttgaggacgtcgccgtgcggttcacccaggaggaatgggctctgctggatccttctcagaaaatcctgtaccgggacgtgatgagagagacataccggaatctgacctccgtgggcatcaactgggaatgttgggaccttgaagcctgcttcagaagcctgggaagaaacctgagagtgcaggtggtgaagagaaagtgcgagctgaccaacagcggcccctgcgccgagggcggcccaagcagcggcgcccctcctcccagcggcggcagcccagccggctccccaacctctaccgaggagggcacctctgagtccgccacccccgagagcggccctggcacctccaccgagcccagcgagggcagcgcacccggcagccctgccggcagccccacctccacagaggagggaaccagcaccgagcccagcgaaggcagcgccccaggcaccagcaccgagcctagtgagcaggagattaaacggatcaacaagatcagaagaagacttgtgaaagacagcaacaccaagaaggccggcaagacaggccccatgaaaaccctgctggttagagtgatgacacccgatctgagagagcggctggaaaacctgagaaagaagcctgaaaatatcccccagcccatcagcaatacatctagagccaacctgaataagctgctgaccgattacaccgaaatgaagaaggcgatcctgcatgtgtactgggaagagttccagaaggaccctgtgggcctgatgagccgggtggcccagcctgccagcaagaagatcgatcagaacaagctgaaacctgagatggacgagaagggcaacctgaccaccgccggctttgcctgctctcagtgtggccagcccctgttcgtgtacaagctggagcaggtgtctgagaagggcaaggcttacaccaactacttcggacggtgcaatgtggccgagcacgaaaagctgatcctgctggcccagctgaagcccgagaaggatagcgacgaagccgtgacatatagcctgggaaagtttgggcagagggccctggatttctacagcattcatgtgaccaaggagtccacccaccccgtgaagcccctggcccagatcgccggaaacagatacgcctccggacctgtgggaaaggccctgagcgacgcatgtatgggcacaatcgcctccttcctgtctaagtaccaggacatcatcatcgaacaccagaaggtggtgaagggcaaccagaagagactggagagcctgcgggagctggccggcaaggaaaacctggaataccctagcgtgaccctgccacctcagcctcacaccaaggagggcgttgatgcctacaacgaagtgatcgcccgggtgcgaatgtgggtgaacctgaacctgtggcagaagctgaagctaagcagagatgatgccaagcctctgctgagactgaagggattcccttcctttcctctggtcgagagacaggccaacgaagtggactggtgggacatggtgtgtaacgtgaagaagctgatcaacgagaaaaaggaggatggcaaggtgttttggcagaatctggctggctacaagagacaggaagccctgagaccatacctgagcagcgaggaagatcggaagaagggaaagaaattcgctcggtaccagctgggcgacctgctgctgcacctggaaaagaagcacggcgaggactggggaaaggtgtacgacgaggcctgggagcggattgacaagaaagtggaaggcctgagcaagcacatcaagctggaagaggaacggagaagcgaggacgcccagagcaaggccgccctgaccgactggctgcgggctaaggccagcttcgtgatcgagggcctgaaggaggccgacaaggacgagttctgcagatgcgagctgaagctgcagaagtggtacggggacctgcggggaaagcccttcgccatcgaagccgagaacagcatcctggacatcagcggcttcagcaagcagtacaactgtgccttcatctggcagaaggacggcgtgaagaagctgaacctgtacctgatcatcaactacttcaagggcggcaagctgcggttcaagaagatcaaacctgaagccttcgaagccaacagattctacaccgtgatcaacaaaaagagcggcgagatcgtgcccatggaggtgaacttcaacttcgacgaccccaacctgatcatcctgcctctggcctttggcaagagacagggcagagaattcatctggaacgacctgctgtccctggaaaccggcagcctgaagctggccaacggaagagtgatcgagaagacactgtacaacagaagaacccggcaggatgagcctgccctgttcgtggccctgaccttcgagcggcgggaggtcctggactcctccaatatcaaaccaatgaacctgatcggcgtggcaagaggcgaaaacatccccgccgtgatcgccctgaccgaccccgagggctgcccactgagccggtttaaggatagcctgggaaacccaacccacatcctgagaatcggcgagagctataaggagaagcagcggaccatccaggccaagaaggaggtggagcagcggagagccggcggctacagccggaagtacgccagcaaagccaagaatctggcagacgatatggtgagaaacaccgctagagatctgctgtactacgccgtgacccaggatgccatgctgatcttcgccaacctgagccggggcttcggccggcagggcaagcggaccttcatggccgagagacagtacacacggatggaggactggctgaccgccaagctggcctacgagggcctgagcaagacctacctgtccaagacactggcccagtacacctccaagacatgcagcaactgtgggtttaccatcaccagcgccgactacgacagggtgctggagaagctgaagaagacagcaacaggctggatgaccacaattaacggcaaggagctgaaggtggagggccagattacctactacaacagatacaagagacagaacgtagtcaaggacctgtccgtcgagctggatagactgagcgaagaatctgtgaacaacgacatctcctcctggacaaagggcagaagcggagaagctctgagcctcctgaagaaaagattctcccatagacccgtgcaggagaagttcgtgtgcctgaactgcggcttcgagacacacgcagccgagcaagccgccctgaacatcgccagatcctggctgttcctgcggagccaggagtacaagaaataccagacaaacaagacaaccggcaacaccgataagagagccttcgtcgagacctggcagtccttttaccggaagaagcttaaggaggtgtggaaacctgccgtgcggtctggcggatctggcggaggctccagcctgggcatggtgagcttcgaggacgtggccgtgaccttcagcagggaggagtggcagcagctggacgaggcccagaggaccctgtacagggaggtgatgctggaggcctacagcaacctgaagaccgtgggctgctgctggagcaagcccgaggtgatcatcaggctggagcagggcgtggagccctggaccgtggagggcgtgaccaaccagaggttcagcgacgtgctgaccgtggacggcggcccaagcagcggcgcccctcctcccagcggcggcagcccagccggctccccaacctctaccgaggagggcacctctgagtccgccacccccgagagcggccctggcacctccaccgagcccagcgagggcagcgcacccggcagccctgccggcagccccacctccacagaggagggaaccagcaccgagcccagcgaaggcagcgccccaggcaccagcaccgagcctagtgagcaggagattaaacggatcaacaagatcagaagaagacttgtgaaagacagcaacaccaagaaggccggcaagacaggccccatgaaaaccctgctggttagagtgatgacacccgatctgagagagcggctggaaaacctgagaaagaagcctgaaaatatcccccagcccatcagcaatacatctagagccaacctgaataagctgctgaccgattacaccgaaatgaagaaggcgatcctgcatgtgtactgggaagagttccagaaggaccctgtgggcctgatgagccgggtggcccagcctgccagcaagaagatcgatcagaacaagctgaaacctgagatggacgagaagggcaacctgaccaccgccggctttgcctgctctcagtgtggccagcccctgttcgtgtacaagctggagcaggtgtctgagaagggcaaggcttacaccaactacttcggacggtgcaatgtggccgagcacgaaaagctgatcctgctggcccagctgaagcccgagaaggatagcgacgaagccgtgacatatagcctgggaaagtttgggcagagggccctggatttctacagcattcatgtgaccaaggagtccacccaccccgtgaagcccctggcccagatcgccggaaacagatacgcctccggacctgtgggaaaggccctgagcgacgcatgtatgggcacaatcgcctccttcctgtctaagtaccaggacatcatcatcgaacaccagaaggtggtgaagggcaaccagaagagactggagagcctgcgggagctggccggcaaggaaaacctggaataccctagcgtgaccctgccacctcagcctcacaccaaggagggcgttgatgcctacaacgaagtgatcgcccgggtgcgaatgtgggtgaacctgaacctgtggcagaagctgaagctaagcagagatgatgccaagcctctgctgagactgaagggattcccttcctttcctctggtcgagagacaggccaacgaagtggactggtgggacatggtgtgtaacgtgaagaagctgatcaacgagaaaaaggaggatggcaaggtgttttggcagaatctggctggctacaagagacaggaagccctgagaccatacctgagcagcgaggaagatcggaagaagggaaagaaattcgctcggtaccagctgggcgacctgctgctgcacctggaaaagaagcacggcgaggactggggaaaggtgtacgacgaggcctgggagcggattgacaagaaagtggaaggcctgagcaagcacatcaagctggaagaggaacggagaagcgaggacgcccagagcaaggccgccctgaccgactggctgcgggctaaggccagcttcgtgatcgagggcctgaaggaggccgacaaggacgagttctgcagatgcgagctgaagctgcagaagtggtacggggacctgcggggaaagcccttcgccatcgaagccgagaacagcatcctggacatcagcggcttcagcaagcagtacaactgtgccttcatctggcagaaggacggcgtgaagaagctgaacctgtacctgatcatcaactacttcaagggcggcaagctgcggttcaagaagatcaaacctgaagccttcgaagccaacagattctacaccgtgatcaacaaaaagagcggcgagatcgtgcccatggaggtgaacttcaacttcgacgaccccaacctgatcatcctgcctctggcctttggcaagagacagggcagagaattcatctggaacgacctgctgtccctggaaaccggcagcctgaagctggccaacggaagagtgatcgagaagacactgtacaacagaagaacccggcaggatgagcctgccctgttcgtggccctgaccttcgagcggcgggaggtcctggactcctccaatatcaaaccaatgaacctgatcggcgtggcaagaggcgaaaacatccccgccgtgatcgccctgaccgaccccgagggctgcccactgagccggtttaaggatagcctgggaaacccaacccacatcctgagaatcggcgagagctataaggagaagcagcggaccatccaggccaagaaggaggtggagcagcggagagccggcggctacagccggaagtacgccagcaaagccaagaatctggcagacgatatggtgagaaacaccgctagagatctgctgtactacgccgtgacccaggatgccatgctgatcttcgccaacctgagccggggcttcggccggcagggcaagcggaccttcatggccgagagacagtacacacggatggaggactggctgaccgccaagctggcctacgagggcctgagcaagacctacctgtccaagacactggcccagtacacctccaagacatgcagcaactgtgggtttaccatcaccagcgccgactacgacagggtgctggagaagctgaagaagacagcaacaggctggatgaccacaattaacggcaaggagctgaaggtggagggccagattacctactacaacagatacaagagacagaacgtagtcaaggacctgtccgtcgagctggatagactgagcgaagaatctgtgaacaacgacatctcctcctggacaaagggcagaagcggagaagctctgagcctcctgaagaaaagattctcccatagacccgtgcaggagaagttcgtgtgcctgaactgcggcttcgagacacacgcagccgagcaagccgccctgaacatcgccagatcctggctgttcctgcggagccaggagtacaagaaataccagacaaacaagacaaccggcaacaccgataagagagccttcgtcgagacctggcagtccttttaccggaagaagcttaaggaggtgtggaaacctgccgtgcggtctggcggatctggcggaggctcctagcctgggcatggtgagcttcgaggacgtggccgtgaccttcagcagggaggagtggcagcagctggacgaggcccagaggaccctgtacagggaggtgatgctggaggcctacagcaacctgaagaccgtgggctgctgctggagcaagcccgaggtgatcatcaggctggagcagggcgtggagccctggaccgtggagggcgtgaccaaccagaggttcagcgacgtgctgaccgtggacggatctggctccggcagcggccccaagaaaaagagaaaagtctaagctgccttctgcggggcttgccttctggccatgcccttcttctctcccttgcacctgtacctcttggtctttgaataaagcctgagtaggaaggctagcaaaaaaaaaaaaaaaaaaaaaaaaaaaaaaaaaaaaaaaaaaaaaaaaaaaaaaaaaaaaaaaaaaaaaaaaaaaaaaaa

SEQ ID NO: 16360 - RNA, 9485 nt, synthetic construct
  source 1..9485: mol_type = other RNA
aggaaataagagagaaaagaagagtaagaagaaatataagagccaccatggcccctaagaagaagcgtaaagtgagccggatggaacgcctcgtctacgaggtgcggcagaagtgcagaaacatcgaggacatctgcatctcctgcggatctctgaacgtgaccctggagcacccactgttcatcggcggcatgtgccagaactgtaaaaactgttttctggagtgtgcctatcaatacgacgatgacggctaccagagctactgcaccatctgttgcggcggaagagaggtgctgatgtgtggaaataacaactgctgccggtgcttctgcgtggaatgcgtggacctgctggtgggccccggcgccgcccaggccgctattaaggaagatccttggaactgctacatgtgcggccacaagggcacatacggcctgctgagacggagagaggactggcctagcagactgcagatgttcttcgccaataaccacgaccaggagttcgacccccctaaggtgtaccctcccgtccccgccgagaagagaaagcccatccgggtcctgagcctgttcgatggcatcgccaccggtctgctggtgctgaaggacctgggcatccaggtggataggtacattgcctccgaggtgtgcgaggactccatcaccgtgggaatggtgcgtcatcagggcaagatcatgtacgtgggcgacgtgcggagcgtgacacagaagcatatccaggagtggggccctttcgacctggtgatcggcggcagcccttgcaatgacctgagcatcgtgaacccagcccggaagggcctgtacgagggaaccggcagactgttcttcgagttttacagactgctgcacgacgcccggcctaaggaaggcgacgaccggcccttcttttggctgttcgagaatgtggtggccatgggagtcagcgacaagcgggatattagccggttcctggagagcaaccccgtgatgatcgatgccaaggaagtgagcgccgcccaccgggccagatacttctggggcaatctgcctggcatgaacagacccctggccagcaccgtgaacgacaagctggagctgcaggagtgcctggagcacggccggatcgccaagttcagcaaggtgagaaccatcaccacccgaagcaacagcatcaaacaaggcaaggaccagcactttcctgtgttcatgaacgagaaggaggacatcctgtggtgtaccgagatggagagagtgttcgggttcccagtccactacacagatgtcagcaacatgtctagactggccagacagagactgctgggaagaagctggtccgtccctgtgatcagacacctgttcgcccctctgaaggagtacttcgcctgcgtgagcagcggcaacagcaacgccaacagccggggccccagcttctctagcggcctggtgccactgtccctgagagggagccacatgggccccatggagatctacaaaaccgtgagcgcctggaagcggcagcctgtgcgcgtgctgagcctgtttcggaatatcgataaagtcctgaaaagcctgggattcctggagagcggctctggctccggcggtggcaccctgaagtacgtggaggatgtgacaaacgtggtcagacgggatgtggagaagtggggccccttcgatctggtgtacggcagcacccaacccctgggcagctcttgtgaccggtgccctggctggtacatgtttcagttccaccggatcctgcagtacgccctgccgagacaggagtcccagcggccattcttttggattttcatggacaacttgctgctgaccgaggatgaccaggaaactaccactcggttcctgcagaccgaagccgtgaccctgcaggacgtgagaggccgggactaccagaacgccatgcgggtgtggtccaacatccctggactgaaaagcaagcacgcacctctgacccctaaagaagaggagtacctgcaggcccaggtgcggagcagaagcaagctggacgcccctaaggtggatctgctggtgaagaattgcctcctgcccctgagagagtacttcaagtatttcagccagaatagtctgcccctgggaggcagcggcggcggcgccctggtgacatttgaggacgtcgccgtgcggttcacccaggaggaatgggctctgctggatccttctcagaaaatcctgtaccgggacgtgatgagagagacataccggaatctgacctccgtgggcatcaactgggaatgttgggaccttgaagcctgcttcagaagcctgggaagaaacctgagagtgcaggtggtgaagagaaagtgcgagctgaccaacagcggcccctgcgccgagggcggcccaagcagcggcgcccctcctcccagcggcggcagcccagccggctccccaacctctaccgaggagggcacctctgagtccgccacccccgagagcggccctggcacctccaccgagcccagcgagggcagcgcacccggcagccctgccggcagccccacctccacagaggagggaaccagcaccgagcccagcgaaggcagcgccccaggcaccagcaccgagcctagtgagcaggagattaaacggatcaacaagatcagaagaagacttgtgaaagacagcaacaccaagaaggccggcaagacaggccccatgaaaaccctgctggttagagtgatgacacccgatctgagagagcggctggaaaacctgagaaagaagcctgaaaatatcccccagcccatcagcaatacatctagagccaacctgaataagctgctgaccgattacaccgaaatgaagaaggcgatcctgcatgtgtactgggaagagttccagaaggaccctgtgggcctgatgagccgggtggcccagcctgccagcaagaagatcgatcagaacaagctgaaacctgagatggacgagaagggcaacctgaccaccgccggctttgcctgctctcagtgtggccagcccctgttcgtgtacaagctggagcaggtgtctgagaagggcaaggcttacaccaactacttcggacggtgcaatgtggccgagcacgaaaagctgatcctgctggcccagctgaagcccgagaaggatagcgacgaagccgtgacatatagcctgggaaagtttgggcagagggccctggatttctacagcattcatgtgaccaaggagtccacccaccccgtgaagcccctggcccagatcgccggaaacagatacgcctccggacctgtgggaaaggccctgagcgacgcatgtatgggcacaatcgcctccttcctgtctaagtaccaggacatcatcatcgaacaccagaaggtggtgaagggcaaccagaagagactggagagcctgcgggagctggccggcaaggaaaacctggaataccctagcgtgaccctgccacctcagcctcacaccaaggagggcgttgatgcctacaacgaagtgatcgcccgggtgcgaatgtgggtgaacctgaacctgtggcagaagctgaagctaagcagagatgatgccaagcctctgctgagactgaagggattcccttcctttcctctggtcgagagacaggccaacgaagtggactggtgggacatggtgtgtaacgtgaagaagctgatcaacgagaaaaaggaggatggcaaggtgttttggcagaatctggctggctacaagagacaggaagccctgagaccatacctgagcagcgaggaagatcggaagaagggaaagaaattcgctcggtaccagctgggcgacctgctgctgcacctggaaaagaagcacggcgaggactggggaaaggtgtacgacgaggcctgggagcggattgacaagaaagtggaaggcctgagcaagcacatcaagctggaagaggaacggagaagcgaggacgcccagagcaaggccgccctgaccgactggctgcgggctaaggccagcttcgtgatcgagggcctgaaggaggccgacaaggacgagttctgcagatgcgagctgaagctgcagaagtggtacggggacctgcggggaaagcccttcgccatcgaagccgagaacagcatcctggacatcagcggcttcagcaagcagtacaactgtgccttcatctggcagaaggacggcgtgaagaagctgaacctgtacctgatcatcaactacttcaagggcggcaagctgcggttcaagaagatcaaacctgaagccttcgaagccaacagattctacaccgtgatcaacaaaaagagcggcgagatcgtgcccatggaggtgaacttcaacttcgacgaccccaacctgatcatcctgcctctggcctttggcaagagacagggcagagaattcatctggaacgacctgctgtccctggaaaccggcagcctgaagctggccaacggaagagtgatcgagaagacactgtacaacagaagaacccggcaggatgagcctgccctgttcgtggccctgaccttcgagcggcgggaggtcctggactcctccaatatcaaaccaatgaacctgatcggcgtggcaagaggcgaaaacatccccgccgtgatcgccctgaccgaccccgagggctgcccactgagccggtttaaggatagcctgggaaacccaacccacatcctgagaatcggcgagagctataaggagaagcagcggaccatccaggccaagaaggaggtggagcagcggagagccggcggctacagccggaagtacgccagcaaagccaagaatctggcagacgatatggtgagaaacaccgctagagatctgctgtactacgccgtgacccaggatgccatgctgatcttcgccaacctgagccggggcttcggccggcagggcaagcggaccttcatggccgagagacagtacacacggatggaggactggctgaccgccaagctggcctacgagggcctgagcaagacctacctgtccaagacactggcccagtacacctccaagacatgcagcaactgtgggtttaccatcaccagcgccgactacgacagggtgctggagaagctgaagaagacagcaacaggctggatgaccacaattaacggcaaggagctgaaggtggagggccagattacctactacaacagatacaagagacagaacgtagtcaaggacctgtccgtcgagctggatagactgagcgaagaatctgtgaacaacgacatctcctcctggacaaagggcagaagcggagaagctctgagcctcctgaagaaaagattctcccatagacccgtgcaggagaagttcgtgtgcctgaactgcggcttcgagacacacgcagccgagcaagccgccctgaacatcgccagatcctggctgttcctgcggagccaggagtacaagaaataccagacaaacaagacaaccggcaacaccgataagagagccttcgtcgagacctggcagtccttttaccggaagaagcttaaggaggtgtggaaacctgccgtgcggtctggcggatctggcggaggctccaagcccggcgtgctgaccttcgccgacgtggccgtgtacttcagcagcgaggagtggggctgcctgaggcccgcccagagggccctgtacagggacgtgatgagggagacctacggccacctgggcgccctgggcttccccggccccaagcccgccctgatcagctggatggagcaggagagcgaggagagcgaggcctggagccccgccgccaaggaccccgaggagggcgagagcctgggcggcggcccaagcagcggcgcccctcctcccagcggcggcagcccagccggctccccaacctctaccgaggagggcacctctgagtccgccacccccgagagcggccctggcacctccaccgagcccagcgagggcagcgcacccggcagccctgccggcagccccacctccacagaggagggaaccagcaccgagcccagcgaaggcagcgccccaggcaccagcaccgagcctagtgagcaggagattaaacggatcaacaagatcagaagaagacttgtgaaagacagcaacaccaagaaggccggcaagacaggccccatgaaaaccctgctggttagagtgatgacacccgatctgagagagcggctggaaaacctgagaaagaagcctgaaaatatcccccagcccatcagcaatacatctagagccaacctgaataagctgctgaccgattacaccgaaatgaagaaggcgatcctgcatgtgtactgggaagagttccagaaggaccctgtgggcctgatgagccgggtggcccagcctgccagcaagaagatcgatcagaacaagctgaaacctgagatggacgagaagggcaacctgaccaccgccggctttgcctgctctcagtgtggccagcccctgttcgtgtacaagctggagcaggtgtctgagaagggcaaggcttacaccaactacttcggacggtgcaatgtggccgagcacgaaaagctgatcctgctggcccagctgaagcccgagaaggatagcgacgaagccgtgacatatagcctgggaaagtttgggcagagggccctggatttctacagcattcatgtgaccaaggagtccacccaccccgtgaagcccctggcccagatcgccggaaacagatacgcctccggacctgtgggaaaggccctgagcgacgcatgtatgggcacaatcgcctccttcctgtctaagtaccaggacatcatcatcgaacaccagaaggtggtgaagggcaaccagaagagactggagagcctgcgggagctggccggcaaggaaaacctggaataccctagcgtgaccctgccacctcagcctcacaccaaggagggcgttgatgcctacaacgaagtgatcgcccgggtgcgaatgtgggtgaacctgaacctgtggcagaagctgaagctaagcagagatgatgccaagcctctgctgagactgaagggattcccttcctttcctctggtcgagagacaggccaacgaagtggactggtgggacatggtgtgtaacgtgaagaagctgatcaacgagaaaaaggaggatggcaaggtgttttggcagaatctggctggctacaagagacaggaagccctgagaccatacctgagcagcgaggaagatcggaagaagggaaagaaattcgctcggtaccagctgggcgacctgctgctgcacctggaaaagaagcacggcgaggactggggaaaggtgtacgacgaggcctgggagcggattgacaagaaagtggaaggcctgagcaagcacatcaagctggaagaggaacggagaagcgaggacgcccagagcaaggccgccctgaccgactggctgcgggctaaggccagcttcgtgatcgagggcctgaaggaggccgacaaggacgagttctgcagatgcgagctgaagctgcagaagtggtacggggacctgcggggaaagcccttcgccatcgaagccgagaacagcatcctggacatcagcggcttcagcaagcagtacaactgtgccttcatctggcagaaggacggcgtgaagaagctgaacctgtacctgatcatcaactacttcaagggcggcaagctgcggttcaagaagatcaaacctgaagccttcgaagccaacagattctacaccgtgatcaacaaaaagagcggcgagatcgtgcccatggaggtgaacttcaacttcgacgaccccaacctgatcatcctgcctctggcctttggcaagagacagggcagagaattcatctggaacgacctgctgtccctggaaaccggcagcctgaagctggccaacggaagagtgatcgagaagacactgtacaacagaagaacccggcaggatgagcctgccctgttcgtggccctgaccttcgagcggcgggaggtcctggactcctccaatatcaaaccaatgaacctgatcggcgtggcaagaggcgaaaacatccccgccgtgatcgccctgaccgaccccgagggctgcccactgagccggtttaaggatagcctgggaaacccaacccacatcctgagaatcggcgagagctataaggagaagcagcggaccatccaggccaagaaggaggtggagcagcggagagccggcggctacagccggaagtacgccagcaaagccaagaatctggcagacgatatggtgagaaacaccgctagagatctgctgtactacgccgtgacccaggatgccatgctgatcttcgccaacctgagccggggcttcggccggcagggcaagcggaccttcatggccgagagacagtacacacggatggaggactggctgaccgccaagctggcctacgagggcctgagcaagacctacctgtccaagacactggcccagtacacctccaagacatgcagcaactgtgggtttaccatcaccagcgccgactacgacagggtgctggagaagctgaagaagacagcaacaggctggatgaccacaattaacggcaaggagctgaaggtggagggccagattacctactacaacagatacaagagacagaacgtagtcaaggacctgtccgtcgagctggatagactgagcgaagaatctgtgaacaacgacatctcctcctggacaaagggcagaagcggagaagctctgagcctcctgaagaaaagattctcccatagacccgtgcaggagaagttcgtgtgcctgaactgcggcttcgagacacacgcagccgagcaagccgccctgaacatcgccagatcctggctgttcctgcggagccaggagtacaagaaataccagacaaacaagacaaccggcaacaccgataagagagccttcgtcgagacctggcagtccttttaccggaagaagcttaaggaggtgtggaaacctgccgtgcggtctggcggatctggcggaggctcctaagcccggcgtgctgaccttcgccgacgtggccgtgtacttcagcagcgaggagtggggctgcctgaggcccgcccagagggccctgtacagggacgtgatgagggagacctacggccacctgggcgccctgggcttccccggccccaagcccgccctgatcagctggatggagcaggagagcgaggagagcgaggcctggagccccgccgccaaggaccccgaggagggcgagagcctgggcggatctggctccggcagcggccccaagaaaaagagaaaagtctaagctgccttctgcggggcttgccttctggccatgcccttcttctctcccttgcacctgtacctcttggtctttgaataaagcctgagtaggaaggctagcaaaaaaaaaaaaaaaaaaaaaaaaaaaaaaaaaaaaaaaaaaaaaaaaaaaaaaaaaaaaaaaaaaaaaaaaaaaaaaaa

SEQ ID NO: 16361 - RNA, 9485 nt, synthetic construct
  source 1..9485: mol_type = other RNA
aggaaataagagagaaaagaagagtaagaagaaatataagagccaccatggcccctaagaagaagcgtaaagtgagccggatggaacgcctcgtctacgaggtgcggcagaagtgcagaaacatcgaggacatctgcatctcctgcggatctctgaacgtgaccctggagcacccactgttcatcggcggcatgtgccagaactgtaaaaactgttttctggagtgtgcctatcaatacgacgatgacggctaccagagctactgcaccatctgttgcggcggaagagaggtgctgatgtgtggaaataacaactgctgccggtgcttctgcgtggaatgcgtggacctgctggtgggccccggcgccgcccaggccgctattaaggaagatccttggaactgctacatgtgcggccacaagggcacatacggcctgctgagacggagagaggactggcctagcagactgcagatgttcttcgccaataaccacgaccaggagttcgacccccctaaggtgtaccctcccgtccccgccgagaagagaaagcccatccgggtcctgagcctgttcgatggcatcgccaccggtctgctggtgctgaaggacctgggcatccaggtggataggtacattgcctccgaggtgtgcgaggactccatcaccgtgggaatggtgcgtcatcagggcaagatcatgtacgtgggcgacgtgcggagcgtgacacagaagcatatccaggagtggggccctttcgacctggtgatcggcggcagcccttgcaatgacctgagcatcgtgaacccagcccggaagggcctgtacgagggaaccggcagactgttcttcgagttttacagactgctgcacgacgcccggcctaaggaaggcgacgaccggcccttcttttggctgttcgagaatgtggtggccatgggagtcagcgacaagcgggatattagccggttcctggagagcaaccccgtgatgatcgatgccaaggaagtgagcgccgcccaccgggccagatacttctggggcaatctgcctggcatgaacagacccctggccagcaccgtgaacgacaagctggagctgcaggagtgcctggagcacggccggatcgccaagttcagcaaggtgagaaccatcaccacccgaagcaacagcatcaaacaaggcaaggaccagcactttcctgtgttcatgaacgagaaggaggacatcctgtggtgtaccgagatggagagagtgttcgggttcccagtccactacacagatgtcagcaacatgtctagactggccagacagagactgctgggaagaagctggtccgtccctgtgatcagacacctgttcgcccctctgaaggagtacttcgcctgcgtgagcagcggcaacagcaacgccaacagccggggccccagcttctctagcggcctggtgccactgtccctgagagggagccacatgggccccatggagatctacaaaaccgtgagcgcctggaagcggcagcctgtgcgcgtgctgagcctgtttcggaatatcgataaagtcctgaaaagcctgggattcctggagagcggctctggctccggcggtggcaccctgaagtacgtggaggatgtgacaaacgtggtcagacgggatgtggagaagtggggccccttcgatctggtgtacggcagcacccaacccctgggcagctcttgtgaccggtgccctggctggtacatgtttcagttccaccggatcctgcagtacgccctgccgagacaggagtcccagcggccattcttttggattttcatggacaacttgctgctgaccgaggatgaccaggaaactaccactcggttcctgcagaccgaagccgtgaccctgcaggacgtgagaggccgggactaccagaacgccatgcgggtgtggtccaacatccctggactgaaaagcaagcacgcacctctgacccctaaagaagaggagtacctgcaggcccaggtgcggagcagaagcaagctggacgcccctaaggtggatctgctggtgaagaattgcctcctgcccctgagagagtacttcaagtatttcagccagaatagtctgcccctgggaggcagcggcggcggcgccctggtgacatttgaggacgtcgccgtgcggttcacccaggaggaatgggctctgctggatccttctcagaaaatcctgtaccgggacgtgatgagagagacataccggaatctgacctccgtgggcatcaactgggaatgttgggaccttgaagcctgcttcagaagcctgggaagaaacctgagagtgcaggtggtgaagagaaagtgcgagctgaccaacagcggcccctgcgccgagggcggcccaagcagcggcgcccctcctcccagcggcggcagcccagccggctccccaacctctaccgaggagggcacctctgagtccgccacccccgagagcggccctggcacctccaccgagcccagcgagggcagcgcacccggcagccctgccggcagccccacctccacagaggagggaaccagcaccgagcccagcgaaggcagcgccccaggcaccagcaccgagcctagtgagcaggagattaaacggatcaacaagatcagaagaagacttgtgaaagacagcaacaccaagaaggccggcaagacaggccccatgaaaaccctgctggttagagtgatgacacccgatctgagagagcggctggaaaacctgagaaagaagcctgaaaatatcccccagcccatcagcaatacatctagagccaacctgaataagctgctgaccgattacaccgaaatgaagaaggcgatcctgcatgtgtactgggaagagttccagaaggaccctgtgggcctgatgagccgggtggcccagcctgccagcaagaagatcgatcagaacaagctgaaacctgagatggacgagaagggcaacctgaccaccgccggctttgcctgctctcagtgtggccagcccctgttcgtgtacaagctggagcaggtgtctgagaagggcaaggcttacaccaactacttcggacggtgcaatgtggccgagcacgaaaagctgatcctgctggcccagctgaagcccgagaaggatagcgacgaagccgtgacatatagcctgggaaagtttgggcagagggccctggatttctacagcattcatgtgaccaaggagtccacccaccccgtgaagcccctggcccagatcgccggaaacagatacgcctccggacctgtgggaaaggccctgagcgacgcatgtatgggcacaatcgcctccttcctgtctaagtaccaggacatcatcatcgaacaccagaaggtggtgaagggcaaccagaagagactggagagcctgcgggagctggccggcaaggaaaacctggaataccctagcgtgaccctgccacctcagcctcacaccaaggagggcgttgatgcctacaacgaagtgatcgcccgggtgcgaatgtgggtgaacctgaacctgtggcagaagctgaagctaagcagagatgatgccaagcctctgctgagactgaagggattcccttcctttcctctggtcgagagacaggccaacgaagtggactggtgggacatggtgtgtaacgtgaagaagctgatcaacgagaaaaaggaggatggcaaggtgttttggcagaatctggctggctacaagagacaggaagccctgagaccatacctgagcagcgaggaagatcggaagaagggaaagaaattcgctcggtaccagctgggcgacctgctgctgcacctggaaaagaagcacggcgaggactggggaaaggtgtacgacgaggcctgggagcggattgacaagaaagtggaaggcctgagcaagcacatcaagctggaagaggaacggagaagcgaggacgcccagagcaaggccgccctgaccgactggctgcgggctaaggccagcttcgtgatcgagggcctgaaggaggccgacaaggacgagttctgcagatgcgagctgaagctgcagaagtggtacggggacctgcggggaaagcccttcgccatcgaagccgagaacagcatcctggacatcagcggcttcagcaagcagtacaactgtgccttcatctggcagaaggacggcgtgaagaagctgaacctgtacctgatcatcaactacttcaagggcggcaagctgcggttcaagaagatcaaacctgaagccttcgaagccaacagattctacaccgtgatcaacaaaaagagcggcgagatcgtgcccatggaggtgaacttcaacttcgacgaccccaacctgatcatcctgcctctggcctttggcaagagacagggcagagaattcatctggaacgacctgctgtccctggaaaccggcagcctgaagctggccaacggaagagtgatcgagaagacactgtacaacagaagaacccggcaggatgagcctgccctgttcgtggccctgaccttcgagcggcgggaggtcctggactcctccaatatcaaaccaatgaacctgatcggcgtggcaagaggcgaaaacatccccgccgtgatcgccctgaccgaccccgagggctgcccactgagccggtttaaggatagcctgggaaacccaacccacatcctgagaatcggcgagagctataaggagaagcagcggaccatccaggccaagaaggaggtggagcagcggagagccggcggctacagccggaagtacgccagcaaagccaagaatctggcagacgatatggtgagaaacaccgctagagatctgctgtactacgccgtgacccaggatgccatgctgatcttcgccaacctgagccggggcttcggccggcagggcaagcggaccttcatggccgagagacagtacacacggatggaggactggctgaccgccaagctggcctacgagggcctgagcaagacctacctgtccaagacactggcccagtacacctccaagacatgcagcaactgtgggtttaccatcaccagcgccgactacgacagggtgctggagaagctgaagaagacagcaacaggctggatgaccacaattaacggcaaggagctgaaggtggagggccagattacctactacaacagatacaagagacagaacgtagtcaaggacctgtccgtcgagctggatagactgagcgaagaatctgtgaacaacgacatctcctcctggacaaagggcagaagcggagaagctctgagcctcctgaagaaaagattctcccatagacccgtgcaggagaagttcgtgtgcctgaactgcggcttcgagacacacgcagccgagcaagccgccctgaacatcgccagatcctggctgttcctgcggagccaggagtacaagaaataccagacaaacaagacaaccggcaacaccgataagagagccttcgtcgagacctggcagtccttttaccggaagaagcttaaggaggtgtggaaacctgccgtgcggtctggcggatctggcggaggctcccaggtgcccgtgaccttcgaggacatcgccgtgtacttcagccaggaggagtgggaggacctggaggagcagcagagggagctgtacaaggacgtgatgaaggagaactacgagaccctgagcagcctgggcaccggcccccccgccgtgacccccgacatcatcagccacatcgagaggggcgaggagccctacatcaggttcgagagcggccccgaggagagggagatcggcaagagcagcggcggcccaagcagcggcgcccctcctcccagcggcggcagcccagccggctccccaacctctaccgaggagggcacctctgagtccgccacccccgagagcggccctggcacctccaccgagcccagcgagggcagcgcacccggcagccctgccggcagccccacctccacagaggagggaaccagcaccgagcccagcgaaggcagcgccccaggcaccagcaccgagcctagtgagcaggagattaaacggatcaacaagatcagaagaagacttgtgaaagacagcaacaccaagaaggccggcaagacaggccccatgaaaaccctgctggttagagtgatgacacccgatctgagagagcggctggaaaacctgagaaagaagcctgaaaatatcccccagcccatcagcaatacatctagagccaacctgaataagctgctgaccgattacaccgaaatgaagaaggcgatcctgcatgtgtactgggaagagttccagaaggaccctgtgggcctgatgagccgggtggcccagcctgccagcaagaagatcgatcagaacaagctgaaacctgagatggacgagaagggcaacctgaccaccgccggctttgcctgctctcagtgtggccagcccctgttcgtgtacaagctggagcaggtgtctgagaagggcaaggcttacaccaactacttcggacggtgcaatgtggccgagcacgaaaagctgatcctgctggcccagctgaagcccgagaaggatagcgacgaagccgtgacatatagcctgggaaagtttgggcagagggccctggatttctacagcattcatgtgaccaaggagtccacccaccccgtgaagcccctggcccagatcgccggaaacagatacgcctccggacctgtgggaaaggccctgagcgacgcatgtatgggcacaatcgcctccttcctgtctaagtaccaggacatcatcatcgaacaccagaaggtggtgaagggcaaccagaagagactggagagcctgcgggagctggccggcaaggaaaacctggaataccctagcgtgaccctgccacctcagcctcacaccaaggagggcgttgatgcctacaacgaagtgatcgcccgggtgcgaatgtgggtgaacctgaacctgtggcagaagctgaagctaagcagagatgatgccaagcctctgctgagactgaagggattcccttcctttcctctggtcgagagacaggccaacgaagtggactggtgggacatggtgtgtaacgtgaagaagctgatcaacgagaaaaaggaggatggcaaggtgttttggcagaatctggctggctacaagagacaggaagccctgagaccatacctgagcagcgaggaagatcggaagaagggaaagaaattcgctcggtaccagctgggcgacctgctgctgcacctggaaaagaagcacggcgaggactggggaaaggtgtacgacgaggcctgggagcggattgacaagaaagtggaaggcctgagcaagcacatcaagctggaagaggaacggagaagcgaggacgcccagagcaaggccgccctgaccgactggctgcgggctaaggccagcttcgtgatcgagggcctgaaggaggccgacaaggacgagttctgcagatgcgagctgaagctgcagaagtggtacggggacctgcggggaaagcccttcgccatcgaagccgagaacagcatcctggacatcagcggcttcagcaagcagtacaactgtgccttcatctggcagaaggacggcgtgaagaagctgaacctgtacctgatcatcaactacttcaagggcggcaagctgcggttcaagaagatcaaacctgaagccttcgaagccaacagattctacaccgtgatcaacaaaaagagcggcgagatcgtgcccatggaggtgaacttcaacttcgacgaccccaacctgatcatcctgcctctggcctttggcaagagacagggcagagaattcatctggaacgacctgctgtccctggaaaccggcagcctgaagctggccaacggaagagtgatcgagaagacactgtacaacagaagaacccggcaggatgagcctgccctgttcgtggccctgaccttcgagcggcgggaggtcctggactcctccaatatcaaaccaatgaacctgatcggcgtggcaagaggcgaaaacatccccgccgtgatcgccctgaccgaccccgagggctgcccactgagccggtttaaggatagcctgggaaacccaacccacatcctgagaatcggcgagagctataaggagaagcagcggaccatccaggccaagaaggaggtggagcagcggagagccggcggctacagccggaagtacgccagcaaagccaagaatctggcagacgatatggtgagaaacaccgctagagatctgctgtactacgccgtgacccaggatgccatgctgatcttcgccaacctgagccggggcttcggccggcagggcaagcggaccttcatggccgagagacagtacacacggatggaggactggctgaccgccaagctggcctacgagggcctgagcaagacctacctgtccaagacactggcccagtacacctccaagacatgcagcaactgtgggtttaccatcaccagcgccgactacgacagggtgctggagaagctgaagaagacagcaacaggctggatgaccacaattaacggcaaggagctgaaggtggagggccagattacctactacaacagatacaagagacagaacgtagtcaaggacctgtccgtcgagctggatagactgagcgaagaatctgtgaacaacgacatctcctcctggacaaagggcagaagcggagaagctctgagcctcctgaagaaaagattctcccatagacccgtgcaggagaagttcgtgtgcctgaactgcggcttcgagacacacgcagccgagcaagccgccctgaacatcgccagatcctggctgttcctgcggagccaggagtacaagaaataccagacaaacaagacaaccggcaacaccgataagagagccttcgtcgagacctggcagtccttttaccggaagaagcttaaggaggtgtggaaacctgccgtgcggtctggcggatctggcggaggctcctcaggtgcccgtgaccttcgaggacatcgccgtgtacttcagccaggaggagtgggaggacctggaggagcagcagagggagctgtacaaggacgtgatgaaggagaactacgagaccctgagcagcctgggcaccggcccccccgccgtgacccccgacatcatcagccacatcgagaggggcgaggagccctacatcaggttcgagagcggccccgaggagagggagatcggcaagagcagcggatctggctccggcagcggccccaagaaaaagagaaaagtctaagctgccttctgcggggcttgccttctggccatgcccttcttctctcccttgcacctgtacctcttggtctttgaataaagcctgagtaggaaggctagcaaaaaaaaaaaaaaaaaaaaaaaaaaaaaaaaaaaaaaaaaaaaaaaaaaaaaaaaaaaaaaaaaaaaaaaaaaaaaaaa

SEQ ID NO: 16362 - RNA, 9485 nt, synthetic construct
  source 1..9485: mol_type = other RNA
aggaaataagagagaaaagaagagtaagaagaaatataagagccaccatggcccctaagaagaagcgtaaagtgagccggatggaacgcctcgtctacgaggtgcggcagaagtgcagaaacatcgaggacatctgcatctcctgcggatctctgaacgtgaccctggagcacccactgttcatcggcggcatgtgccagaactgtaaaaactgttttctggagtgtgcctatcaatacgacgatgacggctaccagagctactgcaccatctgttgcggcggaagagaggtgctgatgtgtggaaataacaactgctgccggtgcttctgcgtggaatgcgtggacctgctggtgggccccggcgccgcccaggccgctattaaggaagatccttggaactgctacatgtgcggccacaagggcacatacggcctgctgagacggagagaggactggcctagcagactgcagatgttcttcgccaataaccacgaccaggagttcgacccccctaaggtgtaccctcccgtccccgccgagaagagaaagcccatccgggtcctgagcctgttcgatggcatcgccaccggtctgctggtgctgaaggacctgggcatccaggtggataggtacattgcctccgaggtgtgcgaggactccatcaccgtgggaatggtgcgtcatcagggcaagatcatgtacgtgggcgacgtgcggagcgtgacacagaagcatatccaggagtggggccctttcgacctggtgatcggcggcagcccttgcaatgacctgagcatcgtgaacccagcccggaagggcctgtacgagggaaccggcagactgttcttcgagttttacagactgctgcacgacgcccggcctaaggaaggcgacgaccggcccttcttttggctgttcgagaatgtggtggccatgggagtcagcgacaagcgggatattagccggttcctggagagcaaccccgtgatgatcgatgccaaggaagtgagcgccgcccaccgggccagatacttctggggcaatctgcctggcatgaacagacccctggccagcaccgtgaacgacaagctggagctgcaggagtgcctggagcacggccggatcgccaagttcagcaaggtgagaaccatcaccacccgaagcaacagcatcaaacaaggcaaggaccagcactttcctgtgttcatgaacgagaaggaggacatcctgtggtgtaccgagatggagagagtgttcgggttcccagtccactacacagatgtcagcaacatgtctagactggccagacagagactgctgggaagaagctggtccgtccctgtgatcagacacctgttcgcccctctgaaggagtacttcgcctgcgtgagcagcggcaacagcaacgccaacagccggggccccagcttctctagcggcctggtgccactgtccctgagagggagccacatgggccccatggagatctacaaaaccgtgagcgcctggaagcggcagcctgtgcgcgtgctgagcctgtttcggaatatcgataaagtcctgaaaagcctgggattcctggagagcggctctggctccggcggtggcaccctgaagtacgtggaggatgtgacaaacgtggtcagacgggatgtggagaagtggggccccttcgatctggtgtacggcagcacccaacccctgggcagctcttgtgaccggtgccctggctggtacatgtttcagttccaccggatcctgcagtacgccctgccgagacaggagtcccagcggccattcttttggattttcatggacaacttgctgctgaccgaggatgaccaggaaactaccactcggttcctgcagaccgaagccgtgaccctgcaggacgtgagaggccgggactaccagaacgccatgcgggtgtggtccaacatccctggactgaaaagcaagcacgcacctctgacccctaaagaagaggagtacctgcaggcccaggtgcggagcagaagcaagctggacgcccctaaggtggatctgctggtgaagaattgcctcctgcccctgagagagtacttcaagtatttcagccagaatagtctgcccctgggaggcagcggcggcggcgccctggtgacatttgaggacgtcgccgtgcggttcacccaggaggaatgggctctgctggatccttctcagaaaatcctgtaccgggacgtgatgagagagacataccggaatctgacctccgtgggcatcaactgggaatgttgggaccttgaagcctgcttcagaagcctgggaagaaacctgagagtgcaggtggtgaagagaaagtgcgagctgaccaacagcggcccctgcgccgagggcggcccaagcagcggcgcccctcctcccagcggcggcagcccagccggctccccaacctctaccgaggagggcacctctgagtccgccacccccgagagcggccctggcacctccaccgagcccagcgagggcagcgcacccggcagccctgccggcagccccacctccacagaggagggaaccagcaccgagcccagcgaaggcagcgccccaggcaccagcaccgagcctagtgagcaggagattaaacggatcaacaagatcagaagaagacttgtgaaagacagcaacaccaagaaggccggcaagacaggccccatgaaaaccctgctggttagagtgatgacacccgatctgagagagcggctggaaaacctgagaaagaagcctgaaaatatcccccagcccatcagcaatacatctagagccaacctgaataagctgctgaccgattacaccgaaatgaagaaggcgatcctgcatgtgtactgggaagagttccagaaggaccctgtgggcctgatgagccgggtggcccagcctgccagcaagaagatcgatcagaacaagctgaaacctgagatggacgagaagggcaacctgaccaccgccggctttgcctgctctcagtgtggccagcccctgttcgtgtacaagctggagcaggtgtctgagaagggcaaggcttacaccaactacttcggacggtgcaatgtggccgagcacgaaaagctgatcctgctggcccagctgaagcccgagaaggatagcgacgaagccgtgacatatagcctgggaaagtttgggcagagggccctggatttctacagcattcatgtgaccaaggagtccacccaccccgtgaagcccctggcccagatcgccggaaacagatacgcctccggacctgtgggaaaggccctgagcgacgcatgtatgggcacaatcgcctccttcctgtctaagtaccaggacatcatcatcgaacaccagaaggtggtgaagggcaaccagaagagactggagagcctgcgggagctggccggcaaggaaaacctggaataccctagcgtgaccctgccacctcagcctcacaccaaggagggcgttgatgcctacaacgaagtgatcgcccgggtgcgaatgtgggtgaacctgaacctgtggcagaagctgaagctaagcagagatgatgccaagcctctgctgagactgaagggattcccttcctttcctctggtcgagagacaggccaacgaagtggactggtgggacatggtgtgtaacgtgaagaagctgatcaacgagaaaaaggaggatggcaaggtgttttggcagaatctggctggctacaagagacaggaagccctgagaccatacctgagcagcgaggaagatcggaagaagggaaagaaattcgctcggtaccagctgggcgacctgctgctgcacctggaaaagaagcacggcgaggactggggaaaggtgtacgacgaggcctgggagcggattgacaagaaagtggaaggcctgagcaagcacatcaagctggaagaggaacggagaagcgaggacgcccagagcaaggccgccctgaccgactggctgcgggctaaggccagcttcgtgatcgagggcctgaaggaggccgacaaggacgagttctgcagatgcgagctgaagctgcagaagtggtacggggacctgcggggaaagcccttcgccatcgaagccgagaacagcatcctggacatcagcggcttcagcaagcagtacaactgtgccttcatctggcagaaggacggcgtgaagaagctgaacctgtacctgatcatcaactacttcaagggcggcaagctgcggttcaagaagatcaaacctgaagccttcgaagccaacagattctacaccgtgatcaacaaaaagagcggcgagatcgtgcccatggaggtgaacttcaacttcgacgaccccaacctgatcatcctgcctctggcctttggcaagagacagggcagagaattcatctggaacgacctgctgtccctggaaaccggcagcctgaagctggccaacggaagagtgatcgagaagacactgtacaacagaagaacccggcaggatgagcctgccctgttcgtggccctgaccttcgagcggcgggaggtcctggactcctccaatatcaaaccaatgaacctgatcggcgtggcaagaggcgaaaacatccccgccgtgatcgccctgaccgaccccgagggctgcccactgagccggtttaaggatagcctgggaaacccaacccacatcctgagaatcggcgagagctataaggagaagcagcggaccatccaggccaagaaggaggtggagcagcggagagccggcggctacagccggaagtacgccagcaaagccaagaatctggcagacgatatggtgagaaacaccgctagagatctgctgtactacgccgtgacccaggatgccatgctgatcttcgccaacctgagccggggcttcggccggcagggcaagcggaccttcatggccgagagacagtacacacggatggaggactggctgaccgccaagctggcctacgagggcctgagcaagacctacctgtccaagacactggcccagtacacctccaagacatgcagcaactgtgggtttaccatcaccagcgccgactacgacagggtgctggagaagctgaagaagacagcaacaggctggatgaccacaattaacggcaaggagctgaaggtggagggccagattacctactacaacagatacaagagacagaacgtagtcaaggacctgtccgtcgagctggatagactgagcgaagaatctgtgaacaacgacatctcctcctggacaaagggcagaagcggagaagctctgagcctcctgaagaaaagattctcccatagacccgtgcaggagaagttcgtgtgcctgaactgcggcttcgagacacacgcagccgagcaagccgccctgaacatcgccagatcctggctgttcctgcggagccaggagtacaagaaataccagacaaacaagacaaccggcaacaccgataagagagccttcgtcgagacctggcagtccttttaccggaagaagcttaaggaggtgtggaaacctgccgtgcggtctggcggatctggcggaggctccgaggagcccgtgagcttcgccgaggtggccgtgtacttcagcagggaggagtgggccctgctggaccccgcccagagggccctgtacagggacgtgatgctggagacctaccagtgcgtggccagcatggagagcctgctgcccgcccccaagcccatcgtgatcagcctgctggagggcggcgaggacctgtggatccccgacatgcagagccccgaggacgtggccggcgacctgaggcccggcggcccaagcagcggcgcccctcctcccagcggcggcagcccagccggctccccaacctctaccgaggagggcacctctgagtccgccacccccgagagcggccctggcacctccaccgagcccagcgagggcagcgcacccggcagccctgccggcagccccacctccacagaggagggaaccagcaccgagcccagcgaaggcagcgccccaggcaccagcaccgagcctagtgagcaggagattaaacggatcaacaagatcagaagaagacttgtgaaagacagcaacaccaagaaggccggcaagacaggccccatgaaaaccctgctggttagagtgatgacacccgatctgagagagcggctggaaaacctgagaaagaagcctgaaaatatcccccagcccatcagcaatacatctagagccaacctgaataagctgctgaccgattacaccgaaatgaagaaggcgatcctgcatgtgtactgggaagagttccagaaggaccctgtgggcctgatgagccgggtggcccagcctgccagcaagaagatcgatcagaacaagctgaaacctgagatggacgagaagggcaacctgaccaccgccggctttgcctgctctcagtgtggccagcccctgttcgtgtacaagctggagcaggtgtctgagaagggcaaggcttacaccaactacttcggacggtgcaatgtggccgagcacgaaaagctgatcctgctggcccagctgaagcccgagaaggatagcgacgaagccgtgacatatagcctgggaaagtttgggcagagggccctggatttctacagcattcatgtgaccaaggagtccacccaccccgtgaagcccctggcccagatcgccggaaacagatacgcctccggacctgtgggaaaggccctgagcgacgcatgtatgggcacaatcgcctccttcctgtctaagtaccaggacatcatcatcgaacaccagaaggtggtgaagggcaaccagaagagactggagagcctgcgggagctggccggcaaggaaaacctggaataccctagcgtgaccctgccacctcagcctcacaccaaggagggcgttgatgcctacaacgaagtgatcgcccgggtgcgaatgtgggtgaacctgaacctgtggcagaagctgaagctaagcagagatgatgccaagcctctgctgagactgaagggattcccttcctttcctctggtcgagagacaggccaacgaagtggactggtgggacatggtgtgtaacgtgaagaagctgatcaacgagaaaaaggaggatggcaaggtgttttggcagaatctggctggctacaagagacaggaagccctgagaccatacctgagcagcgaggaagatcggaagaagggaaagaaattcgctcggtaccagctgggcgacctgctgctgcacctggaaaagaagcacggcgaggactggggaaaggtgtacgacgaggcctgggagcggattgacaagaaagtggaaggcctgagcaagcacatcaagctggaagaggaacggagaagcgaggacgcccagagcaaggccgccctgaccgactggctgcgggctaaggccagcttcgtgatcgagggcctgaaggaggccgacaaggacgagttctgcagatgcgagctgaagctgcagaagtggtacggggacctgcggggaaagcccttcgccatcgaagccgagaacagcatcctggacatcagcggcttcagcaagcagtacaactgtgccttcatctggcagaaggacggcgtgaagaagctgaacctgtacctgatcatcaactacttcaagggcggcaagctgcggttcaagaagatcaaacctgaagccttcgaagccaacagattctacaccgtgatcaacaaaaagagcggcgagatcgtgcccatggaggtgaacttcaacttcgacgaccccaacctgatcatcctgcctctggcctttggcaagagacagggcagagaattcatctggaacgacctgctgtccctggaaaccggcagcctgaagctggccaacggaagagtgatcgagaagacactgtacaacagaagaacccggcaggatgagcctgccctgttcgtggccctgaccttcgagcggcgggaggtcctggactcctccaatatcaaaccaatgaacctgatcggcgtggcaagaggcgaaaacatccccgccgtgatcgccctgaccgaccccgagggctgcccactgagccggtttaaggatagcctgggaaacccaacccacatcctgagaatcggcgagagctataaggagaagcagcggaccatccaggccaagaaggaggtggagcagcggagagccggcggctacagccggaagtacgccagcaaagccaagaatctggcagacgatatggtgagaaacaccgctagagatctgctgtactacgccgtgacccaggatgccatgctgatcttcgccaacctgagccggggcttcggccggcagggcaagcggaccttcatggccgagagacagtacacacggatggaggactggctgaccgccaagctggcctacgagggcctgagcaagacctacctgtccaagacactggcccagtacacctccaagacatgcagcaactgtgggtttaccatcaccagcgccgactacgacagggtgctggagaagctgaagaagacagcaacaggctggatgaccacaattaacggcaaggagctgaaggtggagggccagattacctactacaacagatacaagagacagaacgtagtcaaggacctgtccgtcgagctggatagactgagcgaagaatctgtgaacaacgacatctcctcctggacaaagggcagaagcggagaagctctgagcctcctgaagaaaagattctcccatagacccgtgcaggagaagttcgtgtgcctgaactgcggcttcgagacacacgcagccgagcaagccgccctgaacatcgccagatcctggctgttcctgcggagccaggagtacaagaaataccagacaaacaagacaaccggcaacaccgataagagagccttcgtcgagacctggcagtccttttaccggaagaagcttaaggaggtgtggaaacctgccgtgcggtctggcggatctggcggaggctcctgaggagcccgtgagcttcgccgaggtggccgtgtacttcagcagggaggagtgggccctgctggaccccgcccagagggccctgtacagggacgtgatgctggagacctaccagtgcgtggccagcatggagagcctgctgcccgcccccaagcccatcgtgatcagcctgctggagggcggcgaggacctgtggatccccgacatgcagagccccgaggacgtggccggcgacctgaggcccggatctggctccggcagcggccccaagaaaaagagaaaagtctaagctgccttctgcggggcttgccttctggccatgcccttcttctctcccttgcacctgtacctcttggtctttgaataaagcctgagtaggaaggctagcaaaaaaaaaaaaaaaaaaaaaaaaaaaaaaaaaaaaaaaaaaaaaaaaaaaaaaaaaaaaaaaaaaaaaaaaaaaaaaaa

SEQ ID NO: 16363 - RNA, 9485 nt, synthetic construct
  source 1..9485: mol_type = other RNA
aggaaataagagagaaaagaagagtaagaagaaatataagagccaccatggcccctaagaagaagcgtaaagtgagccggatggaacgcctcgtctacgaggtgcggcagaagtgcagaaacatcgaggacatctgcatctcctgcggatctctgaacgtgaccctggagcacccactgttcatcggcggcatgtgccagaactgtaaaaactgttttctggagtgtgcctatcaatacgacgatgacggctaccagagctactgcaccatctgttgcggcggaagagaggtgctgatgtgtggaaataacaactgctgccggtgcttctgcgtggaatgcgtggacctgctggtgggccccggcgccgcccaggccgctattaaggaagatccttggaactgctacatgtgcggccacaagggcacatacggcctgctgagacggagagaggactggcctagcagactgcagatgttcttcgccaataaccacgaccaggagttcgacccccctaaggtgtaccctcccgtccccgccgagaagagaaagcccatccgggtcctgagcctgttcgatggcatcgccaccggtctgctggtgctgaaggacctgggcatccaggtggataggtacattgcctccgaggtgtgcgaggactccatcaccgtgggaatggtgcgtcatcagggcaagatcatgtacgtgggcgacgtgcggagcgtgacacagaagcatatccaggagtggggccctttcgacctggtgatcggcggcagcccttgcaatgacctgagcatcgtgaacccagcccggaagggcctgtacgagggaaccggcagactgttcttcgagttttacagactgctgcacgacgcccggcctaaggaaggcgacgaccggcccttcttttggctgttcgagaatgtggtggccatgggagtcagcgacaagcgggatattagccggttcctggagagcaaccccgtgatgatcgatgccaaggaagtgagcgccgcccaccgggccagatacttctggggcaatctgcctggcatgaacagacccctggccagcaccgtgaacgacaagctggagctgcaggagtgcctggagcacggccggatcgccaagttcagcaaggtgagaaccatcaccacccgaagcaacagcatcaaacaaggcaaggaccagcactttcctgtgttcatgaacgagaaggaggacatcctgtggtgtaccgagatggagagagtgttcgggttcccagtccactacacagatgtcagcaacatgtctagactggccagacagagactgctgggaagaagctggtccgtccctgtgatcagacacctgttcgcccctctgaaggagtacttcgcctgcgtgagcagcggcaacagcaacgccaacagccggggccccagcttctctagcggcctggtgccactgtccctgagagggagccacatgggccccatggagatctacaaaaccgtgagcgcctggaagcggcagcctgtgcgcgtgctgagcctgtttcggaatatcgataaagtcctgaaaagcctgggattcctggagagcggctctggctccggcggtggcaccctgaagtacgtggaggatgtgacaaacgtggtcagacgggatgtggagaagtggggccccttcgatctggtgtacggcagcacccaacccctgggcagctcttgtgaccggtgccctggctggtacatgtttcagttccaccggatcctgcagtacgccctgccgagacaggagtcccagcggccattcttttggattttcatggacaacttgctgctgaccgaggatgaccaggaaactaccactcggttcctgcagaccgaagccgtgaccctgcaggacgtgagaggccgggactaccagaacgccatgcgggtgtggtccaacatccctggactgaaaagcaagcacgcacctctgacccctaaagaagaggagtacctgcaggcccaggtgcggagcagaagcaagctggacgcccctaaggtggatctgctggtgaagaattgcctcctgcccctgagagagtacttcaagtatttcagccagaatagtctgcccctgggaggcagcggcggcggcgccctggtgacatttgaggacgtcgccgtgcggttcacccaggaggaatgggctctgctggatccttctcagaaaatcctgtaccgggacgtgatgagagagacataccggaatctgacctccgtgggcatcaactgggaatgttgggaccttgaagcctgcttcagaagcctgggaagaaacctgagagtgcaggtggtgaagagaaagtgcgagctgaccaacagcggcccctgcgccgagggcggcccaagcagcggcgcccctcctcccagcggcggcagcccagccggctccccaacctctaccgaggagggcacctctgagtccgccacccccgagagcggccctggcacctccaccgagcccagcgagggcagcgcacccggcagccctgccggcagccccacctccacagaggagggaaccagcaccgagcccagcgaaggcagcgccccaggcaccagcaccgagcctagtgagcaggagattaaacggatcaacaagatcagaagaagacttgtgaaagacagcaacaccaagaaggccggcaagacaggccccatgaaaaccctgctggttagagtgatgacacccgatctgagagagcggctggaaaacctgagaaagaagcctgaaaatatcccccagcccatcagcaatacatctagagccaacctgaataagctgctgaccgattacaccgaaatgaagaaggcgatcctgcatgtgtactgggaagagttccagaaggaccctgtgggcctgatgagccgggtggcccagcctgccagcaagaagatcgatcagaacaagctgaaacctgagatggacgagaagggcaacctgaccaccgccggctttgcctgctctcagtgtggccagcccctgttcgtgtacaagctggagcaggtgtctgagaagggcaaggcttacaccaactacttcggacggtgcaatgtggccgagcacgaaaagctgatcctgctggcccagctgaagcccgagaaggatagcgacgaagccgtgacatatagcctgggaaagtttgggcagagggccctggatttctacagcattcatgtgaccaaggagtccacccaccccgtgaagcccctggcccagatcgccggaaacagatacgcctccggacctgtgggaaaggccctgagcgacgcatgtatgggcacaatcgcctccttcctgtctaagtaccaggacatcatcatcgaacaccagaaggtggtgaagggcaaccagaagagactggagagcctgcgggagctggccggcaaggaaaacctggaataccctagcgtgaccctgccacctcagcctcacaccaaggagggcgttgatgcctacaacgaagtgatcgcccgggtgcgaatgtgggtgaacctgaacctgtggcagaagctgaagctaagcagagatgatgccaagcctctgctgagactgaagggattcccttcctttcctctggtcgagagacaggccaacgaagtggactggtgggacatggtgtgtaacgtgaagaagctgatcaacgagaaaaaggaggatggcaaggtgttttggcagaatctggctggctacaagagacaggaagccctgagaccatacctgagcagcgaggaagatcggaagaagggaaagaaattcgctcggtaccagctgggcgacctgctgctgcacctggaaaagaagcacggcgaggactggggaaaggtgtacgacgaggcctgggagcggattgacaagaaagtggaaggcctgagcaagcacatcaagctggaagaggaacggagaagcgaggacgcccagagcaaggccgccctgaccgactggctgcgggctaaggccagcttcgtgatcgagggcctgaaggaggccgacaaggacgagttctgcagatgcgagctgaagctgcagaagtggtacggggacctgcggggaaagcccttcgccatcgaagccgagaacagcatcctggacatcagcggcttcagcaagcagtacaactgtgccttcatctggcagaaggacggcgtgaagaagctgaacctgtacctgatcatcaactacttcaagggcggcaagctgcggttcaagaagatcaaacctgaagccttcgaagccaacagattctacaccgtgatcaacaaaaagagcggcgagatcgtgcccatggaggtgaacttcaacttcgacgaccccaacctgatcatcctgcctctggcctttggcaagagacagggcagagaattcatctggaacgacctgctgtccctggaaaccggcagcctgaagctggccaacggaagagtgatcgagaagacactgtacaacagaagaacccggcaggatgagcctgccctgttcgtggccctgaccttcgagcggcgggaggtcctggactcctccaatatcaaaccaatgaacctgatcggcgtggcaagaggcgaaaacatccccgccgtgatcgccctgaccgaccccgagggctgcccactgagccggtttaaggatagcctgggaaacccaacccacatcctgagaatcggcgagagctataaggagaagcagcggaccatccaggccaagaaggaggtggagcagcggagagccggcggctacagccggaagtacgccagcaaagccaagaatctggcagacgatatggtgagaaacaccgctagagatctgctgtactacgccgtgacccaggatgccatgctgatcttcgccaacctgagccggggcttcggccggcagggcaagcggaccttcatggccgagagacagtacacacggatggaggactggctgaccgccaagctggcctacgagggcctgagcaagacctacctgtccaagacactggcccagtacacctccaagacatgcagcaactgtgggtttaccatcaccagcgccgactacgacagggtgctggagaagctgaagaagacagcaacaggctggatgaccacaattaacggcaaggagctgaaggtggagggccagattacctactacaacagatacaagagacagaacgtagtcaaggacctgtccgtcgagctggatagactgagcgaagaatctgtgaacaacgacatctcctcctggacaaagggcagaagcggagaagctctgagcctcctgaagaaaagattctcccatagacccgtgcaggagaagttcgtgtgcctgaactgcggcttcgagacacacgcagccgagcaagccgccctgaacatcgccagatcctggctgttcctgcggagccaggagtacaagaaataccagacaaacaagacaaccggcaacaccgataagagagccttcgtcgagacctggcagtccttttaccggaagaagcttaaggaggtgtggaaacctgccgtgcggtctggcggatctggcggaggctccatgagcctgggcagcgagctgttcagggacgtggccatcgtgttcagccaggaggagtggcagtggctggcccccgcccagagggacctgtacagggacgtgatgctggagacctacagcaacctggtgagcctgggcctggccgtgagcaagcccgacgtgatcagcttcctggagcagggcaaggagccctggatggtggagagggtggtgagcggcggcctgtgccccgtgctggagagcggcggcccaagcagcggcgcccctcctcccagcggcggcagcccagccggctccccaacctctaccgaggagggcacctctgagtccgccacccccgagagcggccctggcacctccaccgagcccagcgagggcagcgcacccggcagccctgccggcagccccacctccacagaggagggaaccagcaccgagcccagcgaaggcagcgccccaggcaccagcaccgagcctagtgagcaggagattaaacggatcaacaagatcagaagaagacttgtgaaagacagcaacaccaagaaggccggcaagacaggccccatgaaaaccctgctggttagagtgatgacacccgatctgagagagcggctggaaaacctgagaaagaagcctgaaaatatcccccagcccatcagcaatacatctagagccaacctgaataagctgctgaccgattacaccgaaatgaagaaggcgatcctgcatgtgtactgggaagagttccagaaggaccctgtgggcctgatgagccgggtggcccagcctgccagcaagaagatcgatcagaacaagctgaaacctgagatggacgagaagggcaacctgaccaccgccggctttgcctgctctcagtgtggccagcccctgttcgtgtacaagctggagcaggtgtctgagaagggcaaggcttacaccaactacttcggacggtgcaatgtggccgagcacgaaaagctgatcctgctggcccagctgaagcccgagaaggatagcgacgaagccgtgacatatagcctgggaaagtttgggcagagggccctggatttctacagcattcatgtgaccaaggagtccacccaccccgtgaagcccctggcccagatcgccggaaacagatacgcctccggacctgtgggaaaggccctgagcgacgcatgtatgggcacaatcgcctccttcctgtctaagtaccaggacatcatcatcgaacaccagaaggtggtgaagggcaaccagaagagactggagagcctgcgggagctggccggcaaggaaaacctggaataccctagcgtgaccctgccacctcagcctcacaccaaggagggcgttgatgcctacaacgaagtgatcgcccgggtgcgaatgtgggtgaacctgaacctgtggcagaagctgaagctaagcagagatgatgccaagcctctgctgagactgaagggattcccttcctttcctctggtcgagagacaggccaacgaagtggactggtgggacatggtgtgtaacgtgaagaagctgatcaacgagaaaaaggaggatggcaaggtgttttggcagaatctggctggctacaagagacaggaagccctgagaccatacctgagcagcgaggaagatcggaagaagggaaagaaattcgctcggtaccagctgggcgacctgctgctgcacctggaaaagaagcacggcgaggactggggaaaggtgtacgacgaggcctgggagcggattgacaagaaagtggaaggcctgagcaagcacatcaagctggaagaggaacggagaagcgaggacgcccagagcaaggccgccctgaccgactggctgcgggctaaggccagcttcgtgatcgagggcctgaaggaggccgacaaggacgagttctgcagatgcgagctgaagctgcagaagtggtacggggacctgcggggaaagcccttcgccatcgaagccgagaacagcatcctggacatcagcggcttcagcaagcagtacaactgtgccttcatctggcagaaggacggcgtgaagaagctgaacctgtacctgatcatcaactacttcaagggcggcaagctgcggttcaagaagatcaaacctgaagccttcgaagccaacagattctacaccgtgatcaacaaaaagagcggcgagatcgtgcccatggaggtgaacttcaacttcgacgaccccaacctgatcatcctgcctctggcctttggcaagagacagggcagagaattcatctggaacgacctgctgtccctggaaaccggcagcctgaagctggccaacggaagagtgatcgagaagacactgtacaacagaagaacccggcaggatgagcctgccctgttcgtggccctgaccttcgagcggcgggaggtcctggactcctccaatatcaaaccaatgaacctgatcggcgtggcaagaggcgaaaacatccccgccgtgatcgccctgaccgaccccgagggctgcccactgagccggtttaaggatagcctgggaaacccaacccacatcctgagaatcggcgagagctataaggagaagcagcggaccatccaggccaagaaggaggtggagcagcggagagccggcggctacagccggaagtacgccagcaaagccaagaatctggcagacgatatggtgagaaacaccgctagagatctgctgtactacgccgtgacccaggatgccatgctgatcttcgccaacctgagccggggcttcggccggcagggcaagcggaccttcatggccgagagacagtacacacggatggaggactggctgaccgccaagctggcctacgagggcctgagcaagacctacctgtccaagacactggcccagtacacctccaagacatgcagcaactgtgggtttaccatcaccagcgccgactacgacagggtgctggagaagctgaagaagacagcaacaggctggatgaccacaattaacggcaaggagctgaaggtggagggccagattacctactacaacagatacaagagacagaacgtagtcaaggacctgtccgtcgagctggatagactgagcgaagaatctgtgaacaacgacatctcctcctggacaaagggcagaagcggagaagctctgagcctcctgaagaaaagattctcccatagacccgtgcaggagaagttcgtgtgcctgaactgcggcttcgagacacacgcagccgagcaagccgccctgaacatcgccagatcctggctgttcctgcggagccaggagtacaagaaataccagacaaacaagacaaccggcaacaccgataagagagccttcgtcgagacctggcagtccttttaccggaagaagcttaaggaggtgtggaaacctgccgtgcggtctggcggatctggcggaggctcctatgagcctgggcagcgagctgttcagggacgtggccatcgtgttcagccaggaggagtggcagtggctggcccccgcccagagggacctgtacagggacgtgatgctggagacctacagcaacctggtgagcctgggcctggccgtgagcaagcccgacgtgatcagcttcctggagcagggcaaggagccctggatggtggagagggtggtgagcggcggcctgtgccccgtgctggagagcggatctggctccggcagcggccccaagaaaaagagaaaagtctaagctgccttctgcggggcttgccttctggccatgcccttcttctctcccttgcacctgtacctcttggtctttgaataaagcctgagtaggaaggctagcaaaaaaaaaaaaaaaaaaaaaaaaaaaaaaaaaaaaaaaaaaaaaaaaaaaaaaaaaaaaaaaaaaaaaaaaaaaaaaaa

SEQ ID NO: 16364 - RNA, 9485 nt, synthetic construct
  source 1..9485: mol_type = other RNA
aggaaataagagagaaaagaagagtaagaagaaatataagagccaccatggcccctaagaagaagcgtaaagtgagccggatggaacgcctcgtctacgaggtgcggcagaagtgcagaaacatcgaggacatctgcatctcctgcggatctctgaacgtgaccctggagcacccactgttcatcggcggcatgtgccagaactgtaaaaactgttttctggagtgtgcctatcaatacgacgatgacggctaccagagctactgcaccatctgttgcggcggaagagaggtgctgatgtgtggaaataacaactgctgccggtgcttctgcgtggaatgcgtggacctgctggtgggccccggcgccgcccaggccgctattaaggaagatccttggaactgctacatgtgcggccacaagggcacatacggcctgctgagacggagagaggactggcctagcagactgcagatgttcttcgccaataaccacgaccaggagttcgacccccctaaggtgtaccctcccgtccccgccgagaagagaaagcccatccgggtcctgagcctgttcgatggcatcgccaccggtctgctggtgctgaaggacctgggcatccaggtggataggtacattgcctccgaggtgtgcgaggactccatcaccgtgggaatggtgcgtcatcagggcaagatcatgtacgtgggcgacgtgcggagcgtgacacagaagcatatccaggagtggggccctttcgacctggtgatcggcggcagcccttgcaatgacctgagcatcgtgaacccagcccggaagggcctgtacgagggaaccggcagactgttcttcgagttttacagactgctgcacgacgcccggcctaaggaaggcgacgaccggcccttcttttggctgttcgagaatgtggtggccatgggagtcagcgacaagcgggatattagccggttcctggagagcaaccccgtgatgatcgatgccaaggaagtgagcgccgcccaccgggccagatacttctggggcaatctgcctggcatgaacagacccctggccagcaccgtgaacgacaagctggagctgcaggagtgcctggagcacggccggatcgccaagttcagcaaggtgagaaccatcaccacccgaagcaacagcatcaaacaaggcaaggaccagcactttcctgtgttcatgaacgagaaggaggacatcctgtggtgtaccgagatggagagagtgttcgggttcccagtccactacacagatgtcagcaacatgtctagactggccagacagagactgctgggaagaagctggtccgtccctgtgatcagacacctgttcgcccctctgaaggagtacttcgcctgcgtgagcagcggcaacagcaacgccaacagccggggccccagcttctctagcggcctggtgccactgtccctgagagggagccacatgggccccatggagatctacaaaaccgtgagcgcctggaagcggcagcctgtgcgcgtgctgagcctgtttcggaatatcgataaagtcctgaaaagcctgggattcctggagagcggctctggctccggcggtggcaccctgaagtacgtggaggatgtgacaaacgtggtcagacgggatgtggagaagtggggccccttcgatctggtgtacggcagcacccaacccctgggcagctcttgtgaccggtgccctggctggtacatgtttcagttccaccggatcctgcagtacgccctgccgagacaggagtcccagcggccattcttttggattttcatggacaacttgctgctgaccgaggatgaccaggaaactaccactcggttcctgcagaccgaagccgtgaccctgcaggacgtgagaggccgggactaccagaacgccatgcgggtgtggtccaacatccctggactgaaaagcaagcacgcacctctgacccctaaagaagaggagtacctgcaggcccaggtgcggagcagaagcaagctggacgcccctaaggtggatctgctggtgaagaattgcctcctgcccctgagagagtacttcaagtatttcagccagaatagtctgcccctgggaggcagcggcggcggcgccctggtgacatttgaggacgtcgccgtgcggttcacccaggaggaatgggctctgctggatccttctcagaaaatcctgtaccgggacgtgatgagagagacataccggaatctgacctccgtgggcatcaactgggaatgttgggaccttgaagcctgcttcagaagcctgggaagaaacctgagagtgcaggtggtgaagagaaagtgcgagctgaccaacagcggcccctgcgccgagggcggcccaagcagcggcgcccctcctcccagcggcggcagcccagccggctccccaacctctaccgaggagggcacctctgagtccgccacccccgagagcggccctggcacctccaccgagcccagcgagggcagcgcacccggcagccctgccggcagccccacctccacagaggagggaaccagcaccgagcccagcgaaggcagcgccccaggcaccagcaccgagcctagtgagcaggagattaaacggatcaacaagatcagaagaagacttgtgaaagacagcaacaccaagaaggccggcaagacaggccccatgaaaaccctgctggttagagtgatgacacccgatctgagagagcggctggaaaacctgagaaagaagcctgaaaatatcccccagcccatcagcaatacatctagagccaacctgaataagctgctgaccgattacaccgaaatgaagaaggcgatcctgcatgtgtactgggaagagttccagaaggaccctgtgggcctgatgagccgggtggcccagcctgccagcaagaagatcgatcagaacaagctgaaacctgagatggacgagaagggcaacctgaccaccgccggctttgcctgctctcagtgtggccagcccctgttcgtgtacaagctggagcaggtgtctgagaagggcaaggcttacaccaactacttcggacggtgcaatgtggccgagcacgaaaagctgatcctgctggcccagctgaagcccgagaaggatagcgacgaagccgtgacatatagcctgggaaagtttgggcagagggccctggatttctacagcattcatgtgaccaaggagtccacccaccccgtgaagcccctggcccagatcgccggaaacagatacgcctccggacctgtgggaaaggccctgagcgacgcatgtatgggcacaatcgcctccttcctgtctaagtaccaggacatcatcatcgaacaccagaaggtggtgaagggcaaccagaagagactggagagcctgcgggagctggccggcaaggaaaacctggaataccctagcgtgaccctgccacctcagcctcacaccaaggagggcgttgatgcctacaacgaagtgatcgcccgggtgcgaatgtgggtgaacctgaacctgtggcagaagctgaagctaagcagagatgatgccaagcctctgctgagactgaagggattcccttcctttcctctggtcgagagacaggccaacgaagtggactggtgggacatggtgtgtaacgtgaagaagctgatcaacgagaaaaaggaggatggcaaggtgttttggcagaatctggctggctacaagagacaggaagccctgagaccatacctgagcagcgaggaagatcggaagaagggaaagaaattcgctcggtaccagctgggcgacctgctgctgcacctggaaaagaagcacggcgaggactggggaaaggtgtacgacgaggcctgggagcggattgacaagaaagtggaaggcctgagcaagcacatcaagctggaagaggaacggagaagcgaggacgcccagagcaaggccgccctgaccgactggctgcgggctaaggccagcttcgtgatcgagggcctgaaggaggccgacaaggacgagttctgcagatgcgagctgaagctgcagaagtggtacggggacctgcggggaaagcccttcgccatcgaagccgagaacagcatcctggacatcagcggcttcagcaagcagtacaactgtgccttcatctggcagaaggacggcgtgaagaagctgaacctgtacctgatcatcaactacttcaagggcggcaagctgcggttcaagaagatcaaacctgaagccttcgaagccaacagattctacaccgtgatcaacaaaaagagcggcgagatcgtgcccatggaggtgaacttcaacttcgacgaccccaacctgatcatcctgcctctggcctttggcaagagacagggcagagaattcatctggaacgacctgctgtccctggaaaccggcagcctgaagctggccaacggaagagtgatcgagaagacactgtacaacagaagaacccggcaggatgagcctgccctgttcgtggccctgaccttcgagcggcgggaggtcctggactcctccaatatcaaaccaatgaacctgatcggcgtggcaagaggcgaaaacatccccgccgtgatcgccctgaccgaccccgagggctgcccactgagccggtttaaggatagcctgggaaacccaacccacatcctgagaatcggcgagagctataaggagaagcagcggaccatccaggccaagaaggaggtggagcagcggagagccggcggctacagccggaagtacgccagcaaagccaagaatctggcagacgatatggtgagaaacaccgctagagatctgctgtactacgccgtgacccaggatgccatgctgatcttcgccaacctgagccggggcttcggccggcagggcaagcggaccttcatggccgagagacagtacacacggatggaggactggctgaccgccaagctggcctacgagggcctgagcaagacctacctgtccaagacactggcccagtacacctccaagacatgcagcaactgtgggtttaccatcaccagcgccgactacgacagggtgctggagaagctgaagaagacagcaacaggctggatgaccacaattaacggcaaggagctgaaggtggagggccagattacctactacaacagatacaagagacagaacgtagtcaaggacctgtccgtcgagctggatagactgagcgaagaatctgtgaacaacgacatctcctcctggacaaagggcagaagcggagaagctctgagcctcctgaagaaaagattctcccatagacccgtgcaggagaagttcgtgtgcctgaactgcggcttcgagacacacgcagccgagcaagccgccctgaacatcgccagatcctggctgttcctgcggagccaggagtacaagaaataccagacaaacaagacaaccggcaacaccgataagagagccttcgtcgagacctggcagtccttttaccggaagaagcttaaggaggtgtggaaacctgccgtgcggtctggcggatctggcggaggctccagccccgagagcgtggccttcgaggacgtggccgtgtacttcaccaagaaggagtgggccagcctgctgcccgcccagagggccctgtacaaggaggtgatgctggagaactacggcatggtggccagcctggcccccccccccatcagcaagcccgccctgatcagccagctggagcagggcaaggagccctggttcaccaggccccagggcgccctgaacaggagggccaggagggtggtgggcggcccaagcagcggcgcccctcctcccagcggcggcagcccagccggctccccaacctctaccgaggagggcacctctgagtccgccacccccgagagcggccctggcacctccaccgagcccagcgagggcagcgcacccggcagccctgccggcagccccacctccacagaggagggaaccagcaccgagcccagcgaaggcagcgccccaggcaccagcaccgagcctagtgagcaggagattaaacggatcaacaagatcagaagaagacttgtgaaagacagcaacaccaagaaggccggcaagacaggccccatgaaaaccctgctggttagagtgatgacacccgatctgagagagcggctggaaaacctgagaaagaagcctgaaaatatcccccagcccatcagcaatacatctagagccaacctgaataagctgctgaccgattacaccgaaatgaagaaggcgatcctgcatgtgtactgggaagagttccagaaggaccctgtgggcctgatgagccgggtggcccagcctgccagcaagaagatcgatcagaacaagctgaaacctgagatggacgagaagggcaacctgaccaccgccggctttgcctgctctcagtgtggccagcccctgttcgtgtacaagctggagcaggtgtctgagaagggcaaggcttacaccaactacttcggacggtgcaatgtggccgagcacgaaaagctgatcctgctggcccagctgaagcccgagaaggatagcgacgaagccgtgacatatagcctgggaaagtttgggcagagggccctggatttctacagcattcatgtgaccaaggagtccacccaccccgtgaagcccctggcccagatcgccggaaacagatacgcctccggacctgtgggaaaggccctgagcgacgcatgtatgggcacaatcgcctccttcctgtctaagtaccaggacatcatcatcgaacaccagaaggtggtgaagggcaaccagaagagactggagagcctgcgggagctggccggcaaggaaaacctggaataccctagcgtgaccctgccacctcagcctcacaccaaggagggcgttgatgcctacaacgaagtgatcgcccgggtgcgaatgtgggtgaacctgaacctgtggcagaagctgaagctaagcagagatgatgccaagcctctgctgagactgaagggattcccttcctttcctctggtcgagagacaggccaacgaagtggactggtgggacatggtgtgtaacgtgaagaagctgatcaacgagaaaaaggaggatggcaaggtgttttggcagaatctggctggctacaagagacaggaagccctgagaccatacctgagcagcgaggaagatcggaagaagggaaagaaattcgctcggtaccagctgggcgacctgctgctgcacctggaaaagaagcacggcgaggactggggaaaggtgtacgacgaggcctgggagcggattgacaagaaagtggaaggcctgagcaagcacatcaagctggaagaggaacggagaagcgaggacgcccagagcaaggccgccctgaccgactggctgcgggctaaggccagcttcgtgatcgagggcctgaaggaggccgacaaggacgagttctgcagatgcgagctgaagctgcagaagtggtacggggacctgcggggaaagcccttcgccatcgaagccgagaacagcatcctggacatcagcggcttcagcaagcagtacaactgtgccttcatctggcagaaggacggcgtgaagaagctgaacctgtacctgatcatcaactacttcaagggcggcaagctgcggttcaagaagatcaaacctgaagccttcgaagccaacagattctacaccgtgatcaacaaaaagagcggcgagatcgtgcccatggaggtgaacttcaacttcgacgaccccaacctgatcatcctgcctctggcctttggcaagagacagggcagagaattcatctggaacgacctgctgtccctggaaaccggcagcctgaagctggccaacggaagagtgatcgagaagacactgtacaacagaagaacccggcaggatgagcctgccctgttcgtggccctgaccttcgagcggcgggaggtcctggactcctccaatatcaaaccaatgaacctgatcggcgtggcaagaggcgaaaacatccccgccgtgatcgccctgaccgaccccgagggctgcccactgagccggtttaaggatagcctgggaaacccaacccacatcctgagaatcggcgagagctataaggagaagcagcggaccatccaggccaagaaggaggtggagcagcggagagccggcggctacagccggaagtacgccagcaaagccaagaatctggcagacgatatggtgagaaacaccgctagagatctgctgtactacgccgtgacccaggatgccatgctgatcttcgccaacctgagccggggcttcggccggcagggcaagcggaccttcatggccgagagacagtacacacggatggaggactggctgaccgccaagctggcctacgagggcctgagcaagacctacctgtccaagacactggcccagtacacctccaagacatgcagcaactgtgggtttaccatcaccagcgccgactacgacagggtgctggagaagctgaagaagacagcaacaggctggatgaccacaattaacggcaaggagctgaaggtggagggccagattacctactacaacagatacaagagacagaacgtagtcaaggacctgtccgtcgagctggatagactgagcgaagaatctgtgaacaacgacatctcctcctggacaaagggcagaagcggagaagctctgagcctcctgaagaaaagattctcccatagacccgtgcaggagaagttcgtgtgcctgaactgcggcttcgagacacacgcagccgagcaagccgccctgaacatcgccagatcctggctgttcctgcggagccaggagtacaagaaataccagacaaacaagacaaccggcaacaccgataagagagccttcgtcgagacctggcagtccttttaccggaagaagcttaaggaggtgtggaaacctgccgtgcggtctggcggatctggcggaggctcctagccccgagagcgtggccttcgaggacgtggccgtgtacttcaccaagaaggagtgggccagcctgctgcccgcccagagggccctgtacaaggaggtgatgctggagaactacggcatggtggccagcctggcccccccccccatcagcaagcccgccctgatcagccagctggagcagggcaaggagccctggttcaccaggccccagggcgccctgaacaggagggccaggagggtggtgggatctggctccggcagcggccccaagaaaaagagaaaagtctaagctgccttctgcggggcttgccttctggccatgcccttcttctctcccttgcacctgtacctcttggtctttgaataaagcctgagtaggaaggctagcaaaaaaaaaaaaaaaaaaaaaaaaaaaaaaaaaaaaaaaaaaaaaaaaaaaaaaaaaaaaaaaaaaaaaaaaaaaaaaaa

SEQ ID NO: 16365 - RNA, 9485 nt, synthetic construct
  source 1..9485: mol_type = other RNA
aggaaataagagagaaaagaagagtaagaagaaatataagagccaccatggcccctaagaagaagcgtaaagtgagccggatggaacgcctcgtctacgaggtgcggcagaagtgcagaaacatcgaggacatctgcatctcctgcggatctctgaacgtgaccctggagcacccactgttcatcggcggcatgtgccagaactgtaaaaactgttttctggagtgtgcctatcaatacgacgatgacggctaccagagctactgcaccatctgttgcggcggaagagaggtgctgatgtgtggaaataacaactgctgccggtgcttctgcgtggaatgcgtggacctgctggtgggccccggcgccgcccaggccgctattaaggaagatccttggaactgctacatgtgcggccacaagggcacatacggcctgctgagacggagagaggactggcctagcagactgcagatgttcttcgccaataaccacgaccaggagttcgacccccctaaggtgtaccctcccgtccccgccgagaagagaaagcccatccgggtcctgagcctgttcgatggcatcgccaccggtctgctggtgctgaaggacctgggcatccaggtggataggtacattgcctccgaggtgtgcgaggactccatcaccgtgggaatggtgcgtcatcagggcaagatcatgtacgtgggcgacgtgcggagcgtgacacagaagcatatccaggagtggggccctttcgacctggtgatcggcggcagcccttgcaatgacctgagcatcgtgaacccagcccggaagggcctgtacgagggaaccggcagactgttcttcgagttttacagactgctgcacgacgcccggcctaaggaaggcgacgaccggcccttcttttggctgttcgagaatgtggtggccatgggagtcagcgacaagcgggatattagccggttcctggagagcaaccccgtgatgatcgatgccaaggaagtgagcgccgcccaccgggccagatacttctggggcaatctgcctggcatgaacagacccctggccagcaccgtgaacgacaagctggagctgcaggagtgcctggagcacggccggatcgccaagttcagcaaggtgagaaccatcaccacccgaagcaacagcatcaaacaaggcaaggaccagcactttcctgtgttcatgaacgagaaggaggacatcctgtggtgtaccgagatggagagagtgttcgggttcccagtccactacacagatgtcagcaacatgtctagactggccagacagagactgctgggaagaagctggtccgtccctgtgatcagacacctgttcgcccctctgaaggagtacttcgcctgcgtgagcagcggcaacagcaacgccaacagccggggccccagcttctctagcggcctggtgccactgtccctgagagggagccacatgggccccatggagatctacaaaaccgtgagcgcctggaagcggcagcctgtgcgcgtgctgagcctgtttcggaatatcgataaagtcctgaaaagcctgggattcctggagagcggctctggctccggcggtggcaccctgaagtacgtggaggatgtgacaaacgtggtcagacgggatgtggagaagtggggccccttcgatctggtgtacggcagcacccaacccctgggcagctcttgtgaccggtgccctggctggtacatgtttcagttccaccggatcctgcagtacgccctgccgagacaggagtcccagcggccattcttttggattttcatggacaacttgctgctgaccgaggatgaccaggaaactaccactcggttcctgcagaccgaagccgtgaccctgcaggacgtgagaggccgggactaccagaacgccatgcgggtgtggtccaacatccctggactgaaaagcaagcacgcacctctgacccctaaagaagaggagtacctgcaggcccaggtgcggagcagaagcaagctggacgcccctaaggtggatctgctggtgaagaattgcctcctgcccctgagagagtacttcaagtatttcagccagaatagtctgcccctgggaggcagcggcggcggcgccctggtgacatttgaggacgtcgccgtgcggttcacccaggaggaatgggctctgctggatccttctcagaaaatcctgtaccgggacgtgatgagagagacataccggaatctgacctccgtgggcatcaactgggaatgttgggaccttgaagcctgcttcagaagcctgggaagaaacctgagagtgcaggtggtgaagagaaagtgcgagctgaccaacagcggcccctgcgccgagggcggcccaagcagcggcgcccctcctcccagcggcggcagcccagccggctccccaacctctaccgaggagggcacctctgagtccgccacccccgagagcggccctggcacctccaccgagcccagcgagggcagcgcacccggcagccctgccggcagccccacctccacagaggagggaaccagcaccgagcccagcgaaggcagcgccccaggcaccagcaccgagcctagtgagcaggagattaaacggatcaacaagatcagaagaagacttgtgaaagacagcaacaccaagaaggccggcaagacaggccccatgaaaaccctgctggttagagtgatgacacccgatctgagagagcggctggaaaacctgagaaagaagcctgaaaatatcccccagcccatcagcaatacatctagagccaacctgaataagctgctgaccgattacaccgaaatgaagaaggcgatcctgcatgtgtactgggaagagttccagaaggaccctgtgggcctgatgagccgggtggcccagcctgccagcaagaagatcgatcagaacaagctgaaacctgagatggacgagaagggcaacctgaccaccgccggctttgcctgctctcagtgtggccagcccctgttcgtgtacaagctggagcaggtgtctgagaagggcaaggcttacaccaactacttcggacggtgcaatgtggccgagcacgaaaagctgatcctgctggcccagctgaagcccgagaaggatagcgacgaagccgtgacatatagcctgggaaagtttgggcagagggccctggatttctacagcattcatgtgaccaaggagtccacccaccccgtgaagcccctggcccagatcgccggaaacagatacgcctccggacctgtgggaaaggccctgagcgacgcatgtatgggcacaatcgcctccttcctgtctaagtaccaggacatcatcatcgaacaccagaaggtggtgaagggcaaccagaagagactggagagcctgcgggagctggccggcaaggaaaacctggaataccctagcgtgaccctgccacctcagcctcacaccaaggagggcgttgatgcctacaacgaagtgatcgcccgggtgcgaatgtgggtgaacctgaacctgtggcagaagctgaagctaagcagagatgatgccaagcctctgctgagactgaagggattcccttcctttcctctggtcgagagacaggccaacgaagtggactggtgggacatggtgtgtaacgtgaagaagctgatcaacgagaaaaaggaggatggcaaggtgttttggcagaatctggctggctacaagagacaggaagccctgagaccatacctgagcagcgaggaagatcggaagaagggaaagaaattcgctcggtaccagctgggcgacctgctgctgcacctggaaaagaagcacggcgaggactggggaaaggtgtacgacgaggcctgggagcggattgacaagaaagtggaaggcctgagcaagcacatcaagctggaagaggaacggagaagcgaggacgcccagagcaaggccgccctgaccgactggctgcgggctaaggccagcttcgtgatcgagggcctgaaggaggccgacaaggacgagttctgcagatgcgagctgaagctgcagaagtggtacggggacctgcggggaaagcccttcgccatcgaagccgagaacagcatcctggacatcagcggcttcagcaagcagtacaactgtgccttcatctggcagaaggacggcgtgaagaagctgaacctgtacctgatcatcaactacttcaagggcggcaagctgcggttcaagaagatcaaacctgaagccttcgaagccaacagattctacaccgtgatcaacaaaaagagcggcgagatcgtgcccatggaggtgaacttcaacttcgacgaccccaacctgatcatcctgcctctggcctttggcaagagacagggcagagaattcatctggaacgacctgctgtccctggaaaccggcagcctgaagctggccaacggaagagtgatcgagaagacactgtacaacagaagaacccggcaggatgagcctgccctgttcgtggccctgaccttcgagcggcgggaggtcctggactcctccaatatcaaaccaatgaacctgatcggcgtggcaagaggcgaaaacatccccgccgtgatcgccctgaccgaccccgagggctgcccactgagccggtttaaggatagcctgggaaacccaacccacatcctgagaatcggcgagagctataaggagaagcagcggaccatccaggccaagaaggaggtggagcagcggagagccggcggctacagccggaagtacgccagcaaagccaagaatctggcagacgatatggtgagaaacaccgctagagatctgctgtactacgccgtgacccaggatgccatgctgatcttcgccaacctgagccggggcttcggccggcagggcaagcggaccttcatggccgagagacagtacacacggatggaggactggctgaccgccaagctggcctacgagggcctgagcaagacctacctgtccaagacactggcccagtacacctccaagacatgcagcaactgtgggtttaccatcaccagcgccgactacgacagggtgctggagaagctgaagaagacagcaacaggctggatgaccacaattaacggcaaggagctgaaggtggagggccagattacctactacaacagatacaagagacagaacgtagtcaaggacctgtccgtcgagctggatagactgagcgaagaatctgtgaacaacgacatctcctcctggacaaagggcagaagcggagaagctctgagcctcctgaagaaaagattctcccatagacccgtgcaggagaagttcgtgtgcctgaactgcggcttcgagacacacgcagccgagcaagccgccctgaacatcgccagatcctggctgttcctgcggagccaggagtacaagaaataccagacaaacaagacaaccggcaacaccgataagagagccttcgtcgagacctggcagtccttttaccggaagaagcttaaggaggtgtggaaacctgccgtgcggtctggcggatctggcggaggctccccccaggagcccgtgaccttcgaggacgtggccgtgtacttcacccagaaccagtgggccagcctggaccccatgcagagggccctgtacagggaggtgatgctggagaactacgccagcgtggccagcctggccttccccttccccaagcccgacctggtgagccagctggagaggggcgaggccccctggagccccgacccctgggaggccgaggtgctgaagggcacctgccccggcggcggcggcccaagcagcggcgcccctcctcccagcggcggcagcccagccggctccccaacctctaccgaggagggcacctctgagtccgccacccccgagagcggccctggcacctccaccgagcccagcgagggcagcgcacccggcagccctgccggcagccccacctccacagaggagggaaccagcaccgagcccagcgaaggcagcgccccaggcaccagcaccgagcctagtgagcaggagattaaacggatcaacaagatcagaagaagacttgtgaaagacagcaacaccaagaaggccggcaagacaggccccatgaaaaccctgctggttagagtgatgacacccgatctgagagagcggctggaaaacctgagaaagaagcctgaaaatatcccccagcccatcagcaatacatctagagccaacctgaataagctgctgaccgattacaccgaaatgaagaaggcgatcctgcatgtgtactgggaagagttccagaaggaccctgtgggcctgatgagccgggtggcccagcctgccagcaagaagatcgatcagaacaagctgaaacctgagatggacgagaagggcaacctgaccaccgccggctttgcctgctctcagtgtggccagcccctgttcgtgtacaagctggagcaggtgtctgagaagggcaaggcttacaccaactacttcggacggtgcaatgtggccgagcacgaaaagctgatcctgctggcccagctgaagcccgagaaggatagcgacgaagccgtgacatatagcctgggaaagtttgggcagagggccctggatttctacagcattcatgtgaccaaggagtccacccaccccgtgaagcccctggcccagatcgccggaaacagatacgcctccggacctgtgggaaaggccctgagcgacgcatgtatgggcacaatcgcctccttcctgtctaagtaccaggacatcatcatcgaacaccagaaggtggtgaagggcaaccagaagagactggagagcctgcgggagctggccggcaaggaaaacctggaataccctagcgtgaccctgccacctcagcctcacaccaaggagggcgttgatgcctacaacgaagtgatcgcccgggtgcgaatgtgggtgaacctgaacctgtggcagaagctgaagctaagcagagatgatgccaagcctctgctgagactgaagggattcccttcctttcctctggtcgagagacaggccaacgaagtggactggtgggacatggtgtgtaacgtgaagaagctgatcaacgagaaaaaggaggatggcaaggtgttttggcagaatctggctggctacaagagacaggaagccctgagaccatacctgagcagcgaggaagatcggaagaagggaaagaaattcgctcggtaccagctgggcgacctgctgctgcacctggaaaagaagcacggcgaggactggggaaaggtgtacgacgaggcctgggagcggattgacaagaaagtggaaggcctgagcaagcacatcaagctggaagaggaacggagaagcgaggacgcccagagcaaggccgccctgaccgactggctgcgggctaaggccagcttcgtgatcgagggcctgaaggaggccgacaaggacgagttctgcagatgcgagctgaagctgcagaagtggtacggggacctgcggggaaagcccttcgccatcgaagccgagaacagcatcctggacatcagcggcttcagcaagcagtacaactgtgccttcatctggcagaaggacggcgtgaagaagctgaacctgtacctgatcatcaactacttcaagggcggcaagctgcggttcaagaagatcaaacctgaagccttcgaagccaacagattctacaccgtgatcaacaaaaagagcggcgagatcgtgcccatggaggtgaacttcaacttcgacgaccccaacctgatcatcctgcctctggcctttggcaagagacagggcagagaattcatctggaacgacctgctgtccctggaaaccggcagcctgaagctggccaacggaagagtgatcgagaagacactgtacaacagaagaacccggcaggatgagcctgccctgttcgtggccctgaccttcgagcggcgggaggtcctggactcctccaatatcaaaccaatgaacctgatcggcgtggcaagaggcgaaaacatccccgccgtgatcgccctgaccgaccccgagggctgcccactgagccggtttaaggatagcctgggaaacccaacccacatcctgagaatcggcgagagctataaggagaagcagcggaccatccaggccaagaaggaggtggagcagcggagagccggcggctacagccggaagtacgccagcaaagccaagaatctggcagacgatatggtgagaaacaccgctagagatctgctgtactacgccgtgacccaggatgccatgctgatcttcgccaacctgagccggggcttcggccggcagggcaagcggaccttcatggccgagagacagtacacacggatggaggactggctgaccgccaagctggcctacgagggcctgagcaagacctacctgtccaagacactggcccagtacacctccaagacatgcagcaactgtgggtttaccatcaccagcgccgactacgacagggtgctggagaagctgaagaagacagcaacaggctggatgaccacaattaacggcaaggagctgaaggtggagggccagattacctactacaacagatacaagagacagaacgtagtcaaggacctgtccgtcgagctggatagactgagcgaagaatctgtgaacaacgacatctcctcctggacaaagggcagaagcggagaagctctgagcctcctgaagaaaagattctcccatagacccgtgcaggagaagttcgtgtgcctgaactgcggcttcgagacacacgcagccgagcaagccgccctgaacatcgccagatcctggctgttcctgcggagccaggagtacaagaaataccagacaaacaagacaaccggcaacaccgataagagagccttcgtcgagacctggcagtccttttaccggaagaagcttaaggaggtgtggaaacctgccgtgcggtctggcggatctggcggaggctcctccccaggagcccgtgaccttcgaggacgtggccgtgtacttcacccagaaccagtgggccagcctggaccccatgcagagggccctgtacagggaggtgatgctggagaactacgccagcgtggccagcctggccttccccttccccaagcccgacctggtgagccagctggagaggggcgaggccccctggagccccgacccctgggaggccgaggtgctgaagggcacctgccccggcggcggatctggctccggcagcggccccaagaaaaagagaaaagtctaagctgccttctgcggggcttgccttctggccatgcccttcttctctcccttgcacctgtacctcttggtctttgaataaagcctgagtaggaaggctagcaaaaaaaaaaaaaaaaaaaaaaaaaaaaaaaaaaaaaaaaaaaaaaaaaaaaaaaaaaaaaaaaaaaaaaaaaaaaaaaa

SEQ ID NO: 16366 - RNA, 9485 nt, synthetic construct
  source 1..9485: mol_type = other RNA
aggaaataagagagaaaagaagagtaagaagaaatataagagccaccatggcccctaagaagaagcgtaaagtgagccggatggaacgcctcgtctacgaggtgcggcagaagtgcagaaacatcgaggacatctgcatctcctgcggatctctgaacgtgaccctggagcacccactgttcatcggcggcatgtgccagaactgtaaaaactgttttctggagtgtgcctatcaatacgacgatgacggctaccagagctactgcaccatctgttgcggcggaagagaggtgctgatgtgtggaaataacaactgctgccggtgcttctgcgtggaatgcgtggacctgctggtgggccccggcgccgcccaggccgctattaaggaagatccttggaactgctacatgtgcggccacaagggcacatacggcctgctgagacggagagaggactggcctagcagactgcagatgttcttcgccaataaccacgaccaggagttcgacccccctaaggtgtaccctcccgtccccgccgagaagagaaagcccatccgggtcctgagcctgttcgatggcatcgccaccggtctgctggtgctgaaggacctgggcatccaggtggataggtacattgcctccgaggtgtgcgaggactccatcaccgtgggaatggtgcgtcatcagggcaagatcatgtacgtgggcgacgtgcggagcgtgacacagaagcatatccaggagtggggccctttcgacctggtgatcggcggcagcccttgcaatgacctgagcatcgtgaacccagcccggaagggcctgtacgagggaaccggcagactgttcttcgagttttacagactgctgcacgacgcccggcctaaggaaggcgacgaccggcccttcttttggctgttcgagaatgtggtggccatgggagtcagcgacaagcgggatattagccggttcctggagagcaaccccgtgatgatcgatgccaaggaagtgagcgccgcccaccgggccagatacttctggggcaatctgcctggcatgaacagacccctggccagcaccgtgaacgacaagctggagctgcaggagtgcctggagcacggccggatcgccaagttcagcaaggtgagaaccatcaccacccgaagcaacagcatcaaacaaggcaaggaccagcactttcctgtgttcatgaacgagaaggaggacatcctgtggtgtaccgagatggagagagtgttcgggttcccagtccactacacagatgtcagcaacatgtctagactggccagacagagactgctgggaagaagctggtccgtccctgtgatcagacacctgttcgcccctctgaaggagtacttcgcctgcgtgagcagcggcaacagcaacgccaacagccggggccccagcttctctagcggcctggtgccactgtccctgagagggagccacatgggccccatggagatctacaaaaccgtgagcgcctggaagcggcagcctgtgcgcgtgctgagcctgtttcggaatatcgataaagtcctgaaaagcctgggattcctggagagcggctctggctccggcggtggcaccctgaagtacgtggaggatgtgacaaacgtggtcagacgggatgtggagaagtggggccccttcgatctggtgtacggcagcacccaacccctgggcagctcttgtgaccggtgccctggctggtacatgtttcagttccaccggatcctgcagtacgccctgccgagacaggagtcccagcggccattcttttggattttcatggacaacttgctgctgaccgaggatgaccaggaaactaccactcggttcctgcagaccgaagccgtgaccctgcaggacgtgagaggccgggactaccagaacgccatgcgggtgtggtccaacatccctggactgaaaagcaagcacgcacctctgacccctaaagaagaggagtacctgcaggcccaggtgcggagcagaagcaagctggacgcccctaaggtggatctgctggtgaagaattgcctcctgcccctgagagagtacttcaagtatttcagccagaatagtctgcccctgggaggcagcggcggcggcgccctggtgacatttgaggacgtcgccgtgcggttcacccaggaggaatgggctctgctggatccttctcagaaaatcctgtaccgggacgtgatgagagagacataccggaatctgacctccgtgggcatcaactgggaatgttgggaccttgaagcctgcttcagaagcctgggaagaaacctgagagtgcaggtggtgaagagaaagtgcgagctgaccaacagcggcccctgcgccgagggcggcccaagcagcggcgcccctcctcccagcggcggcagcccagccggctccccaacctctaccgaggagggcacctctgagtccgccacccccgagagcggccctggcacctccaccgagcccagcgagggcagcgcacccggcagccctgccggcagccccacctccacagaggagggaaccagcaccgagcccagcgaaggcagcgccccaggcaccagcaccgagcctagtgagcaggagattaaacggatcaacaagatcagaagaagacttgtgaaagacagcaacaccaagaaggccggcaagacaggccccatgaaaaccctgctggttagagtgatgacacccgatctgagagagcggctggaaaacctgagaaagaagcctgaaaatatcccccagcccatcagcaatacatctagagccaacctgaataagctgctgaccgattacaccgaaatgaagaaggcgatcctgcatgtgtactgggaagagttccagaaggaccctgtgggcctgatgagccgggtggcccagcctgccagcaagaagatcgatcagaacaagctgaaacctgagatggacgagaagggcaacctgaccaccgccggctttgcctgctctcagtgtggccagcccctgttcgtgtacaagctggagcaggtgtctgagaagggcaaggcttacaccaactacttcggacggtgcaatgtggccgagcacgaaaagctgatcctgctggcccagctgaagcccgagaaggatagcgacgaagccgtgacatatagcctgggaaagtttgggcagagggccctggatttctacagcattcatgtgaccaaggagtccacccaccccgtgaagcccctggcccagatcgccggaaacagatacgcctccggacctgtgggaaaggccctgagcgacgcatgtatgggcacaatcgcctccttcctgtctaagtaccaggacatcatcatcgaacaccagaaggtggtgaagggcaaccagaagagactggagagcctgcgggagctggccggcaaggaaaacctggaataccctagcgtgaccctgccacctcagcctcacaccaaggagggcgttgatgcctacaacgaagtgatcgcccgggtgcgaatgtgggtgaacctgaacctgtggcagaagctgaagctaagcagagatgatgccaagcctctgctgagactgaagggattcccttcctttcctctggtcgagagacaggccaacgaagtggactggtgggacatggtgtgtaacgtgaagaagctgatcaacgagaaaaaggaggatggcaaggtgttttggcagaatctggctggctacaagagacaggaagccctgagaccatacctgagcagcgaggaagatcggaagaagggaaagaaattcgctcggtaccagctgggcgacctgctgctgcacctggaaaagaagcacggcgaggactggggaaaggtgtacgacgaggcctgggagcggattgacaagaaagtggaaggcctgagcaagcacatcaagctggaagaggaacggagaagcgaggacgcccagagcaaggccgccctgaccgactggctgcgggctaaggccagcttcgtgatcgagggcctgaaggaggccgacaaggacgagttctgcagatgcgagctgaagctgcagaagtggtacggggacctgcggggaaagcccttcgccatcgaagccgagaacagcatcctggacatcagcggcttcagcaagcagtacaactgtgccttcatctggcagaaggacggcgtgaagaagctgaacctgtacctgatcatcaactacttcaagggcggcaagctgcggttcaagaagatcaaacctgaagccttcgaagccaacagattctacaccgtgatcaacaaaaagagcggcgagatcgtgcccatggaggtgaacttcaacttcgacgaccccaacctgatcatcctgcctctggcctttggcaagagacagggcagagaattcatctggaacgacctgctgtccctggaaaccggcagcctgaagctggccaacggaagagtgatcgagaagacactgtacaacagaagaacccggcaggatgagcctgccctgttcgtggccctgaccttcgagcggcgggaggtcctggactcctccaatatcaaaccaatgaacctgatcggcgtggcaagaggcgaaaacatccccgccgtgatcgccctgaccgaccccgagggctgcccactgagccggtttaaggatagcctgggaaacccaacccacatcctgagaatcggcgagagctataaggagaagcagcggaccatccaggccaagaaggaggtggagcagcggagagccggcggctacagccggaagtacgccagcaaagccaagaatctggcagacgatatggtgagaaacaccgctagagatctgctgtactacgccgtgacccaggatgccatgctgatcttcgccaacctgagccggggcttcggccggcagggcaagcggaccttcatggccgagagacagtacacacggatggaggactggctgaccgccaagctggcctacgagggcctgagcaagacctacctgtccaagacactggcccagtacacctccaagacatgcagcaactgtgggtttaccatcaccagcgccgactacgacagggtgctggagaagctgaagaagacagcaacaggctggatgaccacaattaacggcaaggagctgaaggtggagggccagattacctactacaacagatacaagagacagaacgtagtcaaggacctgtccgtcgagctggatagactgagcgaagaatctgtgaacaacgacatctcctcctggacaaagggcagaagcggagaagctctgagcctcctgaagaaaagattctcccatagacccgtgcaggagaagttcgtgtgcctgaactgcggcttcgagacacacgcagccgagcaagccgccctgaacatcgccagatcctggctgttcctgcggagccaggagtacaagaaataccagacaaacaagacaaccggcaacaccgataagagagccttcgtcgagacctggcagtccttttaccggaagaagcttaaggaggtgtggaaacctgccgtgcggtctggcggatctggcggaggctcccccagggtgagcctgaccttcgaggacgtggccgtgctgttcaccagggacgagtggaggaagctgggccccagcgagaggaacctgtaccaggacgtgatgctggagaactacagcaacctggtgagcctgggcctgctgttcagcaagcccaaggtgatcagcctgctgcagcagggcgaggacccctggaaggtggagaaggagagccccggcggccccagcctgggctacaagagcagcggcggcccaagcagcggcgcccctcctcccagcggcggcagcccagccggctccccaacctctaccgaggagggcacctctgagtccgccacccccgagagcggccctggcacctccaccgagcccagcgagggcagcgcacccggcagccctgccggcagccccacctccacagaggagggaaccagcaccgagcccagcgaaggcagcgccccaggcaccagcaccgagcctagtgagcaggagattaaacggatcaacaagatcagaagaagacttgtgaaagacagcaacaccaagaaggccggcaagacaggccccatgaaaaccctgctggttagagtgatgacacccgatctgagagagcggctggaaaacctgagaaagaagcctgaaaatatcccccagcccatcagcaatacatctagagccaacctgaataagctgctgaccgattacaccgaaatgaagaaggcgatcctgcatgtgtactgggaagagttccagaaggaccctgtgggcctgatgagccgggtggcccagcctgccagcaagaagatcgatcagaacaagctgaaacctgagatggacgagaagggcaacctgaccaccgccggctttgcctgctctcagtgtggccagcccctgttcgtgtacaagctggagcaggtgtctgagaagggcaaggcttacaccaactacttcggacggtgcaatgtggccgagcacgaaaagctgatcctgctggcccagctgaagcccgagaaggatagcgacgaagccgtgacatatagcctgggaaagtttgggcagagggccctggatttctacagcattcatgtgaccaaggagtccacccaccccgtgaagcccctggcccagatcgccggaaacagatacgcctccggacctgtgggaaaggccctgagcgacgcatgtatgggcacaatcgcctccttcctgtctaagtaccaggacatcatcatcgaacaccagaaggtggtgaagggcaaccagaagagactggagagcctgcgggagctggccggcaaggaaaacctggaataccctagcgtgaccctgccacctcagcctcacaccaaggagggcgttgatgcctacaacgaagtgatcgcccgggtgcgaatgtgggtgaacctgaacctgtggcagaagctgaagctaagcagagatgatgccaagcctctgctgagactgaagggattcccttcctttcctctggtcgagagacaggccaacgaagtggactggtgggacatggtgtgtaacgtgaagaagctgatcaacgagaaaaaggaggatggcaaggtgttttggcagaatctggctggctacaagagacaggaagccctgagaccatacctgagcagcgaggaagatcggaagaagggaaagaaattcgctcggtaccagctgggcgacctgctgctgcacctggaaaagaagcacggcgaggactggggaaaggtgtacgacgaggcctgggagcggattgacaagaaagtggaaggcctgagcaagcacatcaagctggaagaggaacggagaagcgaggacgcccagagcaaggccgccctgaccgactggctgcgggctaaggccagcttcgtgatcgagggcctgaaggaggccgacaaggacgagttctgcagatgcgagctgaagctgcagaagtggtacggggacctgcggggaaagcccttcgccatcgaagccgagaacagcatcctggacatcagcggcttcagcaagcagtacaactgtgccttcatctggcagaaggacggcgtgaagaagctgaacctgtacctgatcatcaactacttcaagggcggcaagctgcggttcaagaagatcaaacctgaagccttcgaagccaacagattctacaccgtgatcaacaaaaagagcggcgagatcgtgcccatggaggtgaacttcaacttcgacgaccccaacctgatcatcctgcctctggcctttggcaagagacagggcagagaattcatctggaacgacctgctgtccctggaaaccggcagcctgaagctggccaacggaagagtgatcgagaagacactgtacaacagaagaacccggcaggatgagcctgccctgttcgtggccctgaccttcgagcggcgggaggtcctggactcctccaatatcaaaccaatgaacctgatcggcgtggcaagaggcgaaaacatccccgccgtgatcgccctgaccgaccccgagggctgcccactgagccggtttaaggatagcctgggaaacccaacccacatcctgagaatcggcgagagctataaggagaagcagcggaccatccaggccaagaaggaggtggagcagcggagagccggcggctacagccggaagtacgccagcaaagccaagaatctggcagacgatatggtgagaaacaccgctagagatctgctgtactacgccgtgacccaggatgccatgctgatcttcgccaacctgagccggggcttcggccggcagggcaagcggaccttcatggccgagagacagtacacacggatggaggactggctgaccgccaagctggcctacgagggcctgagcaagacctacctgtccaagacactggcccagtacacctccaagacatgcagcaactgtgggtttaccatcaccagcgccgactacgacagggtgctggagaagctgaagaagacagcaacaggctggatgaccacaattaacggcaaggagctgaaggtggagggccagattacctactacaacagatacaagagacagaacgtagtcaaggacctgtccgtcgagctggatagactgagcgaagaatctgtgaacaacgacatctcctcctggacaaagggcagaagcggagaagctctgagcctcctgaagaaaagattctcccatagacccgtgcaggagaagttcgtgtgcctgaactgcggcttcgagacacacgcagccgagcaagccgccctgaacatcgccagatcctggctgttcctgcggagccaggagtacaagaaataccagacaaacaagacaaccggcaacaccgataagagagccttcgtcgagacctggcagtccttttaccggaagaagcttaaggaggtgtggaaacctgccgtgcggtctggcggatctggcggaggctcctcccagggtgagcctgaccttcgaggacgtggccgtgctgttcaccagggacgagtggaggaagctgggccccagcgagaggaacctgtaccaggacgtgatgctggagaactacagcaacctggtgagcctgggcctgctgttcagcaagcccaaggtgatcagcctgctgcagcagggcgaggacccctggaaggtggagaaggagagccccggcggccccagcctgggctacaagagcagcggatctggctccggcagcggccccaagaaaaagagaaaagtctaagctgccttctgcggggcttgccttctggccatgcccttcttctctcccttgcacctgtacctcttggtctttgaataaagcctgagtaggaaggctagcaaaaaaaaaaaaaaaaaaaaaaaaaaaaaaaaaaaaaaaaaaaaaaaaaaaaaaaaaaaaaaaaaaaaaaaaaaaaaaaa

SEQ ID NO: 16367 - RNA, 9485 nt, synthetic construct
  source 1..9485: mol_type = other RNA
aggaaataagagagaaaagaagagtaagaagaaatataagagccaccatggcccctaagaagaagcgtaaagtgagccggatggaacgcctcgtctacgaggtgcggcagaagtgcagaaacatcgaggacatctgcatctcctgcggatctctgaacgtgaccctggagcacccactgttcatcggcggcatgtgccagaactgtaaaaactgttttctggagtgtgcctatcaatacgacgatgacggctaccagagctactgcaccatctgttgcggcggaagagaggtgctgatgtgtggaaataacaactgctgccggtgcttctgcgtggaatgcgtggacctgctggtgggccccggcgccgcccaggccgctattaaggaagatccttggaactgctacatgtgcggccacaagggcacatacggcctgctgagacggagagaggactggcctagcagactgcagatgttcttcgccaataaccacgaccaggagttcgacccccctaaggtgtaccctcccgtccccgccgagaagagaaagcccatccgggtcctgagcctgttcgatggcatcgccaccggtctgctggtgctgaaggacctgggcatccaggtggataggtacattgcctccgaggtgtgcgaggactccatcaccgtgggaatggtgcgtcatcagggcaagatcatgtacgtgggcgacgtgcggagcgtgacacagaagcatatccaggagtggggccctttcgacctggtgatcggcggcagcccttgcaatgacctgagcatcgtgaacccagcccggaagggcctgtacgagggaaccggcagactgttcttcgagttttacagactgctgcacgacgcccggcctaaggaaggcgacgaccggcccttcttttggctgttcgagaatgtggtggccatgggagtcagcgacaagcgggatattagccggttcctggagagcaaccccgtgatgatcgatgccaaggaagtgagcgccgcccaccgggccagatacttctggggcaatctgcctggcatgaacagacccctggccagcaccgtgaacgacaagctggagctgcaggagtgcctggagcacggccggatcgccaagttcagcaaggtgagaaccatcaccacccgaagcaacagcatcaaacaaggcaaggaccagcactttcctgtgttcatgaacgagaaggaggacatcctgtggtgtaccgagatggagagagtgttcgggttcccagtccactacacagatgtcagcaacatgtctagactggccagacagagactgctgggaagaagctggtccgtccctgtgatcagacacctgttcgcccctctgaaggagtacttcgcctgcgtgagcagcggcaacagcaacgccaacagccggggccccagcttctctagcggcctggtgccactgtccctgagagggagccacatgggccccatggagatctacaaaaccgtgagcgcctggaagcggcagcctgtgcgcgtgctgagcctgtttcggaatatcgataaagtcctgaaaagcctgggattcctggagagcggctctggctccggcggtggcaccctgaagtacgtggaggatgtgacaaacgtggtcagacgggatgtggagaagtggggccccttcgatctggtgtacggcagcacccaacccctgggcagctcttgtgaccggtgccctggctggtacatgtttcagttccaccggatcctgcagtacgccctgccgagacaggagtcccagcggccattcttttggattttcatggacaacttgctgctgaccgaggatgaccaggaaactaccactcggttcctgcagaccgaagccgtgaccctgcaggacgtgagaggccgggactaccagaacgccatgcgggtgtggtccaacatccctggactgaaaagcaagcacgcacctctgacccctaaagaagaggagtacctgcaggcccaggtgcggagcagaagcaagctggacgcccctaaggtggatctgctggtgaagaattgcctcctgcccctgagagagtacttcaagtatttcagccagaatagtctgcccctgggaggcagcggcggcggcgccctggtgacatttgaggacgtcgccgtgcggttcacccaggaggaatgggctctgctggatccttctcagaaaatcctgtaccgggacgtgatgagagagacataccggaatctgacctccgtgggcatcaactgggaatgttgggaccttgaagcctgcttcagaagcctgggaagaaacctgagagtgcaggtggtgaagagaaagtgcgagctgaccaacagcggcccctgcgccgagggcggcccaagcagcggcgcccctcctcccagcggcggcagcccagccggctccccaacctctaccgaggagggcacctctgagtccgccacccccgagagcggccctggcacctccaccgagcccagcgagggcagcgcacccggcagccctgccggcagccccacctccacagaggagggaaccagcaccgagcccagcgaaggcagcgccccaggcaccagcaccgagcctagtgagcaggagattaaacggatcaacaagatcagaagaagacttgtgaaagacagcaacaccaagaaggccggcaagacaggccccatgaaaaccctgctggttagagtgatgacacccgatctgagagagcggctggaaaacctgagaaagaagcctgaaaatatcccccagcccatcagcaatacatctagagccaacctgaataagctgctgaccgattacaccgaaatgaagaaggcgatcctgcatgtgtactgggaagagttccagaaggaccctgtgggcctgatgagccgggtggcccagcctgccagcaagaagatcgatcagaacaagctgaaacctgagatggacgagaagggcaacctgaccaccgccggctttgcctgctctcagtgtggccagcccctgttcgtgtacaagctggagcaggtgtctgagaagggcaaggcttacaccaactacttcggacggtgcaatgtggccgagcacgaaaagctgatcctgctggcccagctgaagcccgagaaggatagcgacgaagccgtgacatatagcctgggaaagtttgggcagagggccctggatttctacagcattcatgtgaccaaggagtccacccaccccgtgaagcccctggcccagatcgccggaaacagatacgcctccggacctgtgggaaaggccctgagcgacgcatgtatgggcacaatcgcctccttcctgtctaagtaccaggacatcatcatcgaacaccagaaggtggtgaagggcaaccagaagagactggagagcctgcgggagctggccggcaaggaaaacctggaataccctagcgtgaccctgccacctcagcctcacaccaaggagggcgttgatgcctacaacgaagtgatcgcccgggtgcgaatgtgggtgaacctgaacctgtggcagaagctgaagctaagcagagatgatgccaagcctctgctgagactgaagggattcccttcctttcctctggtcgagagacaggccaacgaagtggactggtgggacatggtgtgtaacgtgaagaagctgatcaacgagaaaaaggaggatggcaaggtgttttggcagaatctggctggctacaagagacaggaagccctgagaccatacctgagcagcgaggaagatcggaagaagggaaagaaattcgctcggtaccagctgggcgacctgctgctgcacctggaaaagaagcacggcgaggactggggaaaggtgtacgacgaggcctgggagcggattgacaagaaagtggaaggcctgagcaagcacatcaagctggaagaggaacggagaagcgaggacgcccagagcaaggccgccctgaccgactggctgcgggctaaggccagcttcgtgatcgagggcctgaaggaggccgacaaggacgagttctgcagatgcgagctgaagctgcagaagtggtacggggacctgcggggaaagcccttcgccatcgaagccgagaacagcatcctggacatcagcggcttcagcaagcagtacaactgtgccttcatctggcagaaggacggcgtgaagaagctgaacctgtacctgatcatcaactacttcaagggcggcaagctgcggttcaagaagatcaaacctgaagccttcgaagccaacagattctacaccgtgatcaacaaaaagagcggcgagatcgtgcccatggaggtgaacttcaacttcgacgaccccaacctgatcatcctgcctctggcctttggcaagagacagggcagagaattcatctggaacgacctgctgtccctggaaaccggcagcctgaagctggccaacggaagagtgatcgagaagacactgtacaacagaagaacccggcaggatgagcctgccctgttcgtggccctgaccttcgagcggcgggaggtcctggactcctccaatatcaaaccaatgaacctgatcggcgtggcaagaggcgaaaacatccccgccgtgatcgccctgaccgaccccgagggctgcccactgagccggtttaaggatagcctgggaaacccaacccacatcctgagaatcggcgagagctataaggagaagcagcggaccatccaggccaagaaggaggtggagcagcggagagccggcggctacagccggaagtacgccagcaaagccaagaatctggcagacgatatggtgagaaacaccgctagagatctgctgtactacgccgtgacccaggatgccatgctgatcttcgccaacctgagccggggcttcggccggcagggcaagcggaccttcatggccgagagacagtacacacggatggaggactggctgaccgccaagctggcctacgagggcctgagcaagacctacctgtccaagacactggcccagtacacctccaagacatgcagcaactgtgggtttaccatcaccagcgccgactacgacagggtgctggagaagctgaagaagacagcaacaggctggatgaccacaattaacggcaaggagctgaaggtggagggccagattacctactacaacagatacaagagacagaacgtagtcaaggacctgtccgtcgagctggatagactgagcgaagaatctgtgaacaacgacatctcctcctggacaaagggcagaagcggagaagctctgagcctcctgaagaaaagattctcccatagacccgtgcaggagaagttcgtgtgcctgaactgcggcttcgagacacacgcagccgagcaagccgccctgaacatcgccagatcctggctgttcctgcggagccaggagtacaagaaataccagacaaacaagacaaccggcaacaccgataagagagccttcgtcgagacctggcagtccttttaccggaagaagcttaaggaggtgtggaaacctgccgtgcggtctggcggatctggcggaggctcctaccagacccccgtgagcttcaaggacgtggtggtgggcttcacccaggaggagtggcacaggctgagccccgcccagagggccctgtacagggacgtgatgctggagacctacagcaacctggtgagcgtgggctacgagggcaccaagcccgacgtgatcctgaggctggagcaggaggaggccccctggatcggcggcgccgccaggcccggctgccactgctgggaggacatctggcagggcggcccaagcagcggcgcccctcctcccagcggcggcagcccagccggctccccaacctctaccgaggagggcacctctgagtccgccacccccgagagcggccctggcacctccaccgagcccagcgagggcagcgcacccggcagccctgccggcagccccacctccacagaggagggaaccagcaccgagcccagcgaaggcagcgccccaggcaccagcaccgagcctagtgagcaggagattaaacggatcaacaagatcagaagaagacttgtgaaagacagcaacaccaagaaggccggcaagacaggccccatgaaaaccctgctggttagagtgatgacacccgatctgagagagcggctggaaaacctgagaaagaagcctgaaaatatcccccagcccatcagcaatacatctagagccaacctgaataagctgctgaccgattacaccgaaatgaagaaggcgatcctgcatgtgtactgggaagagttccagaaggaccctgtgggcctgatgagccgggtggcccagcctgccagcaagaagatcgatcagaacaagctgaaacctgagatggacgagaagggcaacctgaccaccgccggctttgcctgctctcagtgtggccagcccctgttcgtgtacaagctggagcaggtgtctgagaagggcaaggcttacaccaactacttcggacggtgcaatgtggccgagcacgaaaagctgatcctgctggcccagctgaagcccgagaaggatagcgacgaagccgtgacatatagcctgggaaagtttgggcagagggccctggatttctacagcattcatgtgaccaaggagtccacccaccccgtgaagcccctggcccagatcgccggaaacagatacgcctccggacctgtgggaaaggccctgagcgacgcatgtatgggcacaatcgcctccttcctgtctaagtaccaggacatcatcatcgaacaccagaaggtggtgaagggcaaccagaagagactggagagcctgcgggagctggccggcaaggaaaacctggaataccctagcgtgaccctgccacctcagcctcacaccaaggagggcgttgatgcctacaacgaagtgatcgcccgggtgcgaatgtgggtgaacctgaacctgtggcagaagctgaagctaagcagagatgatgccaagcctctgctgagactgaagggattcccttcctttcctctggtcgagagacaggccaacgaagtggactggtgggacatggtgtgtaacgtgaagaagctgatcaacgagaaaaaggaggatggcaaggtgttttggcagaatctggctggctacaagagacaggaagccctgagaccatacctgagcagcgaggaagatcggaagaagggaaagaaattcgctcggtaccagctgggcgacctgctgctgcacctggaaaagaagcacggcgaggactggggaaaggtgtacgacgaggcctgggagcggattgacaagaaagtggaaggcctgagcaagcacatcaagctggaagaggaacggagaagcgaggacgcccagagcaaggccgccctgaccgactggctgcgggctaaggccagcttcgtgatcgagggcctgaaggaggccgacaaggacgagttctgcagatgcgagctgaagctgcagaagtggtacggggacctgcggggaaagcccttcgccatcgaagccgagaacagcatcctggacatcagcggcttcagcaagcagtacaactgtgccttcatctggcagaaggacggcgtgaagaagctgaacctgtacctgatcatcaactacttcaagggcggcaagctgcggttcaagaagatcaaacctgaagccttcgaagccaacagattctacaccgtgatcaacaaaaagagcggcgagatcgtgcccatggaggtgaacttcaacttcgacgaccccaacctgatcatcctgcctctggcctttggcaagagacagggcagagaattcatctggaacgacctgctgtccctggaaaccggcagcctgaagctggccaacggaagagtgatcgagaagacactgtacaacagaagaacccggcaggatgagcctgccctgttcgtggccctgaccttcgagcggcgggaggtcctggactcctccaatatcaaaccaatgaacctgatcggcgtggcaagaggcgaaaacatccccgccgtgatcgccctgaccgaccccgagggctgcccactgagccggtttaaggatagcctgggaaacccaacccacatcctgagaatcggcgagagctataaggagaagcagcggaccatccaggccaagaaggaggtggagcagcggagagccggcggctacagccggaagtacgccagcaaagccaagaatctggcagacgatatggtgagaaacaccgctagagatctgctgtactacgccgtgacccaggatgccatgctgatcttcgccaacctgagccggggcttcggccggcagggcaagcggaccttcatggccgagagacagtacacacggatggaggactggctgaccgccaagctggcctacgagggcctgagcaagacctacctgtccaagacactggcccagtacacctccaagacatgcagcaactgtgggtttaccatcaccagcgccgactacgacagggtgctggagaagctgaagaagacagcaacaggctggatgaccacaattaacggcaaggagctgaaggtggagggccagattacctactacaacagatacaagagacagaacgtagtcaaggacctgtccgtcgagctggatagactgagcgaagaatctgtgaacaacgacatctcctcctggacaaagggcagaagcggagaagctctgagcctcctgaagaaaagattctcccatagacccgtgcaggagaagttcgtgtgcctgaactgcggcttcgagacacacgcagccgagcaagccgccctgaacatcgccagatcctggctgttcctgcggagccaggagtacaagaaataccagacaaacaagacaaccggcaacaccgataagagagccttcgtcgagacctggcagtccttttaccggaagaagcttaaggaggtgtggaaacctgccgtgcggtctggcggatctggcggaggctccttaccagacccccgtgagcttcaaggacgtggtggtgggcttcacccaggaggagtggcacaggctgagccccgcccagagggccctgtacagggacgtgatgctggagacctacagcaacctggtgagcgtgggctacgagggcaccaagcccgacgtgatcctgaggctggagcaggaggaggccccctggatcggcggcgccgccaggcccggctgccactgctgggaggacatctggcagggatctggctccggcagcggccccaagaaaaagagaaaagtctaagctgccttctgcggggcttgccttctggccatgcccttcttctctcccttgcacctgtacctcttggtctttgaataaagcctgagtaggaaggctagcaaaaaaaaaaaaaaaaaaaaaaaaaaaaaaaaaaaaaaaaaaaaaaaaaaaaaaaaaaaaaaaaaaaaaaaaaaaaaaaa

SEQ ID NO: 16368 - RNA, 9485 nt, synthetic construct
  source 1..9485: mol_type = other RNA
aggaaataagagagaaaagaagagtaagaagaaatataagagccaccatggcccctaagaagaagcgtaaagtgagccggatggaacgcctcgtctacgaggtgcggcagaagtgcagaaacatcgaggacatctgcatctcctgcggatctctgaacgtgaccctggagcacccactgttcatcggcggcatgtgccagaactgtaaaaactgttttctggagtgtgcctatcaatacgacgatgacggctaccagagctactgcaccatctgttgcggcggaagagaggtgctgatgtgtggaaataacaactgctgccggtgcttctgcgtggaatgcgtggacctgctggtgggccccggcgccgcccaggccgctattaaggaagatccttggaactgctacatgtgcggccacaagggcacatacggcctgctgagacggagagaggactggcctagcagactgcagatgttcttcgccaataaccacgaccaggagttcgacccccctaaggtgtaccctcccgtccccgccgagaagagaaagcccatccgggtcctgagcctgttcgatggcatcgccaccggtctgctggtgctgaaggacctgggcatccaggtggataggtacattgcctccgaggtgtgcgaggactccatcaccgtgggaatggtgcgtcatcagggcaagatcatgtacgtgggcgacgtgcggagcgtgacacagaagcatatccaggagtggggccctttcgacctggtgatcggcggcagcccttgcaatgacctgagcatcgtgaacccagcccggaagggcctgtacgagggaaccggcagactgttcttcgagttttacagactgctgcacgacgcccggcctaaggaaggcgacgaccggcccttcttttggctgttcgagaatgtggtggccatgggagtcagcgacaagcgggatattagccggttcctggagagcaaccccgtgatgatcgatgccaaggaagtgagcgccgcccaccgggccagatacttctggggcaatctgcctggcatgaacagacccctggccagcaccgtgaacgacaagctggagctgcaggagtgcctggagcacggccggatcgccaagttcagcaaggtgagaaccatcaccacccgaagcaacagcatcaaacaaggcaaggaccagcactttcctgtgttcatgaacgagaaggaggacatcctgtggtgtaccgagatggagagagtgttcgggttcccagtccactacacagatgtcagcaacatgtctagactggccagacagagactgctgggaagaagctggtccgtccctgtgatcagacacctgttcgcccctctgaaggagtacttcgcctgcgtgagcagcggcaacagcaacgccaacagccggggccccagcttctctagcggcctggtgccactgtccctgagagggagccacatgggccccatggagatctacaaaaccgtgagcgcctggaagcggcagcctgtgcgcgtgctgagcctgtttcggaatatcgataaagtcctgaaaagcctgggattcctggagagcggctctggctccggcggtggcaccctgaagtacgtggaggatgtgacaaacgtggtcagacgggatgtggagaagtggggccccttcgatctggtgtacggcagcacccaacccctgggcagctcttgtgaccggtgccctggctggtacatgtttcagttccaccggatcctgcagtacgccctgccgagacaggagtcccagcggccattcttttggattttcatggacaacttgctgctgaccgaggatgaccaggaaactaccactcggttcctgcagaccgaagccgtgaccctgcaggacgtgagaggccgggactaccagaacgccatgcgggtgtggtccaacatccctggactgaaaagcaagcacgcacctctgacccctaaagaagaggagtacctgcaggcccaggtgcggagcagaagcaagctggacgcccctaaggtggatctgctggtgaagaattgcctcctgcccctgagagagtacttcaagtatttcagccagaatagtctgcccctgggaggcagcggcggcggcgccctggtgacatttgaggacgtcgccgtgcggttcacccaggaggaatgggctctgctggatccttctcagaaaatcctgtaccgggacgtgatgagagagacataccggaatctgacctccgtgggcatcaactgggaatgttgggaccttgaagcctgcttcagaagcctgggaagaaacctgagagtgcaggtggtgaagagaaagtgcgagctgaccaacagcggcccctgcgccgagggcggcccaagcagcggcgcccctcctcccagcggcggcagcccagccggctccccaacctctaccgaggagggcacctctgagtccgccacccccgagagcggccctggcacctccaccgagcccagcgagggcagcgcacccggcagccctgccggcagccccacctccacagaggagggaaccagcaccgagcccagcgaaggcagcgccccaggcaccagcaccgagcctagtgagcaggagattaaacggatcaacaagatcagaagaagacttgtgaaagacagcaacaccaagaaggccggcaagacaggccccatgaaaaccctgctggttagagtgatgacacccgatctgagagagcggctggaaaacctgagaaagaagcctgaaaatatcccccagcccatcagcaatacatctagagccaacctgaataagctgctgaccgattacaccgaaatgaagaaggcgatcctgcatgtgtactgggaagagttccagaaggaccctgtgggcctgatgagccgggtggcccagcctgccagcaagaagatcgatcagaacaagctgaaacctgagatggacgagaagggcaacctgaccaccgccggctttgcctgctctcagtgtggccagcccctgttcgtgtacaagctggagcaggtgtctgagaagggcaaggcttacaccaactacttcggacggtgcaatgtggccgagcacgaaaagctgatcctgctggcccagctgaagcccgagaaggatagcgacgaagccgtgacatatagcctgggaaagtttgggcagagggccctggatttctacagcattcatgtgaccaaggagtccacccaccccgtgaagcccctggcccagatcgccggaaacagatacgcctccggacctgtgggaaaggccctgagcgacgcatgtatgggcacaatcgcctccttcctgtctaagtaccaggacatcatcatcgaacaccagaaggtggtgaagggcaaccagaagagactggagagcctgcgggagctggccggcaaggaaaacctggaataccctagcgtgaccctgccacctcagcctcacaccaaggagggcgttgatgcctacaacgaagtgatcgcccgggtgcgaatgtgggtgaacctgaacctgtggcagaagctgaagctaagcagagatgatgccaagcctctgctgagactgaagggattcccttcctttcctctggtcgagagacaggccaacgaagtggactggtgggacatggtgtgtaacgtgaagaagctgatcaacgagaaaaaggaggatggcaaggtgttttggcagaatctggctggctacaagagacaggaagccctgagaccatacctgagcagcgaggaagatcggaagaagggaaagaaattcgctcggtaccagctgggcgacctgctgctgcacctggaaaagaagcacggcgaggactggggaaaggtgtacgacgaggcctgggagcggattgacaagaaagtggaaggcctgagcaagcacatcaagctggaagaggaacggagaagcgaggacgcccagagcaaggccgccctgaccgactggctgcgggctaaggccagcttcgtgatcgagggcctgaaggaggccgacaaggacgagttctgcagatgcgagctgaagctgcagaagtggtacggggacctgcggggaaagcccttcgccatcgaagccgagaacagcatcctggacatcagcggcttcagcaagcagtacaactgtgccttcatctggcagaaggacggcgtgaagaagctgaacctgtacctgatcatcaactacttcaagggcggcaagctgcggttcaagaagatcaaacctgaagccttcgaagccaacagattctacaccgtgatcaacaaaaagagcggcgagatcgtgcccatggaggtgaacttcaacttcgacgaccccaacctgatcatcctgcctctggcctttggcaagagacagggcagagaattcatctggaacgacctgctgtccctggaaaccggcagcctgaagctggccaacggaagagtgatcgagaagacactgtacaacagaagaacccggcaggatgagcctgccctgttcgtggccctgaccttcgagcggcgggaggtcctggactcctccaatatcaaaccaatgaacctgatcggcgtggcaagaggcgaaaacatccccgccgtgatcgccctgaccgaccccgagggctgcccactgagccggtttaaggatagcctgggaaacccaacccacatcctgagaatcggcgagagctataaggagaagcagcggaccatccaggccaagaaggaggtggagcagcggagagccggcggctacagccggaagtacgccagcaaagccaagaatctggcagacgatatggtgagaaacaccgctagagatctgctgtactacgccgtgacccaggatgccatgctgatcttcgccaacctgagccggggcttcggccggcagggcaagcggaccttcatggccgagagacagtacacacggatggaggactggctgaccgccaagctggcctacgagggcctgagcaagacctacctgtccaagacactggcccagtacacctccaagacatgcagcaactgtgggtttaccatcaccagcgccgactacgacagggtgctggagaagctgaagaagacagcaacaggctggatgaccacaattaacggcaaggagctgaaggtggagggccagattacctactacaacagatacaagagacagaacgtagtcaaggacctgtccgtcgagctggatagactgagcgaagaatctgtgaacaacgacatctcctcctggacaaagggcagaagcggagaagctctgagcctcctgaagaaaagattctcccatagacccgtgcaggagaagttcgtgtgcctgaactgcggcttcgagacacacgcagccgagcaagccgccctgaacatcgccagatcctggctgttcctgcggagccaggagtacaagaaataccagacaaacaagacaaccggcaacaccgataagagagccttcgtcgagacctggcagtccttttaccggaagaagcttaaggaggtgtggaaacctgccgtgcggtctggcggatctggcggaggctccatccagggcagcctgaccttcaaggacgtggccatgaacttcacccaggaggagtggtgcctgctggaccacagccagaaggagctgtacctggaggtgatgctggagaacgtgcagaacctgctgagcgtgggcctgcccgtgcccagggagtactacaccagctacttccagcaggagaaggccccctggctgctggtgcagaagggccccaggaacagcagccccgaggccgagaccaacggcggcccaagcagcggcgcccctcctcccagcggcggcagcccagccggctccccaacctctaccgaggagggcacctctgagtccgccacccccgagagcggccctggcacctccaccgagcccagcgagggcagcgcacccggcagccctgccggcagccccacctccacagaggagggaaccagcaccgagcccagcgaaggcagcgccccaggcaccagcaccgagcctagtgagcaggagattaaacggatcaacaagatcagaagaagacttgtgaaagacagcaacaccaagaaggccggcaagacaggccccatgaaaaccctgctggttagagtgatgacacccgatctgagagagcggctggaaaacctgagaaagaagcctgaaaatatcccccagcccatcagcaatacatctagagccaacctgaataagctgctgaccgattacaccgaaatgaagaaggcgatcctgcatgtgtactgggaagagttccagaaggaccctgtgggcctgatgagccgggtggcccagcctgccagcaagaagatcgatcagaacaagctgaaacctgagatggacgagaagggcaacctgaccaccgccggctttgcctgctctcagtgtggccagcccctgttcgtgtacaagctggagcaggtgtctgagaagggcaaggcttacaccaactacttcggacggtgcaatgtggccgagcacgaaaagctgatcctgctggcccagctgaagcccgagaaggatagcgacgaagccgtgacatatagcctgggaaagtttgggcagagggccctggatttctacagcattcatgtgaccaaggagtccacccaccccgtgaagcccctggcccagatcgccggaaacagatacgcctccggacctgtgggaaaggccctgagcgacgcatgtatgggcacaatcgcctccttcctgtctaagtaccaggacatcatcatcgaacaccagaaggtggtgaagggcaaccagaagagactggagagcctgcgggagctggccggcaaggaaaacctggaataccctagcgtgaccctgccacctcagcctcacaccaaggagggcgttgatgcctacaacgaagtgatcgcccgggtgcgaatgtgggtgaacctgaacctgtggcagaagctgaagctaagcagagatgatgccaagcctctgctgagactgaagggattcccttcctttcctctggtcgagagacaggccaacgaagtggactggtgggacatggtgtgtaacgtgaagaagctgatcaacgagaaaaaggaggatggcaaggtgttttggcagaatctggctggctacaagagacaggaagccctgagaccatacctgagcagcgaggaagatcggaagaagggaaagaaattcgctcggtaccagctgggcgacctgctgctgcacctggaaaagaagcacggcgaggactggggaaaggtgtacgacgaggcctgggagcggattgacaagaaagtggaaggcctgagcaagcacatcaagctggaagaggaacggagaagcgaggacgcccagagcaaggccgccctgaccgactggctgcgggctaaggccagcttcgtgatcgagggcctgaaggaggccgacaaggacgagttctgcagatgcgagctgaagctgcagaagtggtacggggacctgcggggaaagcccttcgccatcgaagccgagaacagcatcctggacatcagcggcttcagcaagcagtacaactgtgccttcatctggcagaaggacggcgtgaagaagctgaacctgtacctgatcatcaactacttcaagggcggcaagctgcggttcaagaagatcaaacctgaagccttcgaagccaacagattctacaccgtgatcaacaaaaagagcggcgagatcgtgcccatggaggtgaacttcaacttcgacgaccccaacctgatcatcctgcctctggcctttggcaagagacagggcagagaattcatctggaacgacctgctgtccctggaaaccggcagcctgaagctggccaacggaagagtgatcgagaagacactgtacaacagaagaacccggcaggatgagcctgccctgttcgtggccctgaccttcgagcggcgggaggtcctggactcctccaatatcaaaccaatgaacctgatcggcgtggcaagaggcgaaaacatccccgccgtgatcgccctgaccgaccccgagggctgcccactgagccggtttaaggatagcctgggaaacccaacccacatcctgagaatcggcgagagctataaggagaagcagcggaccatccaggccaagaaggaggtggagcagcggagagccggcggctacagccggaagtacgccagcaaagccaagaatctggcagacgatatggtgagaaacaccgctagagatctgctgtactacgccgtgacccaggatgccatgctgatcttcgccaacctgagccggggcttcggccggcagggcaagcggaccttcatggccgagagacagtacacacggatggaggactggctgaccgccaagctggcctacgagggcctgagcaagacctacctgtccaagacactggcccagtacacctccaagacatgcagcaactgtgggtttaccatcaccagcgccgactacgacagggtgctggagaagctgaagaagacagcaacaggctggatgaccacaattaacggcaaggagctgaaggtggagggccagattacctactacaacagatacaagagacagaacgtagtcaaggacctgtccgtcgagctggatagactgagcgaagaatctgtgaacaacgacatctcctcctggacaaagggcagaagcggagaagctctgagcctcctgaagaaaagattctcccatagacccgtgcaggagaagttcgtgtgcctgaactgcggcttcgagacacacgcagccgagcaagccgccctgaacatcgccagatcctggctgttcctgcggagccaggagtacaagaaataccagacaaacaagacaaccggcaacaccgataagagagccttcgtcgagacctggcagtccttttaccggaagaagcttaaggaggtgtggaaacctgccgtgcggtctggcggatctggcggaggctcctatccagggcagcctgaccttcaaggacgtggccatgaacttcacccaggaggagtggtgcctgctggaccacagccagaaggagctgtacctggaggtgatgctggagaacgtgcagaacctgctgagcgtgggcctgcccgtgcccagggagtactacaccagctacttccagcaggagaaggccccctggctgctggtgcagaagggccccaggaacagcagccccgaggccgagaccaacggatctggctccggcagcggccccaagaaaaagagaaaagtctaagctgccttctgcggggcttgccttctggccatgcccttcttctctcccttgcacctgtacctcttggtctttgaataaagcctgagtaggaaggctagcaaaaaaaaaaaaaaaaaaaaaaaaaaaaaaaaaaaaaaaaaaaaaaaaaaaaaaaaaaaaaaaaaaaaaaaaaaaaaaaa

SEQ ID NO: 16369 - RNA, 9485 nt, synthetic construct
  source 1..9485: mol_type = other RNA
aggaaataagagagaaaagaagagtaagaagaaatataagagccaccatggcccctaagaagaagcgtaaagtgagccggatggaacgcctcgtctacgaggtgcggcagaagtgcagaaacatcgaggacatctgcatctcctgcggatctctgaacgtgaccctggagcacccactgttcatcggcggcatgtgccagaactgtaaaaactgttttctggagtgtgcctatcaatacgacgatgacggctaccagagctactgcaccatctgttgcggcggaagagaggtgctgatgtgtggaaataacaactgctgccggtgcttctgcgtggaatgcgtggacctgctggtgggccccggcgccgcccaggccgctattaaggaagatccttggaactgctacatgtgcggccacaagggcacatacggcctgctgagacggagagaggactggcctagcagactgcagatgttcttcgccaataaccacgaccaggagttcgacccccctaaggtgtaccctcccgtccccgccgagaagagaaagcccatccgggtcctgagcctgttcgatggcatcgccaccggtctgctggtgctgaaggacctgggcatccaggtggataggtacattgcctccgaggtgtgcgaggactccatcaccgtgggaatggtgcgtcatcagggcaagatcatgtacgtgggcgacgtgcggagcgtgacacagaagcatatccaggagtggggccctttcgacctggtgatcggcggcagcccttgcaatgacctgagcatcgtgaacccagcccggaagggcctgtacgagggaaccggcagactgttcttcgagttttacagactgctgcacgacgcccggcctaaggaaggcgacgaccggcccttcttttggctgttcgagaatgtggtggccatgggagtcagcgacaagcgggatattagccggttcctggagagcaaccccgtgatgatcgatgccaaggaagtgagcgccgcccaccgggccagatacttctggggcaatctgcctggcatgaacagacccctggccagcaccgtgaacgacaagctggagctgcaggagtgcctggagcacggccggatcgccaagttcagcaaggtgagaaccatcaccacccgaagcaacagcatcaaacaaggcaaggaccagcactttcctgtgttcatgaacgagaaggaggacatcctgtggtgtaccgagatggagagagtgttcgggttcccagtccactacacagatgtcagcaacatgtctagactggccagacagagactgctgggaagaagctggtccgtccctgtgatcagacacctgttcgcccctctgaaggagtacttcgcctgcgtgagcagcggcaacagcaacgccaacagccggggccccagcttctctagcggcctggtgccactgtccctgagagggagccacatgggccccatggagatctacaaaaccgtgagcgcctggaagcggcagcctgtgcgcgtgctgagcctgtttcggaatatcgataaagtcctgaaaagcctgggattcctggagagcggctctggctccggcggtggcaccctgaagtacgtggaggatgtgacaaacgtggtcagacgggatgtggagaagtggggccccttcgatctggtgtacggcagcacccaacccctgggcagctcttgtgaccggtgccctggctggtacatgtttcagttccaccggatcctgcagtacgccctgccgagacaggagtcccagcggccattcttttggattttcatggacaacttgctgctgaccgaggatgaccaggaaactaccactcggttcctgcagaccgaagccgtgaccctgcaggacgtgagaggccgggactaccagaacgccatgcgggtgtggtccaacatccctggactgaaaagcaagcacgcacctctgacccctaaagaagaggagtacctgcaggcccaggtgcggagcagaagcaagctggacgcccctaaggtggatctgctggtgaagaattgcctcctgcccctgagagagtacttcaagtatttcagccagaatagtctgcccctgggaggcagcggcggcggcgccctggtgacatttgaggacgtcgccgtgcggttcacccaggaggaatgggctctgctggatccttctcagaaaatcctgtaccgggacgtgatgagagagacataccggaatctgacctccgtgggcatcaactgggaatgttgggaccttgaagcctgcttcagaagcctgggaagaaacctgagagtgcaggtggtgaagagaaagtgcgagctgaccaacagcggcccctgcgccgagggcggcccaagcagcggcgcccctcctcccagcggcggcagcccagccggctccccaacctctaccgaggagggcacctctgagtccgccacccccgagagcggccctggcacctccaccgagcccagcgagggcagcgcacccggcagccctgccggcagccccacctccacagaggagggaaccagcaccgagcccagcgaaggcagcgccccaggcaccagcaccgagcctagtgagcaggagattaaacggatcaacaagatcagaagaagacttgtgaaagacagcaacaccaagaaggccggcaagacaggccccatgaaaaccctgctggttagagtgatgacacccgatctgagagagcggctggaaaacctgagaaagaagcctgaaaatatcccccagcccatcagcaatacatctagagccaacctgaataagctgctgaccgattacaccgaaatgaagaaggcgatcctgcatgtgtactgggaagagttccagaaggaccctgtgggcctgatgagccgggtggcccagcctgccagcaagaagatcgatcagaacaagctgaaacctgagatggacgagaagggcaacctgaccaccgccggctttgcctgctctcagtgtggccagcccctgttcgtgtacaagctggagcaggtgtctgagaagggcaaggcttacaccaactacttcggacggtgcaatgtggccgagcacgaaaagctgatcctgctggcccagctgaagcccgagaaggatagcgacgaagccgtgacatatagcctgggaaagtttgggcagagggccctggatttctacagcattcatgtgaccaaggagtccacccaccccgtgaagcccctggcccagatcgccggaaacagatacgcctccggacctgtgggaaaggccctgagcgacgcatgtatgggcacaatcgcctccttcctgtctaagtaccaggacatcatcatcgaacaccagaaggtggtgaagggcaaccagaagagactggagagcctgcgggagctggccggcaaggaaaacctggaataccctagcgtgaccctgccacctcagcctcacaccaaggagggcgttgatgcctacaacgaagtgatcgcccgggtgcgaatgtgggtgaacctgaacctgtggcagaagctgaagctaagcagagatgatgccaagcctctgctgagactgaagggattcccttcctttcctctggtcgagagacaggccaacgaagtggactggtgggacatggtgtgtaacgtgaagaagctgatcaacgagaaaaaggaggatggcaaggtgttttggcagaatctggctggctacaagagacaggaagccctgagaccatacctgagcagcgaggaagatcggaagaagggaaagaaattcgctcggtaccagctgggcgacctgctgctgcacctggaaaagaagcacggcgaggactggggaaaggtgtacgacgaggcctgggagcggattgacaagaaagtggaaggcctgagcaagcacatcaagctggaagaggaacggagaagcgaggacgcccagagcaaggccgccctgaccgactggctgcgggctaaggccagcttcgtgatcgagggcctgaaggaggccgacaaggacgagttctgcagatgcgagctgaagctgcagaagtggtacggggacctgcggggaaagcccttcgccatcgaagccgagaacagcatcctggacatcagcggcttcagcaagcagtacaactgtgccttcatctggcagaaggacggcgtgaagaagctgaacctgtacctgatcatcaactacttcaagggcggcaagctgcggttcaagaagatcaaacctgaagccttcgaagccaacagattctacaccgtgatcaacaaaaagagcggcgagatcgtgcccatggaggtgaacttcaacttcgacgaccccaacctgatcatcctgcctctggcctttggcaagagacagggcagagaattcatctggaacgacctgctgtccctggaaaccggcagcctgaagctggccaacggaagagtgatcgagaagacactgtacaacagaagaacccggcaggatgagcctgccctgttcgtggccctgaccttcgagcggcgggaggtcctggactcctccaatatcaaaccaatgaacctgatcggcgtggcaagaggcgaaaacatccccgccgtgatcgccctgaccgaccccgagggctgcccactgagccggtttaaggatagcctgggaaacccaacccacatcctgagaatcggcgagagctataaggagaagcagcggaccatccaggccaagaaggaggtggagcagcggagagccggcggctacagccggaagtacgccagcaaagccaagaatctggcagacgatatggtgagaaacaccgctagagatctgctgtactacgccgtgacccaggatgccatgctgatcttcgccaacctgagccggggcttcggccggcagggcaagcggaccttcatggccgagagacagtacacacggatggaggactggctgaccgccaagctggcctacgagggcctgagcaagacctacctgtccaagacactggcccagtacacctccaagacatgcagcaactgtgggtttaccatcaccagcgccgactacgacagggtgctggagaagctgaagaagacagcaacaggctggatgaccacaattaacggcaaggagctgaaggtggagggccagattacctactacaacagatacaagagacagaacgtagtcaaggacctgtccgtcgagctggatagactgagcgaagaatctgtgaacaacgacatctcctcctggacaaagggcagaagcggagaagctctgagcctcctgaagaaaagattctcccatagacccgtgcaggagaagttcgtgtgcctgaactgcggcttcgagacacacgcagccgagcaagccgccctgaacatcgccagatcctggctgttcctgcggagccaggagtacaagaaataccagacaaacaagacaaccggcaacaccgataagagagccttcgtcgagacctggcagtccttttaccggaagaagcttaaggaggtgtggaaacctgccgtgcggtctggcggatctggcggaggctccatgagcgtgaccttcgaggacgtggccatgtacttcagccccgccgagtgggtgctgctgggcgaggagcagaagcagctgtacaggcacgtgatgtgggagaactaccagaccctggtgagcctgggcatccagatcagcaagcccgtggtgatcagcagcatcgagaggggcgaggagctgtgggcccagagccccaccgaggacgaggacgaggacatcctgagcggcaccagccccggcggcggcccaagcagcggcgcccctcctcccagcggcggcagcccagccggctccccaacctctaccgaggagggcacctctgagtccgccacccccgagagcggccctggcacctccaccgagcccagcgagggcagcgcacccggcagccctgccggcagccccacctccacagaggagggaaccagcaccgagcccagcgaaggcagcgccccaggcaccagcaccgagcctagtgagcaggagattaaacggatcaacaagatcagaagaagacttgtgaaagacagcaacaccaagaaggccggcaagacaggccccatgaaaaccctgctggttagagtgatgacacccgatctgagagagcggctggaaaacctgagaaagaagcctgaaaatatcccccagcccatcagcaatacatctagagccaacctgaataagctgctgaccgattacaccgaaatgaagaaggcgatcctgcatgtgtactgggaagagttccagaaggaccctgtgggcctgatgagccgggtggcccagcctgccagcaagaagatcgatcagaacaagctgaaacctgagatggacgagaagggcaacctgaccaccgccggctttgcctgctctcagtgtggccagcccctgttcgtgtacaagctggagcaggtgtctgagaagggcaaggcttacaccaactacttcggacggtgcaatgtggccgagcacgaaaagctgatcctgctggcccagctgaagcccgagaaggatagcgacgaagccgtgacatatagcctgggaaagtttgggcagagggccctggatttctacagcattcatgtgaccaaggagtccacccaccccgtgaagcccctggcccagatcgccggaaacagatacgcctccggacctgtgggaaaggccctgagcgacgcatgtatgggcacaatcgcctccttcctgtctaagtaccaggacatcatcatcgaacaccagaaggtggtgaagggcaaccagaagagactggagagcctgcgggagctggccggcaaggaaaacctggaataccctagcgtgaccctgccacctcagcctcacaccaaggagggcgttgatgcctacaacgaagtgatcgcccgggtgcgaatgtgggtgaacctgaacctgtggcagaagctgaagctaagcagagatgatgccaagcctctgctgagactgaagggattcccttcctttcctctggtcgagagacaggccaacgaagtggactggtgggacatggtgtgtaacgtgaagaagctgatcaacgagaaaaaggaggatggcaaggtgttttggcagaatctggctggctacaagagacaggaagccctgagaccatacctgagcagcgaggaagatcggaagaagggaaagaaattcgctcggtaccagctgggcgacctgctgctgcacctggaaaagaagcacggcgaggactggggaaaggtgtacgacgaggcctgggagcggattgacaagaaagtggaaggcctgagcaagcacatcaagctggaagaggaacggagaagcgaggacgcccagagcaaggccgccctgaccgactggctgcgggctaaggccagcttcgtgatcgagggcctgaaggaggccgacaaggacgagttctgcagatgcgagctgaagctgcagaagtggtacggggacctgcggggaaagcccttcgccatcgaagccgagaacagcatcctggacatcagcggcttcagcaagcagtacaactgtgccttcatctggcagaaggacggcgtgaagaagctgaacctgtacctgatcatcaactacttcaagggcggcaagctgcggttcaagaagatcaaacctgaagccttcgaagccaacagattctacaccgtgatcaacaaaaagagcggcgagatcgtgcccatggaggtgaacttcaacttcgacgaccccaacctgatcatcctgcctctggcctttggcaagagacagggcagagaattcatctggaacgacctgctgtccctggaaaccggcagcctgaagctggccaacggaagagtgatcgagaagacactgtacaacagaagaacccggcaggatgagcctgccctgttcgtggccctgaccttcgagcggcgggaggtcctggactcctccaatatcaaaccaatgaacctgatcggcgtggcaagaggcgaaaacatccccgccgtgatcgccctgaccgaccccgagggctgcccactgagccggtttaaggatagcctgggaaacccaacccacatcctgagaatcggcgagagctataaggagaagcagcggaccatccaggccaagaaggaggtggagcagcggagagccggcggctacagccggaagtacgccagcaaagccaagaatctggcagacgatatggtgagaaacaccgctagagatctgctgtactacgccgtgacccaggatgccatgctgatcttcgccaacctgagccggggcttcggccggcagggcaagcggaccttcatggccgagagacagtacacacggatggaggactggctgaccgccaagctggcctacgagggcctgagcaagacctacctgtccaagacactggcccagtacacctccaagacatgcagcaactgtgggtttaccatcaccagcgccgactacgacagggtgctggagaagctgaagaagacagcaacaggctggatgaccacaattaacggcaaggagctgaaggtggagggccagattacctactacaacagatacaagagacagaacgtagtcaaggacctgtccgtcgagctggatagactgagcgaagaatctgtgaacaacgacatctcctcctggacaaagggcagaagcggagaagctctgagcctcctgaagaaaagattctcccatagacccgtgcaggagaagttcgtgtgcctgaactgcggcttcgagacacacgcagccgagcaagccgccctgaacatcgccagatcctggctgttcctgcggagccaggagtacaagaaataccagacaaacaagacaaccggcaacaccgataagagagccttcgtcgagacctggcagtccttttaccggaagaagcttaaggaggtgtggaaacctgccgtgcggtctggcggatctggcggaggctcctatgagcgtgaccttcgaggacgtggccatgtacttcagccccgccgagtgggtgctgctgggcgaggagcagaagcagctgtacaggcacgtgatgtgggagaactaccagaccctggtgagcctgggcatccagatcagcaagcccgtggtgatcagcagcatcgagaggggcgaggagctgtgggcccagagccccaccgaggacgaggacgaggacatcctgagcggcaccagccccggcggatctggctccggcagcggccccaagaaaaagagaaaagtctaagctgccttctgcggggcttgccttctggccatgcccttcttctctcccttgcacctgtacctcttggtctttgaataaagcctgagtaggaaggctagcaaaaaaaaaaaaaaaaaaaaaaaaaaaaaaaaaaaaaaaaaaaaaaaaaaaaaaaaaaaaaaaaaaaaaaaaaaaaaaaa

SEQ ID NO: 16370 - RNA, 9485 nt, synthetic construct
  source 1..9485: mol_type = other RNA
aggaaataagagagaaaagaagagtaagaagaaatataagagccaccatggcccctaagaagaagcgtaaagtgagccggatggaacgcctcgtctacgaggtgcggcagaagtgcagaaacatcgaggacatctgcatctcctgcggatctctgaacgtgaccctggagcacccactgttcatcggcggcatgtgccagaactgtaaaaactgttttctggagtgtgcctatcaatacgacgatgacggctaccagagctactgcaccatctgttgcggcggaagagaggtgctgatgtgtggaaataacaactgctgccggtgcttctgcgtggaatgcgtggacctgctggtgggccccggcgccgcccaggccgctattaaggaagatccttggaactgctacatgtgcggccacaagggcacatacggcctgctgagacggagagaggactggcctagcagactgcagatgttcttcgccaataaccacgaccaggagttcgacccccctaaggtgtaccctcccgtccccgccgagaagagaaagcccatccgggtcctgagcctgttcgatggcatcgccaccggtctgctggtgctgaaggacctgggcatccaggtggataggtacattgcctccgaggtgtgcgaggactccatcaccgtgggaatggtgcgtcatcagggcaagatcatgtacgtgggcgacgtgcggagcgtgacacagaagcatatccaggagtggggccctttcgacctggtgatcggcggcagcccttgcaatgacctgagcatcgtgaacccagcccggaagggcctgtacgagggaaccggcagactgttcttcgagttttacagactgctgcacgacgcccggcctaaggaaggcgacgaccggcccttcttttggctgttcgagaatgtggtggccatgggagtcagcgacaagcgggatattagccggttcctggagagcaaccccgtgatgatcgatgccaaggaagtgagcgccgcccaccgggccagatacttctggggcaatctgcctggcatgaacagacccctggccagcaccgtgaacgacaagctggagctgcaggagtgcctggagcacggccggatcgccaagttcagcaaggtgagaaccatcaccacccgaagcaacagcatcaaacaaggcaaggaccagcactttcctgtgttcatgaacgagaaggaggacatcctgtggtgtaccgagatggagagagtgttcgggttcccagtccactacacagatgtcagcaacatgtctagactggccagacagagactgctgggaagaagctggtccgtccctgtgatcagacacctgttcgcccctctgaaggagtacttcgcctgcgtgagcagcggcaacagcaacgccaacagccggggccccagcttctctagcggcctggtgccactgtccctgagagggagccacatgggccccatggagatctacaaaaccgtgagcgcctggaagcggcagcctgtgcgcgtgctgagcctgtttcggaatatcgataaagtcctgaaaagcctgggattcctggagagcggctctggctccggcggtggcaccctgaagtacgtggaggatgtgacaaacgtggtcagacgggatgtggagaagtggggccccttcgatctggtgtacggcagcacccaacccctgggcagctcttgtgaccggtgccctggctggtacatgtttcagttccaccggatcctgcagtacgccctgccgagacaggagtcccagcggccattcttttggattttcatggacaacttgctgctgaccgaggatgaccaggaaactaccactcggttcctgcagaccgaagccgtgaccctgcaggacgtgagaggccgggactaccagaacgccatgcgggtgtggtccaacatccctggactgaaaagcaagcacgcacctctgacccctaaagaagaggagtacctgcaggcccaggtgcggagcagaagcaagctggacgcccctaaggtggatctgctggtgaagaattgcctcctgcccctgagagagtacttcaagtatttcagccagaatagtctgcccctgggaggcagcggcggcggcgccctggtgacatttgaggacgtcgccgtgcggttcacccaggaggaatgggctctgctggatccttctcagaaaatcctgtaccgggacgtgatgagagagacataccggaatctgacctccgtgggcatcaactgggaatgttgggaccttgaagcctgcttcagaagcctgggaagaaacctgagagtgcaggtggtgaagagaaagtgcgagctgaccaacagcggcccctgcgccgagggcggcccaagcagcggcgcccctcctcccagcggcggcagcccagccggctccccaacctctaccgaggagggcacctctgagtccgccacccccgagagcggccctggcacctccaccgagcccagcgagggcagcgcacccggcagccctgccggcagccccacctccacagaggagggaaccagcaccgagcccagcgaaggcagcgccccaggcaccagcaccgagcctagtgagcaggagattaaacggatcaacaagatcagaagaagacttgtgaaagacagcaacaccaagaaggccggcaagacaggccccatgaaaaccctgctggttagagtgatgacacccgatctgagagagcggctggaaaacctgagaaagaagcctgaaaatatcccccagcccatcagcaatacatctagagccaacctgaataagctgctgaccgattacaccgaaatgaagaaggcgatcctgcatgtgtactgggaagagttccagaaggaccctgtgggcctgatgagccgggtggcccagcctgccagcaagaagatcgatcagaacaagctgaaacctgagatggacgagaagggcaacctgaccaccgccggctttgcctgctctcagtgtggccagcccctgttcgtgtacaagctggagcaggtgtctgagaagggcaaggcttacaccaactacttcggacggtgcaatgtggccgagcacgaaaagctgatcctgctggcccagctgaagcccgagaaggatagcgacgaagccgtgacatatagcctgggaaagtttgggcagagggccctggatttctacagcattcatgtgaccaaggagtccacccaccccgtgaagcccctggcccagatcgccggaaacagatacgcctccggacctgtgggaaaggccctgagcgacgcatgtatgggcacaatcgcctccttcctgtctaagtaccaggacatcatcatcgaacaccagaaggtggtgaagggcaaccagaagagactggagagcctgcgggagctggccggcaaggaaaacctggaataccctagcgtgaccctgccacctcagcctcacaccaaggagggcgttgatgcctacaacgaagtgatcgcccgggtgcgaatgtgggtgaacctgaacctgtggcagaagctgaagctaagcagagatgatgccaagcctctgctgagactgaagggattcccttcctttcctctggtcgagagacaggccaacgaagtggactggtgggacatggtgtgtaacgtgaagaagctgatcaacgagaaaaaggaggatggcaaggtgttttggcagaatctggctggctacaagagacaggaagccctgagaccatacctgagcagcgaggaagatcggaagaagggaaagaaattcgctcggtaccagctgggcgacctgctgctgcacctggaaaagaagcacggcgaggactggggaaaggtgtacgacgaggcctgggagcggattgacaagaaagtggaaggcctgagcaagcacatcaagctggaagaggaacggagaagcgaggacgcccagagcaaggccgccctgaccgactggctgcgggctaaggccagcttcgtgatcgagggcctgaaggaggccgacaaggacgagttctgcagatgcgagctgaagctgcagaagtggtacggggacctgcggggaaagcccttcgccatcgaagccgagaacagcatcctggacatcagcggcttcagcaagcagtacaactgtgccttcatctggcagaaggacggcgtgaagaagctgaacctgtacctgatcatcaactacttcaagggcggcaagctgcggttcaagaagatcaaacctgaagccttcgaagccaacagattctacaccgtgatcaacaaaaagagcggcgagatcgtgcccatggaggtgaacttcaacttcgacgaccccaacctgatcatcctgcctctggcctttggcaagagacagggcagagaattcatctggaacgacctgctgtccctggaaaccggcagcctgaagctggccaacggaagagtgatcgagaagacactgtacaacagaagaacccggcaggatgagcctgccctgttcgtggccctgaccttcgagcggcgggaggtcctggactcctccaatatcaaaccaatgaacctgatcggcgtggcaagaggcgaaaacatccccgccgtgatcgccctgaccgaccccgagggctgcccactgagccggtttaaggatagcctgggaaacccaacccacatcctgagaatcggcgagagctataaggagaagcagcggaccatccaggccaagaaggaggtggagcagcggagagccggcggctacagccggaagtacgccagcaaagccaagaatctggcagacgatatggtgagaaacaccgctagagatctgctgtactacgccgtgacccaggatgccatgctgatcttcgccaacctgagccggggcttcggccggcagggcaagcggaccttcatggccgagagacagtacacacggatggaggactggctgaccgccaagctggcctacgagggcctgagcaagacctacctgtccaagacactggcccagtacacctccaagacatgcagcaactgtgggtttaccatcaccagcgccgactacgacagggtgctggagaagctgaagaagacagcaacaggctggatgaccacaattaacggcaaggagctgaaggtggagggccagattacctactacaacagatacaagagacagaacgtagtcaaggacctgtccgtcgagctggatagactgagcgaagaatctgtgaacaacgacatctcctcctggacaaagggcagaagcggagaagctctgagcctcctgaagaaaagattctcccatagacccgtgcaggagaagttcgtgtgcctgaactgcggcttcgagacacacgcagccgagcaagccgccctgaacatcgccagatcctggctgttcctgcggagccaggagtacaagaaataccagacaaacaagacaaccggcaacaccgataagagagccttcgtcgagacctggcagtccttttaccggaagaagcttaaggaggtgtggaaacctgccgtgcggtctggcggatctggcggaggctccgagagcgtgaccttcgaggacgtggccgtgtacttcagcgagaacgagtggatcggcctgggccccgcccagagggccctgtacagggacgtgatgctggagaactacggcgccgtggccagcctggccttccccttccccaagcccgccctgatcagccagctggagaggggcgaggccccctggtgcagcgccccccagggcgccctggacggcgagagccccaggggcatcagcagcgagggcggcccaagcagcggcgcccctcctcccagcggcggcagcccagccggctccccaacctctaccgaggagggcacctctgagtccgccacccccgagagcggccctggcacctccaccgagcccagcgagggcagcgcacccggcagccctgccggcagccccacctccacagaggagggaaccagcaccgagcccagcgaaggcagcgccccaggcaccagcaccgagcctagtgagcaggagattaaacggatcaacaagatcagaagaagacttgtgaaagacagcaacaccaagaaggccggcaagacaggccccatgaaaaccctgctggttagagtgatgacacccgatctgagagagcggctggaaaacctgagaaagaagcctgaaaatatcccccagcccatcagcaatacatctagagccaacctgaataagctgctgaccgattacaccgaaatgaagaaggcgatcctgcatgtgtactgggaagagttccagaaggaccctgtgggcctgatgagccgggtggcccagcctgccagcaagaagatcgatcagaacaagctgaaacctgagatggacgagaagggcaacctgaccaccgccggctttgcctgctctcagtgtggccagcccctgttcgtgtacaagctggagcaggtgtctgagaagggcaaggcttacaccaactacttcggacggtgcaatgtggccgagcacgaaaagctgatcctgctggcccagctgaagcccgagaaggatagcgacgaagccgtgacatatagcctgggaaagtttgggcagagggccctggatttctacagcattcatgtgaccaaggagtccacccaccccgtgaagcccctggcccagatcgccggaaacagatacgcctccggacctgtgggaaaggccctgagcgacgcatgtatgggcacaatcgcctccttcctgtctaagtaccaggacatcatcatcgaacaccagaaggtggtgaagggcaaccagaagagactggagagcctgcgggagctggccggcaaggaaaacctggaataccctagcgtgaccctgccacctcagcctcacaccaaggagggcgttgatgcctacaacgaagtgatcgcccgggtgcgaatgtgggtgaacctgaacctgtggcagaagctgaagctaagcagagatgatgccaagcctctgctgagactgaagggattcccttcctttcctctggtcgagagacaggccaacgaagtggactggtgggacatggtgtgtaacgtgaagaagctgatcaacgagaaaaaggaggatggcaaggtgttttggcagaatctggctggctacaagagacaggaagccctgagaccatacctgagcagcgaggaagatcggaagaagggaaagaaattcgctcggtaccagctgggcgacctgctgctgcacctggaaaagaagcacggcgaggactggggaaaggtgtacgacgaggcctgggagcggattgacaagaaagtggaaggcctgagcaagcacatcaagctggaagaggaacggagaagcgaggacgcccagagcaaggccgccctgaccgactggctgcgggctaaggccagcttcgtgatcgagggcctgaaggaggccgacaaggacgagttctgcagatgcgagctgaagctgcagaagtggtacggggacctgcggggaaagcccttcgccatcgaagccgagaacagcatcctggacatcagcggcttcagcaagcagtacaactgtgccttcatctggcagaaggacggcgtgaagaagctgaacctgtacctgatcatcaactacttcaagggcggcaagctgcggttcaagaagatcaaacctgaagccttcgaagccaacagattctacaccgtgatcaacaaaaagagcggcgagatcgtgcccatggaggtgaacttcaacttcgacgaccccaacctgatcatcctgcctctggcctttggcaagagacagggcagagaattcatctggaacgacctgctgtccctggaaaccggcagcctgaagctggccaacggaagagtgatcgagaagacactgtacaacagaagaacccggcaggatgagcctgccctgttcgtggccctgaccttcgagcggcgggaggtcctggactcctccaatatcaaaccaatgaacctgatcggcgtggcaagaggcgaaaacatccccgccgtgatcgccctgaccgaccccgagggctgcccactgagccggtttaaggatagcctgggaaacccaacccacatcctgagaatcggcgagagctataaggagaagcagcggaccatccaggccaagaaggaggtggagcagcggagagccggcggctacagccggaagtacgccagcaaagccaagaatctggcagacgatatggtgagaaacaccgctagagatctgctgtactacgccgtgacccaggatgccatgctgatcttcgccaacctgagccggggcttcggccggcagggcaagcggaccttcatggccgagagacagtacacacggatggaggactggctgaccgccaagctggcctacgagggcctgagcaagacctacctgtccaagacactggcccagtacacctccaagacatgcagcaactgtgggtttaccatcaccagcgccgactacgacagggtgctggagaagctgaagaagacagcaacaggctggatgaccacaattaacggcaaggagctgaaggtggagggccagattacctactacaacagatacaagagacagaacgtagtcaaggacctgtccgtcgagctggatagactgagcgaagaatctgtgaacaacgacatctcctcctggacaaagggcagaagcggagaagctctgagcctcctgaagaaaagattctcccatagacccgtgcaggagaagttcgtgtgcctgaactgcggcttcgagacacacgcagccgagcaagccgccctgaacatcgccagatcctggctgttcctgcggagccaggagtacaagaaataccagacaaacaagacaaccggcaacaccgataagagagccttcgtcgagacctggcagtccttttaccggaagaagcttaaggaggtgtggaaacctgccgtgcggtctggcggatctggcggaggctcctgagagcgtgaccttcgaggacgtggccgtgtacttcagcgagaacgagtggatcggcctgggccccgcccagagggccctgtacagggacgtgatgctggagaactacggcgccgtggccagcctggccttccccttccccaagcccgccctgatcagccagctggagaggggcgaggccccctggtgcagcgccccccagggcgccctggacggcgagagccccaggggcatcagcagcgagggatctggctccggcagcggccccaagaaaaagagaaaagtctaagctgccttctgcggggcttgccttctggccatgcccttcttctctcccttgcacctgtacctcttggtctttgaataaagcctgagtaggaaggctagcaaaaaaaaaaaaaaaaaaaaaaaaaaaaaaaaaaaaaaaaaaaaaaaaaaaaaaaaaaaaaaaaaaaaaaaaaaaaaaaa

SEQ ID NO: 16371 - RNA, 9485 nt, synthetic construct
  source 1..9485: mol_type = other RNA
aggaaataagagagaaaagaagagtaagaagaaatataagagccaccatggcccctaagaagaagcgtaaagtgagccggatggaacgcctcgtctacgaggtgcggcagaagtgcagaaacatcgaggacatctgcatctcctgcggatctctgaacgtgaccctggagcacccactgttcatcggcggcatgtgccagaactgtaaaaactgttttctggagtgtgcctatcaatacgacgatgacggctaccagagctactgcaccatctgttgcggcggaagagaggtgctgatgtgtggaaataacaactgctgccggtgcttctgcgtggaatgcgtggacctgctggtgggccccggcgccgcccaggccgctattaaggaagatccttggaactgctacatgtgcggccacaagggcacatacggcctgctgagacggagagaggactggcctagcagactgcagatgttcttcgccaataaccacgaccaggagttcgacccccctaaggtgtaccctcccgtccccgccgagaagagaaagcccatccgggtcctgagcctgttcgatggcatcgccaccggtctgctggtgctgaaggacctgggcatccaggtggataggtacattgcctccgaggtgtgcgaggactccatcaccgtgggaatggtgcgtcatcagggcaagatcatgtacgtgggcgacgtgcggagcgtgacacagaagcatatccaggagtggggccctttcgacctggtgatcggcggcagcccttgcaatgacctgagcatcgtgaacccagcccggaagggcctgtacgagggaaccggcagactgttcttcgagttttacagactgctgcacgacgcccggcctaaggaaggcgacgaccggcccttcttttggctgttcgagaatgtggtggccatgggagtcagcgacaagcgggatattagccggttcctggagagcaaccccgtgatgatcgatgccaaggaagtgagcgccgcccaccgggccagatacttctggggcaatctgcctggcatgaacagacccctggccagcaccgtgaacgacaagctggagctgcaggagtgcctggagcacggccggatcgccaagttcagcaaggtgagaaccatcaccacccgaagcaacagcatcaaacaaggcaaggaccagcactttcctgtgttcatgaacgagaaggaggacatcctgtggtgtaccgagatggagagagtgttcgggttcccagtccactacacagatgtcagcaacatgtctagactggccagacagagactgctgggaagaagctggtccgtccctgtgatcagacacctgttcgcccctctgaaggagtacttcgcctgcgtgagcagcggcaacagcaacgccaacagccggggccccagcttctctagcggcctggtgccactgtccctgagagggagccacatgggccccatggagatctacaaaaccgtgagcgcctggaagcggcagcctgtgcgcgtgctgagcctgtttcggaatatcgataaagtcctgaaaagcctgggattcctggagagcggctctggctccggcggtggcaccctgaagtacgtggaggatgtgacaaacgtggtcagacgggatgtggagaagtggggccccttcgatctggtgtacggcagcacccaacccctgggcagctcttgtgaccggtgccctggctggtacatgtttcagttccaccggatcctgcagtacgccctgccgagacaggagtcccagcggccattcttttggattttcatggacaacttgctgctgaccgaggatgaccaggaaactaccactcggttcctgcagaccgaagccgtgaccctgcaggacgtgagaggccgggactaccagaacgccatgcgggtgtggtccaacatccctggactgaaaagcaagcacgcacctctgacccctaaagaagaggagtacctgcaggcccaggtgcggagcagaagcaagctggacgcccctaaggtggatctgctggtgaagaattgcctcctgcccctgagagagtacttcaagtatttcagccagaatagtctgcccctgggaggcagcggcggcggcgccctggtgacatttgaggacgtcgccgtgcggttcacccaggaggaatgggctctgctggatccttctcagaaaatcctgtaccgggacgtgatgagagagacataccggaatctgacctccgtgggcatcaactgggaatgttgggaccttgaagcctgcttcagaagcctgggaagaaacctgagagtgcaggtggtgaagagaaagtgcgagctgaccaacagcggcccctgcgccgagggcggcccaagcagcggcgcccctcctcccagcggcggcagcccagccggctccccaacctctaccgaggagggcacctctgagtccgccacccccgagagcggccctggcacctccaccgagcccagcgagggcagcgcacccggcagccctgccggcagccccacctccacagaggagggaaccagcaccgagcccagcgaaggcagcgccccaggcaccagcaccgagcctagtgagcaggagattaaacggatcaacaagatcagaagaagacttgtgaaagacagcaacaccaagaaggccggcaagacaggccccatgaaaaccctgctggttagagtgatgacacccgatctgagagagcggctggaaaacctgagaaagaagcctgaaaatatcccccagcccatcagcaatacatctagagccaacctgaataagctgctgaccgattacaccgaaatgaagaaggcgatcctgcatgtgtactgggaagagttccagaaggaccctgtgggcctgatgagccgggtggcccagcctgccagcaagaagatcgatcagaacaagctgaaacctgagatggacgagaagggcaacctgaccaccgccggctttgcctgctctcagtgtggccagcccctgttcgtgtacaagctggagcaggtgtctgagaagggcaaggcttacaccaactacttcggacggtgcaatgtggccgagcacgaaaagctgatcctgctggcccagctgaagcccgagaaggatagcgacgaagccgtgacatatagcctgggaaagtttgggcagagggccctggatttctacagcattcatgtgaccaaggagtccacccaccccgtgaagcccctggcccagatcgccggaaacagatacgcctccggacctgtgggaaaggccctgagcgacgcatgtatgggcacaatcgcctccttcctgtctaagtaccaggacatcatcatcgaacaccagaaggtggtgaagggcaaccagaagagactggagagcctgcgggagctggccggcaaggaaaacctggaataccctagcgtgaccctgccacctcagcctcacaccaaggagggcgttgatgcctacaacgaagtgatcgcccgggtgcgaatgtgggtgaacctgaacctgtggcagaagctgaagctaagcagagatgatgccaagcctctgctgagactgaagggattcccttcctttcctctggtcgagagacaggccaacgaagtggactggtgggacatggtgtgtaacgtgaagaagctgatcaacgagaaaaaggaggatggcaaggtgttttggcagaatctggctggctacaagagacaggaagccctgagaccatacctgagcagcgaggaagatcggaagaagggaaagaaattcgctcggtaccagctgggcgacctgctgctgcacctggaaaagaagcacggcgaggactggggaaaggtgtacgacgaggcctgggagcggattgacaagaaagtggaaggcctgagcaagcacatcaagctggaagaggaacggagaagcgaggacgcccagagcaaggccgccctgaccgactggctgcgggctaaggccagcttcgtgatcgagggcctgaaggaggccgacaaggacgagttctgcagatgcgagctgaagctgcagaagtggtacggggacctgcggggaaagcccttcgccatcgaagccgagaacagcatcctggacatcagcggcttcagcaagcagtacaactgtgccttcatctggcagaaggacggcgtgaagaagctgaacctgtacctgatcatcaactacttcaagggcggcaagctgcggttcaagaagatcaaacctgaagccttcgaagccaacagattctacaccgtgatcaacaaaaagagcggcgagatcgtgcccatggaggtgaacttcaacttcgacgaccccaacctgatcatcctgcctctggcctttggcaagagacagggcagagaattcatctggaacgacctgctgtccctggaaaccggcagcctgaagctggccaacggaagagtgatcgagaagacactgtacaacagaagaacccggcaggatgagcctgccctgttcgtggccctgaccttcgagcggcgggaggtcctggactcctccaatatcaaaccaatgaacctgatcggcgtggcaagaggcgaaaacatccccgccgtgatcgccctgaccgaccccgagggctgcccactgagccggtttaaggatagcctgggaaacccaacccacatcctgagaatcggcgagagctataaggagaagcagcggaccatccaggccaagaaggaggtggagcagcggagagccggcggctacagccggaagtacgccagcaaagccaagaatctggcagacgatatggtgagaaacaccgctagagatctgctgtactacgccgtgacccaggatgccatgctgatcttcgccaacctgagccggggcttcggccggcagggcaagcggaccttcatggccgagagacagtacacacggatggaggactggctgaccgccaagctggcctacgagggcctgagcaagacctacctgtccaagacactggcccagtacacctccaagacatgcagcaactgtgggtttaccatcaccagcgccgactacgacagggtgctggagaagctgaagaagacagcaacaggctggatgaccacaattaacggcaaggagctgaaggtggagggccagattacctactacaacagatacaagagacagaacgtagtcaaggacctgtccgtcgagctggatagactgagcgaagaatctgtgaacaacgacatctcctcctggacaaagggcagaagcggagaagctctgagcctcctgaagaaaagattctcccatagacccgtgcaggagaagttcgtgtgcctgaactgcggcttcgagacacacgcagccgagcaagccgccctgaacatcgccagatcctggctgttcctgcggagccaggagtacaagaaataccagacaaacaagacaaccggcaacaccgataagagagccttcgtcgagacctggcagtccttttaccggaagaagcttaaggaggtgtggaaacctgccgtgcggtctggcggatctggcggaggctccgcccaggagctggtgaccttccaggacgtggccgtggacttcacccaggaggagtggggcctgctggaccacccccagaaggagctgtacaaggaggtgatgctggagaacgccaggaacgccctgagcctgggcctgcccgtgcccagggagggcctgatcagccacttcggccagagggaggccccctggatgatggagctggaggaccccaggaccagctaccccgtgagccagaagctgggcggcccaagcagcggcgcccctcctcccagcggcggcagcccagccggctccccaacctctaccgaggagggcacctctgagtccgccacccccgagagcggccctggcacctccaccgagcccagcgagggcagcgcacccggcagccctgccggcagccccacctccacagaggagggaaccagcaccgagcccagcgaaggcagcgccccaggcaccagcaccgagcctagtgagcaggagattaaacggatcaacaagatcagaagaagacttgtgaaagacagcaacaccaagaaggccggcaagacaggccccatgaaaaccctgctggttagagtgatgacacccgatctgagagagcggctggaaaacctgagaaagaagcctgaaaatatcccccagcccatcagcaatacatctagagccaacctgaataagctgctgaccgattacaccgaaatgaagaaggcgatcctgcatgtgtactgggaagagttccagaaggaccctgtgggcctgatgagccgggtggcccagcctgccagcaagaagatcgatcagaacaagctgaaacctgagatggacgagaagggcaacctgaccaccgccggctttgcctgctctcagtgtggccagcccctgttcgtgtacaagctggagcaggtgtctgagaagggcaaggcttacaccaactacttcggacggtgcaatgtggccgagcacgaaaagctgatcctgctggcccagctgaagcccgagaaggatagcgacgaagccgtgacatatagcctgggaaagtttgggcagagggccctggatttctacagcattcatgtgaccaaggagtccacccaccccgtgaagcccctggcccagatcgccggaaacagatacgcctccggacctgtgggaaaggccctgagcgacgcatgtatgggcacaatcgcctccttcctgtctaagtaccaggacatcatcatcgaacaccagaaggtggtgaagggcaaccagaagagactggagagcctgcgggagctggccggcaaggaaaacctggaataccctagcgtgaccctgccacctcagcctcacaccaaggagggcgttgatgcctacaacgaagtgatcgcccgggtgcgaatgtgggtgaacctgaacctgtggcagaagctgaagctaagcagagatgatgccaagcctctgctgagactgaagggattcccttcctttcctctggtcgagagacaggccaacgaagtggactggtgggacatggtgtgtaacgtgaagaagctgatcaacgagaaaaaggaggatggcaaggtgttttggcagaatctggctggctacaagagacaggaagccctgagaccatacctgagcagcgaggaagatcggaagaagggaaagaaattcgctcggtaccagctgggcgacctgctgctgcacctggaaaagaagcacggcgaggactggggaaaggtgtacgacgaggcctgggagcggattgacaagaaagtggaaggcctgagcaagcacatcaagctggaagaggaacggagaagcgaggacgcccagagcaaggccgccctgaccgactggctgcgggctaaggccagcttcgtgatcgagggcctgaaggaggccgacaaggacgagttctgcagatgcgagctgaagctgcagaagtggtacggggacctgcggggaaagcccttcgccatcgaagccgagaacagcatcctggacatcagcggcttcagcaagcagtacaactgtgccttcatctggcagaaggacggcgtgaagaagctgaacctgtacctgatcatcaactacttcaagggcggcaagctgcggttcaagaagatcaaacctgaagccttcgaagccaacagattctacaccgtgatcaacaaaaagagcggcgagatcgtgcccatggaggtgaacttcaacttcgacgaccccaacctgatcatcctgcctctggcctttggcaagagacagggcagagaattcatctggaacgacctgctgtccctggaaaccggcagcctgaagctggccaacggaagagtgatcgagaagacactgtacaacagaagaacccggcaggatgagcctgccctgttcgtggccctgaccttcgagcggcgggaggtcctggactcctccaatatcaaaccaatgaacctgatcggcgtggcaagaggcgaaaacatccccgccgtgatcgccctgaccgaccccgagggctgcccactgagccggtttaaggatagcctgggaaacccaacccacatcctgagaatcggcgagagctataaggagaagcagcggaccatccaggccaagaaggaggtggagcagcggagagccggcggctacagccggaagtacgccagcaaagccaagaatctggcagacgatatggtgagaaacaccgctagagatctgctgtactacgccgtgacccaggatgccatgctgatcttcgccaacctgagccggggcttcggccggcagggcaagcggaccttcatggccgagagacagtacacacggatggaggactggctgaccgccaagctggcctacgagggcctgagcaagacctacctgtccaagacactggcccagtacacctccaagacatgcagcaactgtgggtttaccatcaccagcgccgactacgacagggtgctggagaagctgaagaagacagcaacaggctggatgaccacaattaacggcaaggagctgaaggtggagggccagattacctactacaacagatacaagagacagaacgtagtcaaggacctgtccgtcgagctggatagactgagcgaagaatctgtgaacaacgacatctcctcctggacaaagggcagaagcggagaagctctgagcctcctgaagaaaagattctcccatagacccgtgcaggagaagttcgtgtgcctgaactgcggcttcgagacacacgcagccgagcaagccgccctgaacatcgccagatcctggctgttcctgcggagccaggagtacaagaaataccagacaaacaagacaaccggcaacaccgataagagagccttcgtcgagacctggcagtccttttaccggaagaagcttaaggaggtgtggaaacctgccgtgcggtctggcggatctggcggaggctcctgcccaggagctggtgaccttccaggacgtggccgtggacttcacccaggaggagtggggcctgctggaccacccccagaaggagctgtacaaggaggtgatgctggagaacgccaggaacgccctgagcctgggcctgcccgtgcccagggagggcctgatcagccacttcggccagagggaggccccctggatgatggagctggaggaccccaggaccagctaccccgtgagccagaagctgggatctggctccggcagcggccccaagaaaaagagaaaagtctaagctgccttctgcggggcttgccttctggccatgcccttcttctctcccttgcacctgtacctcttggtctttgaataaagcctgagtaggaaggctagcaaaaaaaaaaaaaaaaaaaaaaaaaaaaaaaaaaaaaaaaaaaaaaaaaaaaaaaaaaaaaaaaaaaaaaaaaaaaaaaa

SEQ ID NO: 16372 - RNA, 9485 nt, synthetic construct
  source 1..9485: mol_type = other RNA
aggaaataagagagaaaagaagagtaagaagaaatataagagccaccatggcccctaagaagaagcgtaaagtgagccggatggaacgcctcgtctacgaggtgcggcagaagtgcagaaacatcgaggacatctgcatctcctgcggatctctgaacgtgaccctggagcacccactgttcatcggcggcatgtgccagaactgtaaaaactgttttctggagtgtgcctatcaatacgacgatgacggctaccagagctactgcaccatctgttgcggcggaagagaggtgctgatgtgtggaaataacaactgctgccggtgcttctgcgtggaatgcgtggacctgctggtgggccccggcgccgcccaggccgctattaaggaagatccttggaactgctacatgtgcggccacaagggcacatacggcctgctgagacggagagaggactggcctagcagactgcagatgttcttcgccaataaccacgaccaggagttcgacccccctaaggtgtaccctcccgtccccgccgagaagagaaagcccatccgggtcctgagcctgttcgatggcatcgccaccggtctgctggtgctgaaggacctgggcatccaggtggataggtacattgcctccgaggtgtgcgaggactccatcaccgtgggaatggtgcgtcatcagggcaagatcatgtacgtgggcgacgtgcggagcgtgacacagaagcatatccaggagtggggccctttcgacctggtgatcggcggcagcccttgcaatgacctgagcatcgtgaacccagcccggaagggcctgtacgagggaaccggcagactgttcttcgagttttacagactgctgcacgacgcccggcctaaggaaggcgacgaccggcccttcttttggctgttcgagaatgtggtggccatgggagtcagcgacaagcgggatattagccggttcctggagagcaaccccgtgatgatcgatgccaaggaagtgagcgccgcccaccgggccagatacttctggggcaatctgcctggcatgaacagacccctggccagcaccgtgaacgacaagctggagctgcaggagtgcctggagcacggccggatcgccaagttcagcaaggtgagaaccatcaccacccgaagcaacagcatcaaacaaggcaaggaccagcactttcctgtgttcatgaacgagaaggaggacatcctgtggtgtaccgagatggagagagtgttcgggttcccagtccactacacagatgtcagcaacatgtctagactggccagacagagactgctgggaagaagctggtccgtccctgtgatcagacacctgttcgcccctctgaaggagtacttcgcctgcgtgagcagcggcaacagcaacgccaacagccggggccccagcttctctagcggcctggtgccactgtccctgagagggagccacatgggccccatggagatctacaaaaccgtgagcgcctggaagcggcagcctgtgcgcgtgctgagcctgtttcggaatatcgataaagtcctgaaaagcctgggattcctggagagcggctctggctccggcggtggcaccctgaagtacgtggaggatgtgacaaacgtggtcagacgggatgtggagaagtggggccccttcgatctggtgtacggcagcacccaacccctgggcagctcttgtgaccggtgccctggctggtacatgtttcagttccaccggatcctgcagtacgccctgccgagacaggagtcccagcggccattcttttggattttcatggacaacttgctgctgaccgaggatgaccaggaaactaccactcggttcctgcagaccgaagccgtgaccctgcaggacgtgagaggccgggactaccagaacgccatgcgggtgtggtccaacatccctggactgaaaagcaagcacgcacctctgacccctaaagaagaggagtacctgcaggcccaggtgcggagcagaagcaagctggacgcccctaaggtggatctgctggtgaagaattgcctcctgcccctgagagagtacttcaagtatttcagccagaatagtctgcccctgggaggcagcggcggcggcgccctggtgacatttgaggacgtcgccgtgcggttcacccaggaggaatgggctctgctggatccttctcagaaaatcctgtaccgggacgtgatgagagagacataccggaatctgacctccgtgggcatcaactgggaatgttgggaccttgaagcctgcttcagaagcctgggaagaaacctgagagtgcaggtggtgaagagaaagtgcgagctgaccaacagcggcccctgcgccgagggcggcccaagcagcggcgcccctcctcccagcggcggcagcccagccggctccccaacctctaccgaggagggcacctctgagtccgccacccccgagagcggccctggcacctccaccgagcccagcgagggcagcgcacccggcagccctgccggcagccccacctccacagaggagggaaccagcaccgagcccagcgaaggcagcgccccaggcaccagcaccgagcctagtgagcaggagattaaacggatcaacaagatcagaagaagacttgtgaaagacagcaacaccaagaaggccggcaagacaggccccatgaaaaccctgctggttagagtgatgacacccgatctgagagagcggctggaaaacctgagaaagaagcctgaaaatatcccccagcccatcagcaatacatctagagccaacctgaataagctgctgaccgattacaccgaaatgaagaaggcgatcctgcatgtgtactgggaagagttccagaaggaccctgtgggcctgatgagccgggtggcccagcctgccagcaagaagatcgatcagaacaagctgaaacctgagatggacgagaagggcaacctgaccaccgccggctttgcctgctctcagtgtggccagcccctgttcgtgtacaagctggagcaggtgtctgagaagggcaaggcttacaccaactacttcggacggtgcaatgtggccgagcacgaaaagctgatcctgctggcccagctgaagcccgagaaggatagcgacgaagccgtgacatatagcctgggaaagtttgggcagagggccctggatttctacagcattcatgtgaccaaggagtccacccaccccgtgaagcccctggcccagatcgccggaaacagatacgcctccggacctgtgggaaaggccctgagcgacgcatgtatgggcacaatcgcctccttcctgtctaagtaccaggacatcatcatcgaacaccagaaggtggtgaagggcaaccagaagagactggagagcctgcgggagctggccggcaaggaaaacctggaataccctagcgtgaccctgccacctcagcctcacaccaaggagggcgttgatgcctacaacgaagtgatcgcccgggtgcgaatgtgggtgaacctgaacctgtggcagaagctgaagctaagcagagatgatgccaagcctctgctgagactgaagggattcccttcctttcctctggtcgagagacaggccaacgaagtggactggtgggacatggtgtgtaacgtgaagaagctgatcaacgagaaaaaggaggatggcaaggtgttttggcagaatctggctggctacaagagacaggaagccctgagaccatacctgagcagcgaggaagatcggaagaagggaaagaaattcgctcggtaccagctgggcgacctgctgctgcacctggaaaagaagcacggcgaggactggggaaaggtgtacgacgaggcctgggagcggattgacaagaaagtggaaggcctgagcaagcacatcaagctggaagaggaacggagaagcgaggacgcccagagcaaggccgccctgaccgactggctgcgggctaaggccagcttcgtgatcgagggcctgaaggaggccgacaaggacgagttctgcagatgcgagctgaagctgcagaagtggtacggggacctgcggggaaagcccttcgccatcgaagccgagaacagcatcctggacatcagcggcttcagcaagcagtacaactgtgccttcatctggcagaaggacggcgtgaagaagctgaacctgtacctgatcatcaactacttcaagggcggcaagctgcggttcaagaagatcaaacctgaagccttcgaagccaacagattctacaccgtgatcaacaaaaagagcggcgagatcgtgcccatggaggtgaacttcaacttcgacgaccccaacctgatcatcctgcctctggcctttggcaagagacagggcagagaattcatctggaacgacctgctgtccctggaaaccggcagcctgaagctggccaacggaagagtgatcgagaagacactgtacaacagaagaacccggcaggatgagcctgccctgttcgtggccctgaccttcgagcggcgggaggtcctggactcctccaatatcaaaccaatgaacctgatcggcgtggcaagaggcgaaaacatccccgccgtgatcgccctgaccgaccccgagggctgcccactgagccggtttaaggatagcctgggaaacccaacccacatcctgagaatcggcgagagctataaggagaagcagcggaccatccaggccaagaaggaggtggagcagcggagagccggcggctacagccggaagtacgccagcaaagccaagaatctggcagacgatatggtgagaaacaccgctagagatctgctgtactacgccgtgacccaggatgccatgctgatcttcgccaacctgagccggggcttcggccggcagggcaagcggaccttcatggccgagagacagtacacacggatggaggactggctgaccgccaagctggcctacgagggcctgagcaagacctacctgtccaagacactggcccagtacacctccaagacatgcagcaactgtgggtttaccatcaccagcgccgactacgacagggtgctggagaagctgaagaagacagcaacaggctggatgaccacaattaacggcaaggagctgaaggtggagggccagattacctactacaacagatacaagagacagaacgtagtcaaggacctgtccgtcgagctggatagactgagcgaagaatctgtgaacaacgacatctcctcctggacaaagggcagaagcggagaagctctgagcctcctgaagaaaagattctcccatagacccgtgcaggagaagttcgtgtgcctgaactgcggcttcgagacacacgcagccgagcaagccgccctgaacatcgccagatcctggctgttcctgcggagccaggagtacaagaaataccagacaaacaagacaaccggcaacaccgataagagagccttcgtcgagacctggcagtccttttaccggaagaagcttaaggaggtgtggaaacctgccgtgcggtctggcggatctggcggaggctccagccaggagcccgtgaccttcgccgacgtggccgtggtgttcacccccgaggagtgggtgttcctggacagcacccagaggagcctgtacagggacgtgatgctggagaactacaggaacctggccagcgtggccggcgaccagctgtgcaagcccaacgccctgagctacctggagcagaggggcgagcagtggaccaccgagaggggcgtgatcagcgacacctgccccgagccccagctgggcggcccaagcagcggcgcccctcctcccagcggcggcagcccagccggctccccaacctctaccgaggagggcacctctgagtccgccacccccgagagcggccctggcacctccaccgagcccagcgagggcagcgcacccggcagccctgccggcagccccacctccacagaggagggaaccagcaccgagcccagcgaaggcagcgccccaggcaccagcaccgagcctagtgagcaggagattaaacggatcaacaagatcagaagaagacttgtgaaagacagcaacaccaagaaggccggcaagacaggccccatgaaaaccctgctggttagagtgatgacacccgatctgagagagcggctggaaaacctgagaaagaagcctgaaaatatcccccagcccatcagcaatacatctagagccaacctgaataagctgctgaccgattacaccgaaatgaagaaggcgatcctgcatgtgtactgggaagagttccagaaggaccctgtgggcctgatgagccgggtggcccagcctgccagcaagaagatcgatcagaacaagctgaaacctgagatggacgagaagggcaacctgaccaccgccggctttgcctgctctcagtgtggccagcccctgttcgtgtacaagctggagcaggtgtctgagaagggcaaggcttacaccaactacttcggacggtgcaatgtggccgagcacgaaaagctgatcctgctggcccagctgaagcccgagaaggatagcgacgaagccgtgacatatagcctgggaaagtttgggcagagggccctggatttctacagcattcatgtgaccaaggagtccacccaccccgtgaagcccctggcccagatcgccggaaacagatacgcctccggacctgtgggaaaggccctgagcgacgcatgtatgggcacaatcgcctccttcctgtctaagtaccaggacatcatcatcgaacaccagaaggtggtgaagggcaaccagaagagactggagagcctgcgggagctggccggcaaggaaaacctggaataccctagcgtgaccctgccacctcagcctcacaccaaggagggcgttgatgcctacaacgaagtgatcgcccgggtgcgaatgtgggtgaacctgaacctgtggcagaagctgaagctaagcagagatgatgccaagcctctgctgagactgaagggattcccttcctttcctctggtcgagagacaggccaacgaagtggactggtgggacatggtgtgtaacgtgaagaagctgatcaacgagaaaaaggaggatggcaaggtgttttggcagaatctggctggctacaagagacaggaagccctgagaccatacctgagcagcgaggaagatcggaagaagggaaagaaattcgctcggtaccagctgggcgacctgctgctgcacctggaaaagaagcacggcgaggactggggaaaggtgtacgacgaggcctgggagcggattgacaagaaagtggaaggcctgagcaagcacatcaagctggaagaggaacggagaagcgaggacgcccagagcaaggccgccctgaccgactggctgcgggctaaggccagcttcgtgatcgagggcctgaaggaggccgacaaggacgagttctgcagatgcgagctgaagctgcagaagtggtacggggacctgcggggaaagcccttcgccatcgaagccgagaacagcatcctggacatcagcggcttcagcaagcagtacaactgtgccttcatctggcagaaggacggcgtgaagaagctgaacctgtacctgatcatcaactacttcaagggcggcaagctgcggttcaagaagatcaaacctgaagccttcgaagccaacagattctacaccgtgatcaacaaaaagagcggcgagatcgtgcccatggaggtgaacttcaacttcgacgaccccaacctgatcatcctgcctctggcctttggcaagagacagggcagagaattcatctggaacgacctgctgtccctggaaaccggcagcctgaagctggccaacggaagagtgatcgagaagacactgtacaacagaagaacccggcaggatgagcctgccctgttcgtggccctgaccttcgagcggcgggaggtcctggactcctccaatatcaaaccaatgaacctgatcggcgtggcaagaggcgaaaacatccccgccgtgatcgccctgaccgaccccgagggctgcccactgagccggtttaaggatagcctgggaaacccaacccacatcctgagaatcggcgagagctataaggagaagcagcggaccatccaggccaagaaggaggtggagcagcggagagccggcggctacagccggaagtacgccagcaaagccaagaatctggcagacgatatggtgagaaacaccgctagagatctgctgtactacgccgtgacccaggatgccatgctgatcttcgccaacctgagccggggcttcggccggcagggcaagcggaccttcatggccgagagacagtacacacggatggaggactggctgaccgccaagctggcctacgagggcctgagcaagacctacctgtccaagacactggcccagtacacctccaagacatgcagcaactgtgggtttaccatcaccagcgccgactacgacagggtgctggagaagctgaagaagacagcaacaggctggatgaccacaattaacggcaaggagctgaaggtggagggccagattacctactacaacagatacaagagacagaacgtagtcaaggacctgtccgtcgagctggatagactgagcgaagaatctgtgaacaacgacatctcctcctggacaaagggcagaagcggagaagctctgagcctcctgaagaaaagattctcccatagacccgtgcaggagaagttcgtgtgcctgaactgcggcttcgagacacacgcagccgagcaagccgccctgaacatcgccagatcctggctgttcctgcggagccaggagtacaagaaataccagacaaacaagacaaccggcaacaccgataagagagccttcgtcgagacctggcagtccttttaccggaagaagcttaaggaggtgtggaaacctgccgtgcggtctggcggatctggcggaggctcctagccaggagcccgtgaccttcgccgacgtggccgtggtgttcacccccgaggagtgggtgttcctggacagcacccagaggagcctgtacagggacgtgatgctggagaactacaggaacctggccagcgtggccggcgaccagctgtgcaagcccaacgccctgagctacctggagcagaggggcgagcagtggaccaccgagaggggcgtgatcagcgacacctgccccgagccccagctgggatctggctccggcagcggccccaagaaaaagagaaaagtctaagctgccttctgcggggcttgccttctggccatgcccttcttctctcccttgcacctgtacctcttggtctttgaataaagcctgagtaggaaggctagcaaaaaaaaaaaaaaaaaaaaaaaaaaaaaaaaaaaaaaaaaaaaaaaaaaaaaaaaaaaaaaaaaaaaaaaaaaaaaaaa

SEQ ID NO: 16373 - RNA, 9485 nt, synthetic construct
  source 1..9485: mol_type = other RNA
aggaaataagagagaaaagaagagtaagaagaaatataagagccaccatggcccctaagaagaagcgtaaagtgagccggatggaacgcctcgtctacgaggtgcggcagaagtgcagaaacatcgaggacatctgcatctcctgcggatctctgaacgtgaccctggagcacccactgttcatcggcggcatgtgccagaactgtaaaaactgttttctggagtgtgcctatcaatacgacgatgacggctaccagagctactgcaccatctgttgcggcggaagagaggtgctgatgtgtggaaataacaactgctgccggtgcttctgcgtggaatgcgtggacctgctggtgggccccggcgccgcccaggccgctattaaggaagatccttggaactgctacatgtgcggccacaagggcacatacggcctgctgagacggagagaggactggcctagcagactgcagatgttcttcgccaataaccacgaccaggagttcgacccccctaaggtgtaccctcccgtccccgccgagaagagaaagcccatccgggtcctgagcctgttcgatggcatcgccaccggtctgctggtgctgaaggacctgggcatccaggtggataggtacattgcctccgaggtgtgcgaggactccatcaccgtgggaatggtgcgtcatcagggcaagatcatgtacgtgggcgacgtgcggagcgtgacacagaagcatatccaggagtggggccctttcgacctggtgatcggcggcagcccttgcaatgacctgagcatcgtgaacccagcccggaagggcctgtacgagggaaccggcagactgttcttcgagttttacagactgctgcacgacgcccggcctaaggaaggcgacgaccggcccttcttttggctgttcgagaatgtggtggccatgggagtcagcgacaagcgggatattagccggttcctggagagcaaccccgtgatgatcgatgccaaggaagtgagcgccgcccaccgggccagatacttctggggcaatctgcctggcatgaacagacccctggccagcaccgtgaacgacaagctggagctgcaggagtgcctggagcacggccggatcgccaagttcagcaaggtgagaaccatcaccacccgaagcaacagcatcaaacaaggcaaggaccagcactttcctgtgttcatgaacgagaaggaggacatcctgtggtgtaccgagatggagagagtgttcgggttcccagtccactacacagatgtcagcaacatgtctagactggccagacagagactgctgggaagaagctggtccgtccctgtgatcagacacctgttcgcccctctgaaggagtacttcgcctgcgtgagcagcggcaacagcaacgccaacagccggggccccagcttctctagcggcctggtgccactgtccctgagagggagccacatgggccccatggagatctacaaaaccgtgagcgcctggaagcggcagcctgtgcgcgtgctgagcctgtttcggaatatcgataaagtcctgaaaagcctgggattcctggagagcggctctggctccggcggtggcaccctgaagtacgtggaggatgtgacaaacgtggtcagacgggatgtggagaagtggggccccttcgatctggtgtacggcagcacccaacccctgggcagctcttgtgaccggtgccctggctggtacatgtttcagttccaccggatcctgcagtacgccctgccgagacaggagtcccagcggccattcttttggattttcatggacaacttgctgctgaccgaggatgaccaggaaactaccactcggttcctgcagaccgaagccgtgaccctgcaggacgtgagaggccgggactaccagaacgccatgcgggtgtggtccaacatccctggactgaaaagcaagcacgcacctctgacccctaaagaagaggagtacctgcaggcccaggtgcggagcagaagcaagctggacgcccctaaggtggatctgctggtgaagaattgcctcctgcccctgagagagtacttcaagtatttcagccagaatagtctgcccctgggaggcagcggcggcggcgccctggtgacatttgaggacgtcgccgtgcggttcacccaggaggaatgggctctgctggatccttctcagaaaatcctgtaccgggacgtgatgagagagacataccggaatctgacctccgtgggcatcaactgggaatgttgggaccttgaagcctgcttcagaagcctgggaagaaacctgagagtgcaggtggtgaagagaaagtgcgagctgaccaacagcggcccctgcgccgagggcggcccaagcagcggcgcccctcctcccagcggcggcagcccagccggctccccaacctctaccgaggagggcacctctgagtccgccacccccgagagcggccctggcacctccaccgagcccagcgagggcagcgcacccggcagccctgccggcagccccacctccacagaggagggaaccagcaccgagcccagcgaaggcagcgccccaggcaccagcaccgagcctagtgagcaggagattaaacggatcaacaagatcagaagaagacttgtgaaagacagcaacaccaagaaggccggcaagacaggccccatgaaaaccctgctggttagagtgatgacacccgatctgagagagcggctggaaaacctgagaaagaagcctgaaaatatcccccagcccatcagcaatacatctagagccaacctgaataagctgctgaccgattacaccgaaatgaagaaggcgatcctgcatgtgtactgggaagagttccagaaggaccctgtgggcctgatgagccgggtggcccagcctgccagcaagaagatcgatcagaacaagctgaaacctgagatggacgagaagggcaacctgaccaccgccggctttgcctgctctcagtgtggccagcccctgttcgtgtacaagctggagcaggtgtctgagaagggcaaggcttacaccaactacttcggacggtgcaatgtggccgagcacgaaaagctgatcctgctggcccagctgaagcccgagaaggatagcgacgaagccgtgacatatagcctgggaaagtttgggcagagggccctggatttctacagcattcatgtgaccaaggagtccacccaccccgtgaagcccctggcccagatcgccggaaacagatacgcctccggacctgtgggaaaggccctgagcgacgcatgtatgggcacaatcgcctccttcctgtctaagtaccaggacatcatcatcgaacaccagaaggtggtgaagggcaaccagaagagactggagagcctgcgggagctggccggcaaggaaaacctggaataccctagcgtgaccctgccacctcagcctcacaccaaggagggcgttgatgcctacaacgaagtgatcgcccgggtgcgaatgtgggtgaacctgaacctgtggcagaagctgaagctaagcagagatgatgccaagcctctgctgagactgaagggattcccttcctttcctctggtcgagagacaggccaacgaagtggactggtgggacatggtgtgtaacgtgaagaagctgatcaacgagaaaaaggaggatggcaaggtgttttggcagaatctggctggctacaagagacaggaagccctgagaccatacctgagcagcgaggaagatcggaagaagggaaagaaattcgctcggtaccagctgggcgacctgctgctgcacctggaaaagaagcacggcgaggactggggaaaggtgtacgacgaggcctgggagcggattgacaagaaagtggaaggcctgagcaagcacatcaagctggaagaggaacggagaagcgaggacgcccagagcaaggccgccctgaccgactggctgcgggctaaggccagcttcgtgatcgagggcctgaaggaggccgacaaggacgagttctgcagatgcgagctgaagctgcagaagtggtacggggacctgcggggaaagcccttcgccatcgaagccgagaacagcatcctggacatcagcggcttcagcaagcagtacaactgtgccttcatctggcagaaggacggcgtgaagaagctgaacctgtacctgatcatcaactacttcaagggcggcaagctgcggttcaagaagatcaaacctgaagccttcgaagccaacagattctacaccgtgatcaacaaaaagagcggcgagatcgtgcccatggaggtgaacttcaacttcgacgaccccaacctgatcatcctgcctctggcctttggcaagagacagggcagagaattcatctggaacgacctgctgtccctggaaaccggcagcctgaagctggccaacggaagagtgatcgagaagacactgtacaacagaagaacccggcaggatgagcctgccctgttcgtggccctgaccttcgagcggcgggaggtcctggactcctccaatatcaaaccaatgaacctgatcggcgtggcaagaggcgaaaacatccccgccgtgatcgccctgaccgaccccgagggctgcccactgagccggtttaaggatagcctgggaaacccaacccacatcctgagaatcggcgagagctataaggagaagcagcggaccatccaggccaagaaggaggtggagcagcggagagccggcggctacagccggaagtacgccagcaaagccaagaatctggcagacgatatggtgagaaacaccgctagagatctgctgtactacgccgtgacccaggatgccatgctgatcttcgccaacctgagccggggcttcggccggcagggcaagcggaccttcatggccgagagacagtacacacggatggaggactggctgaccgccaagctggcctacgagggcctgagcaagacctacctgtccaagacactggcccagtacacctccaagacatgcagcaactgtgggtttaccatcaccagcgccgactacgacagggtgctggagaagctgaagaagacagcaacaggctggatgaccacaattaacggcaaggagctgaaggtggagggccagattacctactacaacagatacaagagacagaacgtagtcaaggacctgtccgtcgagctggatagactgagcgaagaatctgtgaacaacgacatctcctcctggacaaagggcagaagcggagaagctctgagcctcctgaagaaaagattctcccatagacccgtgcaggagaagttcgtgtgcctgaactgcggcttcgagacacacgcagccgagcaagccgccctgaacatcgccagatcctggctgttcctgcggagccaggagtacaagaaataccagacaaacaagacaaccggcaacaccgataagagagccttcgtcgagacctggcagtccttttaccggaagaagcttaaggaggtgtggaaacctgccgtgcggtctggcggatctggcggaggctccttcgaggagctggtgaccttcgaggacgtgttcgtggacttcagccccgaggagctgagcagcctgagcgccccccagaggaacctgtacagggaggtgatgctggagaactacaggaacctggtgttcctgggctaccagttcagcaagcccgacatcatcagcaggctggaggtggaggagagccacgccatggagaccgacagcaggcacaccgtgatctgccagggcgaggcccacgacggcggcccaagcagcggcgcccctcctcccagcggcggcagcccagccggctccccaacctctaccgaggagggcacctctgagtccgccacccccgagagcggccctggcacctccaccgagcccagcgagggcagcgcacccggcagccctgccggcagccccacctccacagaggagggaaccagcaccgagcccagcgaaggcagcgccccaggcaccagcaccgagcctagtgagcaggagattaaacggatcaacaagatcagaagaagacttgtgaaagacagcaacaccaagaaggccggcaagacaggccccatgaaaaccctgctggttagagtgatgacacccgatctgagagagcggctggaaaacctgagaaagaagcctgaaaatatcccccagcccatcagcaatacatctagagccaacctgaataagctgctgaccgattacaccgaaatgaagaaggcgatcctgcatgtgtactgggaagagttccagaaggaccctgtgggcctgatgagccgggtggcccagcctgccagcaagaagatcgatcagaacaagctgaaacctgagatggacgagaagggcaacctgaccaccgccggctttgcctgctctcagtgtggccagcccctgttcgtgtacaagctggagcaggtgtctgagaagggcaaggcttacaccaactacttcggacggtgcaatgtggccgagcacgaaaagctgatcctgctggcccagctgaagcccgagaaggatagcgacgaagccgtgacatatagcctgggaaagtttgggcagagggccctggatttctacagcattcatgtgaccaaggagtccacccaccccgtgaagcccctggcccagatcgccggaaacagatacgcctccggacctgtgggaaaggccctgagcgacgcatgtatgggcacaatcgcctccttcctgtctaagtaccaggacatcatcatcgaacaccagaaggtggtgaagggcaaccagaagagactggagagcctgcgggagctggccggcaaggaaaacctggaataccctagcgtgaccctgccacctcagcctcacaccaaggagggcgttgatgcctacaacgaagtgatcgcccgggtgcgaatgtgggtgaacctgaacctgtggcagaagctgaagctaagcagagatgatgccaagcctctgctgagactgaagggattcccttcctttcctctggtcgagagacaggccaacgaagtggactggtgggacatggtgtgtaacgtgaagaagctgatcaacgagaaaaaggaggatggcaaggtgttttggcagaatctggctggctacaagagacaggaagccctgagaccatacctgagcagcgaggaagatcggaagaagggaaagaaattcgctcggtaccagctgggcgacctgctgctgcacctggaaaagaagcacggcgaggactggggaaaggtgtacgacgaggcctgggagcggattgacaagaaagtggaaggcctgagcaagcacatcaagctggaagaggaacggagaagcgaggacgcccagagcaaggccgccctgaccgactggctgcgggctaaggccagcttcgtgatcgagggcctgaaggaggccgacaaggacgagttctgcagatgcgagctgaagctgcagaagtggtacggggacctgcggggaaagcccttcgccatcgaagccgagaacagcatcctggacatcagcggcttcagcaagcagtacaactgtgccttcatctggcagaaggacggcgtgaagaagctgaacctgtacctgatcatcaactacttcaagggcggcaagctgcggttcaagaagatcaaacctgaagccttcgaagccaacagattctacaccgtgatcaacaaaaagagcggcgagatcgtgcccatggaggtgaacttcaacttcgacgaccccaacctgatcatcctgcctctggcctttggcaagagacagggcagagaattcatctggaacgacctgctgtccctggaaaccggcagcctgaagctggccaacggaagagtgatcgagaagacactgtacaacagaagaacccggcaggatgagcctgccctgttcgtggccctgaccttcgagcggcgggaggtcctggactcctccaatatcaaaccaatgaacctgatcggcgtggcaagaggcgaaaacatccccgccgtgatcgccctgaccgaccccgagggctgcccactgagccggtttaaggatagcctgggaaacccaacccacatcctgagaatcggcgagagctataaggagaagcagcggaccatccaggccaagaaggaggtggagcagcggagagccggcggctacagccggaagtacgccagcaaagccaagaatctggcagacgatatggtgagaaacaccgctagagatctgctgtactacgccgtgacccaggatgccatgctgatcttcgccaacctgagccggggcttcggccggcagggcaagcggaccttcatggccgagagacagtacacacggatggaggactggctgaccgccaagctggcctacgagggcctgagcaagacctacctgtccaagacactggcccagtacacctccaagacatgcagcaactgtgggtttaccatcaccagcgccgactacgacagggtgctggagaagctgaagaagacagcaacaggctggatgaccacaattaacggcaaggagctgaaggtggagggccagattacctactacaacagatacaagagacagaacgtagtcaaggacctgtccgtcgagctggatagactgagcgaagaatctgtgaacaacgacatctcctcctggacaaagggcagaagcggagaagctctgagcctcctgaagaaaagattctcccatagacccgtgcaggagaagttcgtgtgcctgaactgcggcttcgagacacacgcagccgagcaagccgccctgaacatcgccagatcctggctgttcctgcggagccaggagtacaagaaataccagacaaacaagacaaccggcaacaccgataagagagccttcgtcgagacctggcagtccttttaccggaagaagcttaaggaggtgtggaaacctgccgtgcggtctggcggatctggcggaggctcctttcgaggagctggtgaccttcgaggacgtgttcgtggacttcagccccgaggagctgagcagcctgagcgccccccagaggaacctgtacagggaggtgatgctggagaactacaggaacctggtgttcctgggctaccagttcagcaagcccgacatcatcagcaggctggaggtggaggagagccacgccatggagaccgacagcaggcacaccgtgatctgccagggcgaggcccacgacggatctggctccggcagcggccccaagaaaaagagaaaagtctaagctgccttctgcggggcttgccttctggccatgcccttcttctctcccttgcacctgtacctcttggtctttgaataaagcctgagtaggaaggctagcaaaaaaaaaaaaaaaaaaaaaaaaaaaaaaaaaaaaaaaaaaaaaaaaaaaaaaaaaaaaaaaaaaaaaaaaaaaaaaaa

SEQ ID NO: 16374 - RNA, 9485 nt, synthetic construct
  source 1..9485: mol_type = other RNA
aggaaataagagagaaaagaagagtaagaagaaatataagagccaccatggcccctaagaagaagcgtaaagtgagccggatggaacgcctcgtctacgaggtgcggcagaagtgcagaaacatcgaggacatctgcatctcctgcggatctctgaacgtgaccctggagcacccactgttcatcggcggcatgtgccagaactgtaaaaactgttttctggagtgtgcctatcaatacgacgatgacggctaccagagctactgcaccatctgttgcggcggaagagaggtgctgatgtgtggaaataacaactgctgccggtgcttctgcgtggaatgcgtggacctgctggtgggccccggcgccgcccaggccgctattaaggaagatccttggaactgctacatgtgcggccacaagggcacatacggcctgctgagacggagagaggactggcctagcagactgcagatgttcttcgccaataaccacgaccaggagttcgacccccctaaggtgtaccctcccgtccccgccgagaagagaaagcccatccgggtcctgagcctgttcgatggcatcgccaccggtctgctggtgctgaaggacctgggcatccaggtggataggtacattgcctccgaggtgtgcgaggactccatcaccgtgggaatggtgcgtcatcagggcaagatcatgtacgtgggcgacgtgcggagcgtgacacagaagcatatccaggagtggggccctttcgacctggtgatcggcggcagcccttgcaatgacctgagcatcgtgaacccagcccggaagggcctgtacgagggaaccggcagactgttcttcgagttttacagactgctgcacgacgcccggcctaaggaaggcgacgaccggcccttcttttggctgttcgagaatgtggtggccatgggagtcagcgacaagcgggatattagccggttcctggagagcaaccccgtgatgatcgatgccaaggaagtgagcgccgcccaccgggccagatacttctggggcaatctgcctggcatgaacagacccctggccagcaccgtgaacgacaagctggagctgcaggagtgcctggagcacggccggatcgccaagttcagcaaggtgagaaccatcaccacccgaagcaacagcatcaaacaaggcaaggaccagcactttcctgtgttcatgaacgagaaggaggacatcctgtggtgtaccgagatggagagagtgttcgggttcccagtccactacacagatgtcagcaacatgtctagactggccagacagagactgctgggaagaagctggtccgtccctgtgatcagacacctgttcgcccctctgaaggagtacttcgcctgcgtgagcagcggcaacagcaacgccaacagccggggccccagcttctctagcggcctggtgccactgtccctgagagggagccacatgggccccatggagatctacaaaaccgtgagcgcctggaagcggcagcctgtgcgcgtgctgagcctgtttcggaatatcgataaagtcctgaaaagcctgggattcctggagagcggctctggctccggcggtggcaccctgaagtacgtggaggatgtgacaaacgtggtcagacgggatgtggagaagtggggccccttcgatctggtgtacggcagcacccaacccctgggcagctcttgtgaccggtgccctggctggtacatgtttcagttccaccggatcctgcagtacgccctgccgagacaggagtcccagcggccattcttttggattttcatggacaacttgctgctgaccgaggatgaccaggaaactaccactcggttcctgcagaccgaagccgtgaccctgcaggacgtgagaggccgggactaccagaacgccatgcgggtgtggtccaacatccctggactgaaaagcaagcacgcacctctgacccctaaagaagaggagtacctgcaggcccaggtgcggagcagaagcaagctggacgcccctaaggtggatctgctggtgaagaattgcctcctgcccctgagagagtacttcaagtatttcagccagaatagtctgcccctgggaggcagcggcggcggcgccctggtgacatttgaggacgtcgccgtgcggttcacccaggaggaatgggctctgctggatccttctcagaaaatcctgtaccgggacgtgatgagagagacataccggaatctgacctccgtgggcatcaactgggaatgttgggaccttgaagcctgcttcagaagcctgggaagaaacctgagagtgcaggtggtgaagagaaagtgcgagctgaccaacagcggcccctgcgccgagggcggcccaagcagcggcgcccctcctcccagcggcggcagcccagccggctccccaacctctaccgaggagggcacctctgagtccgccacccccgagagcggccctggcacctccaccgagcccagcgagggcagcgcacccggcagccctgccggcagccccacctccacagaggagggaaccagcaccgagcccagcgaaggcagcgccccaggcaccagcaccgagcctagtgagcaggagattaaacggatcaacaagatcagaagaagacttgtgaaagacagcaacaccaagaaggccggcaagacaggccccatgaaaaccctgctggttagagtgatgacacccgatctgagagagcggctggaaaacctgagaaagaagcctgaaaatatcccccagcccatcagcaatacatctagagccaacctgaataagctgctgaccgattacaccgaaatgaagaaggcgatcctgcatgtgtactgggaagagttccagaaggaccctgtgggcctgatgagccgggtggcccagcctgccagcaagaagatcgatcagaacaagctgaaacctgagatggacgagaagggcaacctgaccaccgccggctttgcctgctctcagtgtggccagcccctgttcgtgtacaagctggagcaggtgtctgagaagggcaaggcttacaccaactacttcggacggtgcaatgtggccgagcacgaaaagctgatcctgctggcccagctgaagcccgagaaggatagcgacgaagccgtgacatatagcctgggaaagtttgggcagagggccctggatttctacagcattcatgtgaccaaggagtccacccaccccgtgaagcccctggcccagatcgccggaaacagatacgcctccggacctgtgggaaaggccctgagcgacgcatgtatgggcacaatcgcctccttcctgtctaagtaccaggacatcatcatcgaacaccagaaggtggtgaagggcaaccagaagagactggagagcctgcgggagctggccggcaaggaaaacctggaataccctagcgtgaccctgccacctcagcctcacaccaaggagggcgttgatgcctacaacgaagtgatcgcccgggtgcgaatgtgggtgaacctgaacctgtggcagaagctgaagctaagcagagatgatgccaagcctctgctgagactgaagggattcccttcctttcctctggtcgagagacaggccaacgaagtggactggtgggacatggtgtgtaacgtgaagaagctgatcaacgagaaaaaggaggatggcaaggtgttttggcagaatctggctggctacaagagacaggaagccctgagaccatacctgagcagcgaggaagatcggaagaagggaaagaaattcgctcggtaccagctgggcgacctgctgctgcacctggaaaagaagcacggcgaggactggggaaaggtgtacgacgaggcctgggagcggattgacaagaaagtggaaggcctgagcaagcacatcaagctggaagaggaacggagaagcgaggacgcccagagcaaggccgccctgaccgactggctgcgggctaaggccagcttcgtgatcgagggcctgaaggaggccgacaaggacgagttctgcagatgcgagctgaagctgcagaagtggtacggggacctgcggggaaagcccttcgccatcgaagccgagaacagcatcctggacatcagcggcttcagcaagcagtacaactgtgccttcatctggcagaaggacggcgtgaagaagctgaacctgtacctgatcatcaactacttcaagggcggcaagctgcggttcaagaagatcaaacctgaagccttcgaagccaacagattctacaccgtgatcaacaaaaagagcggcgagatcgtgcccatggaggtgaacttcaacttcgacgaccccaacctgatcatcctgcctctggcctttggcaagagacagggcagagaattcatctggaacgacctgctgtccctggaaaccggcagcctgaagctggccaacggaagagtgatcgagaagacactgtacaacagaagaacccggcaggatgagcctgccctgttcgtggccctgaccttcgagcggcgggaggtcctggactcctccaatatcaaaccaatgaacctgatcggcgtggcaagaggcgaaaacatccccgccgtgatcgccctgaccgaccccgagggctgcccactgagccggtttaaggatagcctgggaaacccaacccacatcctgagaatcggcgagagctataaggagaagcagcggaccatccaggccaagaaggaggtggagcagcggagagccggcggctacagccggaagtacgccagcaaagccaagaatctggcagacgatatggtgagaaacaccgctagagatctgctgtactacgccgtgacccaggatgccatgctgatcttcgccaacctgagccggggcttcggccggcagggcaagcggaccttcatggccgagagacagtacacacggatggaggactggctgaccgccaagctggcctacgagggcctgagcaagacctacctgtccaagacactggcccagtacacctccaagacatgcagcaactgtgggtttaccatcaccagcgccgactacgacagggtgctggagaagctgaagaagacagcaacaggctggatgaccacaattaacggcaaggagctgaaggtggagggccagattacctactacaacagatacaagagacagaacgtagtcaaggacctgtccgtcgagctggatagactgagcgaagaatctgtgaacaacgacatctcctcctggacaaagggcagaagcggagaagctctgagcctcctgaagaaaagattctcccatagacccgtgcaggagaagttcgtgtgcctgaactgcggcttcgagacacacgcagccgagcaagccgccctgaacatcgccagatcctggctgttcctgcggagccaggagtacaagaaataccagacaaacaagacaaccggcaacaccgataagagagccttcgtcgagacctggcagtccttttaccggaagaagcttaaggaggtgtggaaacctgccgtgcggtctggcggatctggcggaggctccatggcccaggagagcgtgatgttcagcgacgtgagcgtggacttcagccaggaggagtgggagtgcctgaacgacgaccagagggacctgtacagggacgtgatgctggagaactacagcaacctggtgagcatggccggccacagcgtgagcaagcccaacgtgatcagctacctggagcagggcaaggagccctggctggtggacagggagctgaccaggggccagtggcccgtgctggagggcggcccaagcagcggcgcccctcctcccagcggcggcagcccagccggctccccaacctctaccgaggagggcacctctgagtccgccacccccgagagcggccctggcacctccaccgagcccagcgagggcagcgcacccggcagccctgccggcagccccacctccacagaggagggaaccagcaccgagcccagcgaaggcagcgccccaggcaccagcaccgagcctagtgagcaggagattaaacggatcaacaagatcagaagaagacttgtgaaagacagcaacaccaagaaggccggcaagacaggccccatgaaaaccctgctggttagagtgatgacacccgatctgagagagcggctggaaaacctgagaaagaagcctgaaaatatcccccagcccatcagcaatacatctagagccaacctgaataagctgctgaccgattacaccgaaatgaagaaggcgatcctgcatgtgtactgggaagagttccagaaggaccctgtgggcctgatgagccgggtggcccagcctgccagcaagaagatcgatcagaacaagctgaaacctgagatggacgagaagggcaacctgaccaccgccggctttgcctgctctcagtgtggccagcccctgttcgtgtacaagctggagcaggtgtctgagaagggcaaggcttacaccaactacttcggacggtgcaatgtggccgagcacgaaaagctgatcctgctggcccagctgaagcccgagaaggatagcgacgaagccgtgacatatagcctgggaaagtttgggcagagggccctggatttctacagcattcatgtgaccaaggagtccacccaccccgtgaagcccctggcccagatcgccggaaacagatacgcctccggacctgtgggaaaggccctgagcgacgcatgtatgggcacaatcgcctccttcctgtctaagtaccaggacatcatcatcgaacaccagaaggtggtgaagggcaaccagaagagactggagagcctgcgggagctggccggcaaggaaaacctggaataccctagcgtgaccctgccacctcagcctcacaccaaggagggcgttgatgcctacaacgaagtgatcgcccgggtgcgaatgtgggtgaacctgaacctgtggcagaagctgaagctaagcagagatgatgccaagcctctgctgagactgaagggattcccttcctttcctctggtcgagagacaggccaacgaagtggactggtgggacatggtgtgtaacgtgaagaagctgatcaacgagaaaaaggaggatggcaaggtgttttggcagaatctggctggctacaagagacaggaagccctgagaccatacctgagcagcgaggaagatcggaagaagggaaagaaattcgctcggtaccagctgggcgacctgctgctgcacctggaaaagaagcacggcgaggactggggaaaggtgtacgacgaggcctgggagcggattgacaagaaagtggaaggcctgagcaagcacatcaagctggaagaggaacggagaagcgaggacgcccagagcaaggccgccctgaccgactggctgcgggctaaggccagcttcgtgatcgagggcctgaaggaggccgacaaggacgagttctgcagatgcgagctgaagctgcagaagtggtacggggacctgcggggaaagcccttcgccatcgaagccgagaacagcatcctggacatcagcggcttcagcaagcagtacaactgtgccttcatctggcagaaggacggcgtgaagaagctgaacctgtacctgatcatcaactacttcaagggcggcaagctgcggttcaagaagatcaaacctgaagccttcgaagccaacagattctacaccgtgatcaacaaaaagagcggcgagatcgtgcccatggaggtgaacttcaacttcgacgaccccaacctgatcatcctgcctctggcctttggcaagagacagggcagagaattcatctggaacgacctgctgtccctggaaaccggcagcctgaagctggccaacggaagagtgatcgagaagacactgtacaacagaagaacccggcaggatgagcctgccctgttcgtggccctgaccttcgagcggcgggaggtcctggactcctccaatatcaaaccaatgaacctgatcggcgtggcaagaggcgaaaacatccccgccgtgatcgccctgaccgaccccgagggctgcccactgagccggtttaaggatagcctgggaaacccaacccacatcctgagaatcggcgagagctataaggagaagcagcggaccatccaggccaagaaggaggtggagcagcggagagccggcggctacagccggaagtacgccagcaaagccaagaatctggcagacgatatggtgagaaacaccgctagagatctgctgtactacgccgtgacccaggatgccatgctgatcttcgccaacctgagccggggcttcggccggcagggcaagcggaccttcatggccgagagacagtacacacggatggaggactggctgaccgccaagctggcctacgagggcctgagcaagacctacctgtccaagacactggcccagtacacctccaagacatgcagcaactgtgggtttaccatcaccagcgccgactacgacagggtgctggagaagctgaagaagacagcaacaggctggatgaccacaattaacggcaaggagctgaaggtggagggccagattacctactacaacagatacaagagacagaacgtagtcaaggacctgtccgtcgagctggatagactgagcgaagaatctgtgaacaacgacatctcctcctggacaaagggcagaagcggagaagctctgagcctcctgaagaaaagattctcccatagacccgtgcaggagaagttcgtgtgcctgaactgcggcttcgagacacacgcagccgagcaagccgccctgaacatcgccagatcctggctgttcctgcggagccaggagtacaagaaataccagacaaacaagacaaccggcaacaccgataagagagccttcgtcgagacctggcagtccttttaccggaagaagcttaaggaggtgtggaaacctgccgtgcggtctggcggatctggcggaggctcctatggcccaggagagcgtgatgttcagcgacgtgagcgtggacttcagccaggaggagtgggagtgcctgaacgacgaccagagggacctgtacagggacgtgatgctggagaactacagcaacctggtgagcatggccggccacagcgtgagcaagcccaacgtgatcagctacctggagcagggcaaggagccctggctggtggacagggagctgaccaggggccagtggcccgtgctggagggatctggctccggcagcggccccaagaaaaagagaaaagtctaagctgccttctgcggggcttgccttctggccatgcccttcttctctcccttgcacctgtacctcttggtctttgaataaagcctgagtaggaaggctagcaaaaaaaaaaaaaaaaaaaaaaaaaaaaaaaaaaaaaaaaaaaaaaaaaaaaaaaaaaaaaaaaaaaaaaaaaaaaaaaa

SEQ ID NO: 16375 - RNA, 9485 nt, synthetic construct
  source 1..9485: mol_type = other RNA
aggaaataagagagaaaagaagagtaagaagaaatataagagccaccatggcccctaagaagaagcgtaaagtgagccggatggaacgcctcgtctacgaggtgcggcagaagtgcagaaacatcgaggacatctgcatctcctgcggatctctgaacgtgaccctggagcacccactgttcatcggcggcatgtgccagaactgtaaaaactgttttctggagtgtgcctatcaatacgacgatgacggctaccagagctactgcaccatctgttgcggcggaagagaggtgctgatgtgtggaaataacaactgctgccggtgcttctgcgtggaatgcgtggacctgctggtgggccccggcgccgcccaggccgctattaaggaagatccttggaactgctacatgtgcggccacaagggcacatacggcctgctgagacggagagaggactggcctagcagactgcagatgttcttcgccaataaccacgaccaggagttcgacccccctaaggtgtaccctcccgtccccgccgagaagagaaagcccatccgggtcctgagcctgttcgatggcatcgccaccggtctgctggtgctgaaggacctgggcatccaggtggataggtacattgcctccgaggtgtgcgaggactccatcaccgtgggaatggtgcgtcatcagggcaagatcatgtacgtgggcgacgtgcggagcgtgacacagaagcatatccaggagtggggccctttcgacctggtgatcggcggcagcccttgcaatgacctgagcatcgtgaacccagcccggaagggcctgtacgagggaaccggcagactgttcttcgagttttacagactgctgcacgacgcccggcctaaggaaggcgacgaccggcccttcttttggctgttcgagaatgtggtggccatgggagtcagcgacaagcgggatattagccggttcctggagagcaaccccgtgatgatcgatgccaaggaagtgagcgccgcccaccgggccagatacttctggggcaatctgcctggcatgaacagacccctggccagcaccgtgaacgacaagctggagctgcaggagtgcctggagcacggccggatcgccaagttcagcaaggtgagaaccatcaccacccgaagcaacagcatcaaacaaggcaaggaccagcactttcctgtgttcatgaacgagaaggaggacatcctgtggtgtaccgagatggagagagtgttcgggttcccagtccactacacagatgtcagcaacatgtctagactggccagacagagactgctgggaagaagctggtccgtccctgtgatcagacacctgttcgcccctctgaaggagtacttcgcctgcgtgagcagcggcaacagcaacgccaacagccggggccccagcttctctagcggcctggtgccactgtccctgagagggagccacatgggccccatggagatctacaaaaccgtgagcgcctggaagcggcagcctgtgcgcgtgctgagcctgtttcggaatatcgataaagtcctgaaaagcctgggattcctggagagcggctctggctccggcggtggcaccctgaagtacgtggaggatgtgacaaacgtggtcagacgggatgtggagaagtggggccccttcgatctggtgtacggcagcacccaacccctgggcagctcttgtgaccggtgccctggctggtacatgtttcagttccaccggatcctgcagtacgccctgccgagacaggagtcccagcggccattcttttggattttcatggacaacttgctgctgaccgaggatgaccaggaaactaccactcggttcctgcagaccgaagccgtgaccctgcaggacgtgagaggccgggactaccagaacgccatgcgggtgtggtccaacatccctggactgaaaagcaagcacgcacctctgacccctaaagaagaggagtacctgcaggcccaggtgcggagcagaagcaagctggacgcccctaaggtggatctgctggtgaagaattgcctcctgcccctgagagagtacttcaagtatttcagccagaatagtctgcccctgggaggcagcggcggcggcgccctggtgacatttgaggacgtcgccgtgcggttcacccaggaggaatgggctctgctggatccttctcagaaaatcctgtaccgggacgtgatgagagagacataccggaatctgacctccgtgggcatcaactgggaatgttgggaccttgaagcctgcttcagaagcctgggaagaaacctgagagtgcaggtggtgaagagaaagtgcgagctgaccaacagcggcccctgcgccgagggcggcccaagcagcggcgcccctcctcccagcggcggcagcccagccggctccccaacctctaccgaggagggcacctctgagtccgccacccccgagagcggccctggcacctccaccgagcccagcgagggcagcgcacccggcagccctgccggcagccccacctccacagaggagggaaccagcaccgagcccagcgaaggcagcgccccaggcaccagcaccgagcctagtgagcaggagattaaacggatcaacaagatcagaagaagacttgtgaaagacagcaacaccaagaaggccggcaagacaggccccatgaaaaccctgctggttagagtgatgacacccgatctgagagagcggctggaaaacctgagaaagaagcctgaaaatatcccccagcccatcagcaatacatctagagccaacctgaataagctgctgaccgattacaccgaaatgaagaaggcgatcctgcatgtgtactgggaagagttccagaaggaccctgtgggcctgatgagccgggtggcccagcctgccagcaagaagatcgatcagaacaagctgaaacctgagatggacgagaagggcaacctgaccaccgccggctttgcctgctctcagtgtggccagcccctgttcgtgtacaagctggagcaggtgtctgagaagggcaaggcttacaccaactacttcggacggtgcaatgtggccgagcacgaaaagctgatcctgctggcccagctgaagcccgagaaggatagcgacgaagccgtgacatatagcctgggaaagtttgggcagagggccctggatttctacagcattcatgtgaccaaggagtccacccaccccgtgaagcccctggcccagatcgccggaaacagatacgcctccggacctgtgggaaaggccctgagcgacgcatgtatgggcacaatcgcctccttcctgtctaagtaccaggacatcatcatcgaacaccagaaggtggtgaagggcaaccagaagagactggagagcctgcgggagctggccggcaaggaaaacctggaataccctagcgtgaccctgccacctcagcctcacaccaaggagggcgttgatgcctacaacgaagtgatcgcccgggtgcgaatgtgggtgaacctgaacctgtggcagaagctgaagctaagcagagatgatgccaagcctctgctgagactgaagggattcccttcctttcctctggtcgagagacaggccaacgaagtggactggtgggacatggtgtgtaacgtgaagaagctgatcaacgagaaaaaggaggatggcaaggtgttttggcagaatctggctggctacaagagacaggaagccctgagaccatacctgagcagcgaggaagatcggaagaagggaaagaaattcgctcggtaccagctgggcgacctgctgctgcacctggaaaagaagcacggcgaggactggggaaaggtgtacgacgaggcctgggagcggattgacaagaaagtggaaggcctgagcaagcacatcaagctggaagaggaacggagaagcgaggacgcccagagcaaggccgccctgaccgactggctgcgggctaaggccagcttcgtgatcgagggcctgaaggaggccgacaaggacgagttctgcagatgcgagctgaagctgcagaagtggtacggggacctgcggggaaagcccttcgccatcgaagccgagaacagcatcctggacatcagcggcttcagcaagcagtacaactgtgccttcatctggcagaaggacggcgtgaagaagctgaacctgtacctgatcatcaactacttcaagggcggcaagctgcggttcaagaagatcaaacctgaagccttcgaagccaacagattctacaccgtgatcaacaaaaagagcggcgagatcgtgcccatggaggtgaacttcaacttcgacgaccccaacctgatcatcctgcctctggcctttggcaagagacagggcagagaattcatctggaacgacctgctgtccctggaaaccggcagcctgaagctggccaacggaagagtgatcgagaagacactgtacaacagaagaacccggcaggatgagcctgccctgttcgtggccctgaccttcgagcggcgggaggtcctggactcctccaatatcaaaccaatgaacctgatcggcgtggcaagaggcgaaaacatccccgccgtgatcgccctgaccgaccccgagggctgcccactgagccggtttaaggatagcctgggaaacccaacccacatcctgagaatcggcgagagctataaggagaagcagcggaccatccaggccaagaaggaggtggagcagcggagagccggcggctacagccggaagtacgccagcaaagccaagaatctggcagacgatatggtgagaaacaccgctagagatctgctgtactacgccgtgacccaggatgccatgctgatcttcgccaacctgagccggggcttcggccggcagggcaagcggaccttcatggccgagagacagtacacacggatggaggactggctgaccgccaagctggcctacgagggcctgagcaagacctacctgtccaagacactggcccagtacacctccaagacatgcagcaactgtgggtttaccatcaccagcgccgactacgacagggtgctggagaagctgaagaagacagcaacaggctggatgaccacaattaacggcaaggagctgaaggtggagggccagattacctactacaacagatacaagagacagaacgtagtcaaggacctgtccgtcgagctggatagactgagcgaagaatctgtgaacaacgacatctcctcctggacaaagggcagaagcggagaagctctgagcctcctgaagaaaagattctcccatagacccgtgcaggagaagttcgtgtgcctgaactgcggcttcgagacacacgcagccgagcaagccgccctgaacatcgccagatcctggctgttcctgcggagccaggagtacaagaaataccagacaaacaagacaaccggcaacaccgataagagagccttcgtcgagacctggcagtccttttaccggaagaagcttaaggaggtgtggaaacctgccgtgcggtctggcggatctggcggaggctccagggagaggctggtgagcttcgaggacgtgaccgtggacttcagccaggaggagtggaggaggctggacagcgtgcagaggcacctgtaccaggacgtgatgctggagatctacagccacctgctggccgtgggctaccccgtgcccagccccggcgccatcttcaggatcaagaagaggaaggaggccaggaccggcgaggccaagctgccccacccctgctggtgccaggaggtggagagcggcggcccaagcagcggcgcccctcctcccagcggcggcagcccagccggctccccaacctctaccgaggagggcacctctgagtccgccacccccgagagcggccctggcacctccaccgagcccagcgagggcagcgcacccggcagccctgccggcagccccacctccacagaggagggaaccagcaccgagcccagcgaaggcagcgccccaggcaccagcaccgagcctagtgagcaggagattaaacggatcaacaagatcagaagaagacttgtgaaagacagcaacaccaagaaggccggcaagacaggccccatgaaaaccctgctggttagagtgatgacacccgatctgagagagcggctggaaaacctgagaaagaagcctgaaaatatcccccagcccatcagcaatacatctagagccaacctgaataagctgctgaccgattacaccgaaatgaagaaggcgatcctgcatgtgtactgggaagagttccagaaggaccctgtgggcctgatgagccgggtggcccagcctgccagcaagaagatcgatcagaacaagctgaaacctgagatggacgagaagggcaacctgaccaccgccggctttgcctgctctcagtgtggccagcccctgttcgtgtacaagctggagcaggtgtctgagaagggcaaggcttacaccaactacttcggacggtgcaatgtggccgagcacgaaaagctgatcctgctggcccagctgaagcccgagaaggatagcgacgaagccgtgacatatagcctgggaaagtttgggcagagggccctggatttctacagcattcatgtgaccaaggagtccacccaccccgtgaagcccctggcccagatcgccggaaacagatacgcctccggacctgtgggaaaggccctgagcgacgcatgtatgggcacaatcgcctccttcctgtctaagtaccaggacatcatcatcgaacaccagaaggtggtgaagggcaaccagaagagactggagagcctgcgggagctggccggcaaggaaaacctggaataccctagcgtgaccctgccacctcagcctcacaccaaggagggcgttgatgcctacaacgaagtgatcgcccgggtgcgaatgtgggtgaacctgaacctgtggcagaagctgaagctaagcagagatgatgccaagcctctgctgagactgaagggattcccttcctttcctctggtcgagagacaggccaacgaagtggactggtgggacatggtgtgtaacgtgaagaagctgatcaacgagaaaaaggaggatggcaaggtgttttggcagaatctggctggctacaagagacaggaagccctgagaccatacctgagcagcgaggaagatcggaagaagggaaagaaattcgctcggtaccagctgggcgacctgctgctgcacctggaaaagaagcacggcgaggactggggaaaggtgtacgacgaggcctgggagcggattgacaagaaagtggaaggcctgagcaagcacatcaagctggaagaggaacggagaagcgaggacgcccagagcaaggccgccctgaccgactggctgcgggctaaggccagcttcgtgatcgagggcctgaaggaggccgacaaggacgagttctgcagatgcgagctgaagctgcagaagtggtacggggacctgcggggaaagcccttcgccatcgaagccgagaacagcatcctggacatcagcggcttcagcaagcagtacaactgtgccttcatctggcagaaggacggcgtgaagaagctgaacctgtacctgatcatcaactacttcaagggcggcaagctgcggttcaagaagatcaaacctgaagccttcgaagccaacagattctacaccgtgatcaacaaaaagagcggcgagatcgtgcccatggaggtgaacttcaacttcgacgaccccaacctgatcatcctgcctctggcctttggcaagagacagggcagagaattcatctggaacgacctgctgtccctggaaaccggcagcctgaagctggccaacggaagagtgatcgagaagacactgtacaacagaagaacccggcaggatgagcctgccctgttcgtggccctgaccttcgagcggcgggaggtcctggactcctccaatatcaaaccaatgaacctgatcggcgtggcaagaggcgaaaacatccccgccgtgatcgccctgaccgaccccgagggctgcccactgagccggtttaaggatagcctgggaaacccaacccacatcctgagaatcggcgagagctataaggagaagcagcggaccatccaggccaagaaggaggtggagcagcggagagccggcggctacagccggaagtacgccagcaaagccaagaatctggcagacgatatggtgagaaacaccgctagagatctgctgtactacgccgtgacccaggatgccatgctgatcttcgccaacctgagccggggcttcggccggcagggcaagcggaccttcatggccgagagacagtacacacggatggaggactggctgaccgccaagctggcctacgagggcctgagcaagacctacctgtccaagacactggcccagtacacctccaagacatgcagcaactgtgggtttaccatcaccagcgccgactacgacagggtgctggagaagctgaagaagacagcaacaggctggatgaccacaattaacggcaaggagctgaaggtggagggccagattacctactacaacagatacaagagacagaacgtagtcaaggacctgtccgtcgagctggatagactgagcgaagaatctgtgaacaacgacatctcctcctggacaaagggcagaagcggagaagctctgagcctcctgaagaaaagattctcccatagacccgtgcaggagaagttcgtgtgcctgaactgcggcttcgagacacacgcagccgagcaagccgccctgaacatcgccagatcctggctgttcctgcggagccaggagtacaagaaataccagacaaacaagacaaccggcaacaccgataagagagccttcgtcgagacctggcagtccttttaccggaagaagcttaaggaggtgtggaaacctgccgtgcggtctggcggatctggcggaggctcctagggagaggctggtgagcttcgaggacgtgaccgtggacttcagccaggaggagtggaggaggctggacagcgtgcagaggcacctgtaccaggacgtgatgctggagatctacagccacctgctggccgtgggctaccccgtgcccagccccggcgccatcttcaggatcaagaagaggaaggaggccaggaccggcgaggccaagctgccccacccctgctggtgccaggaggtggagagcggatctggctccggcagcggccccaagaaaaagagaaaagtctaagctgccttctgcggggcttgccttctggccatgcccttcttctctcccttgcacctgtacctcttggtctttgaataaagcctgagtaggaaggctagcaaaaaaaaaaaaaaaaaaaaaaaaaaaaaaaaaaaaaaaaaaaaaaaaaaaaaaaaaaaaaaaaaaaaaaaaaaaaaaaa

SEQ ID NO: 16376 - RNA, 9485 nt, synthetic construct
  source 1..9485: mol_type = other RNA
aggaaataagagagaaaagaagagtaagaagaaatataagagccaccatggcccctaagaagaagcgtaaagtgagccggatggaacgcctcgtctacgaggtgcggcagaagtgcagaaacatcgaggacatctgcatctcctgcggatctctgaacgtgaccctggagcacccactgttcatcggcggcatgtgccagaactgtaaaaactgttttctggagtgtgcctatcaatacgacgatgacggctaccagagctactgcaccatctgttgcggcggaagagaggtgctgatgtgtggaaataacaactgctgccggtgcttctgcgtggaatgcgtggacctgctggtgggccccggcgccgcccaggccgctattaaggaagatccttggaactgctacatgtgcggccacaagggcacatacggcctgctgagacggagagaggactggcctagcagactgcagatgttcttcgccaataaccacgaccaggagttcgacccccctaaggtgtaccctcccgtccccgccgagaagagaaagcccatccgggtcctgagcctgttcgatggcatcgccaccggtctgctggtgctgaaggacctgggcatccaggtggataggtacattgcctccgaggtgtgcgaggactccatcaccgtgggaatggtgcgtcatcagggcaagatcatgtacgtgggcgacgtgcggagcgtgacacagaagcatatccaggagtggggccctttcgacctggtgatcggcggcagcccttgcaatgacctgagcatcgtgaacccagcccggaagggcctgtacgagggaaccggcagactgttcttcgagttttacagactgctgcacgacgcccggcctaaggaaggcgacgaccggcccttcttttggctgttcgagaatgtggtggccatgggagtcagcgacaagcgggatattagccggttcctggagagcaaccccgtgatgatcgatgccaaggaagtgagcgccgcccaccgggccagatacttctggggcaatctgcctggcatgaacagacccctggccagcaccgtgaacgacaagctggagctgcaggagtgcctggagcacggccggatcgccaagttcagcaaggtgagaaccatcaccacccgaagcaacagcatcaaacaaggcaaggaccagcactttcctgtgttcatgaacgagaaggaggacatcctgtggtgtaccgagatggagagagtgttcgggttcccagtccactacacagatgtcagcaacatgtctagactggccagacagagactgctgggaagaagctggtccgtccctgtgatcagacacctgttcgcccctctgaaggagtacttcgcctgcgtgagcagcggcaacagcaacgccaacagccggggccccagcttctctagcggcctggtgccactgtccctgagagggagccacatgggccccatggagatctacaaaaccgtgagcgcctggaagcggcagcctgtgcgcgtgctgagcctgtttcggaatatcgataaagtcctgaaaagcctgggattcctggagagcggctctggctccggcggtggcaccctgaagtacgtggaggatgtgacaaacgtggtcagacgggatgtggagaagtggggccccttcgatctggtgtacggcagcacccaacccctgggcagctcttgtgaccggtgccctggctggtacatgtttcagttccaccggatcctgcagtacgccctgccgagacaggagtcccagcggccattcttttggattttcatggacaacttgctgctgaccgaggatgaccaggaaactaccactcggttcctgcagaccgaagccgtgaccctgcaggacgtgagaggccgggactaccagaacgccatgcgggtgtggtccaacatccctggactgaaaagcaagcacgcacctctgacccctaaagaagaggagtacctgcaggcccaggtgcggagcagaagcaagctggacgcccctaaggtggatctgctggtgaagaattgcctcctgcccctgagagagtacttcaagtatttcagccagaatagtctgcccctgggaggcagcggcggcggcgccctggtgacatttgaggacgtcgccgtgcggttcacccaggaggaatgggctctgctggatccttctcagaaaatcctgtaccgggacgtgatgagagagacataccggaatctgacctccgtgggcatcaactgggaatgttgggaccttgaagcctgcttcagaagcctgggaagaaacctgagagtgcaggtggtgaagagaaagtgcgagctgaccaacagcggcccctgcgccgagggcggcccaagcagcggcgcccctcctcccagcggcggcagcccagccggctccccaacctctaccgaggagggcacctctgagtccgccacccccgagagcggccctggcacctccaccgagcccagcgagggcagcgcacccggcagccctgccggcagccccacctccacagaggagggaaccagcaccgagcccagcgaaggcagcgccccaggcaccagcaccgagcctagtgagcaggagattaaacggatcaacaagatcagaagaagacttgtgaaagacagcaacaccaagaaggccggcaagacaggccccatgaaaaccctgctggttagagtgatgacacccgatctgagagagcggctggaaaacctgagaaagaagcctgaaaatatcccccagcccatcagcaatacatctagagccaacctgaataagctgctgaccgattacaccgaaatgaagaaggcgatcctgcatgtgtactgggaagagttccagaaggaccctgtgggcctgatgagccgggtggcccagcctgccagcaagaagatcgatcagaacaagctgaaacctgagatggacgagaagggcaacctgaccaccgccggctttgcctgctctcagtgtggccagcccctgttcgtgtacaagctggagcaggtgtctgagaagggcaaggcttacaccaactacttcggacggtgcaatgtggccgagcacgaaaagctgatcctgctggcccagctgaagcccgagaaggatagcgacgaagccgtgacatatagcctgggaaagtttgggcagagggccctggatttctacagcattcatgtgaccaaggagtccacccaccccgtgaagcccctggcccagatcgccggaaacagatacgcctccggacctgtgggaaaggccctgagcgacgcatgtatgggcacaatcgcctccttcctgtctaagtaccaggacatcatcatcgaacaccagaaggtggtgaagggcaaccagaagagactggagagcctgcgggagctggccggcaaggaaaacctggaataccctagcgtgaccctgccacctcagcctcacaccaaggagggcgttgatgcctacaacgaagtgatcgcccgggtgcgaatgtgggtgaacctgaacctgtggcagaagctgaagctaagcagagatgatgccaagcctctgctgagactgaagggattcccttcctttcctctggtcgagagacaggccaacgaagtggactggtgggacatggtgtgtaacgtgaagaagctgatcaacgagaaaaaggaggatggcaaggtgttttggcagaatctggctggctacaagagacaggaagccctgagaccatacctgagcagcgaggaagatcggaagaagggaaagaaattcgctcggtaccagctgggcgacctgctgctgcacctggaaaagaagcacggcgaggactggggaaaggtgtacgacgaggcctgggagcggattgacaagaaagtggaaggcctgagcaagcacatcaagctggaagaggaacggagaagcgaggacgcccagagcaaggccgccctgaccgactggctgcgggctaaggccagcttcgtgatcgagggcctgaaggaggccgacaaggacgagttctgcagatgcgagctgaagctgcagaagtggtacggggacctgcggggaaagcccttcgccatcgaagccgagaacagcatcctggacatcagcggcttcagcaagcagtacaactgtgccttcatctggcagaaggacggcgtgaagaagctgaacctgtacctgatcatcaactacttcaagggcggcaagctgcggttcaagaagatcaaacctgaagccttcgaagccaacagattctacaccgtgatcaacaaaaagagcggcgagatcgtgcccatggaggtgaacttcaacttcgacgaccccaacctgatcatcctgcctctggcctttggcaagagacagggcagagaattcatctggaacgacctgctgtccctggaaaccggcagcctgaagctggccaacggaagagtgatcgagaagacactgtacaacagaagaacccggcaggatgagcctgccctgttcgtggccctgaccttcgagcggcgggaggtcctggactcctccaatatcaaaccaatgaacctgatcggcgtggcaagaggcgaaaacatccccgccgtgatcgccctgaccgaccccgagggctgcccactgagccggtttaaggatagcctgggaaacccaacccacatcctgagaatcggcgagagctataaggagaagcagcggaccatccaggccaagaaggaggtggagcagcggagagccggcggctacagccggaagtacgccagcaaagccaagaatctggcagacgatatggtgagaaacaccgctagagatctgctgtactacgccgtgacccaggatgccatgctgatcttcgccaacctgagccggggcttcggccggcagggcaagcggaccttcatggccgagagacagtacacacggatggaggactggctgaccgccaagctggcctacgagggcctgagcaagacctacctgtccaagacactggcccagtacacctccaagacatgcagcaactgtgggtttaccatcaccagcgccgactacgacagggtgctggagaagctgaagaagacagcaacaggctggatgaccacaattaacggcaaggagctgaaggtggagggccagattacctactacaacagatacaagagacagaacgtagtcaaggacctgtccgtcgagctggatagactgagcgaagaatctgtgaacaacgacatctcctcctggacaaagggcagaagcggagaagctctgagcctcctgaagaaaagattctcccatagacccgtgcaggagaagttcgtgtgcctgaactgcggcttcgagacacacgcagccgagcaagccgccctgaacatcgccagatcctggctgttcctgcggagccaggagtacaagaaataccagacaaacaagacaaccggcaacaccgataagagagccttcgtcgagacctggcagtccttttaccggaagaagcttaaggaggtgtggaaacctgccgtgcggtctggcggatctggcggaggctccgcctgggaggtggtgaccttccaggacgtggccgtggacttcaccagggaggagtggaggctgctgagccccccccagaaggagctgtacaaggaggtgatgctggagaacgtgaggaacctgctgagcgtgggcctgcccgccccccccgacgacgtggtgagctacctggagcagagggagggccccagcatgctggaccaggaggacctgaggacctgcggccccgagggcgagatcaggggcggcccaagcagcggcgcccctcctcccagcggcggcagcccagccggctccccaacctctaccgaggagggcacctctgagtccgccacccccgagagcggccctggcacctccaccgagcccagcgagggcagcgcacccggcagccctgccggcagccccacctccacagaggagggaaccagcaccgagcccagcgaaggcagcgccccaggcaccagcaccgagcctagtgagcaggagattaaacggatcaacaagatcagaagaagacttgtgaaagacagcaacaccaagaaggccggcaagacaggccccatgaaaaccctgctggttagagtgatgacacccgatctgagagagcggctggaaaacctgagaaagaagcctgaaaatatcccccagcccatcagcaatacatctagagccaacctgaataagctgctgaccgattacaccgaaatgaagaaggcgatcctgcatgtgtactgggaagagttccagaaggaccctgtgggcctgatgagccgggtggcccagcctgccagcaagaagatcgatcagaacaagctgaaacctgagatggacgagaagggcaacctgaccaccgccggctttgcctgctctcagtgtggccagcccctgttcgtgtacaagctggagcaggtgtctgagaagggcaaggcttacaccaactacttcggacggtgcaatgtggccgagcacgaaaagctgatcctgctggcccagctgaagcccgagaaggatagcgacgaagccgtgacatatagcctgggaaagtttgggcagagggccctggatttctacagcattcatgtgaccaaggagtccacccaccccgtgaagcccctggcccagatcgccggaaacagatacgcctccggacctgtgggaaaggccctgagcgacgcatgtatgggcacaatcgcctccttcctgtctaagtaccaggacatcatcatcgaacaccagaaggtggtgaagggcaaccagaagagactggagagcctgcgggagctggccggcaaggaaaacctggaataccctagcgtgaccctgccacctcagcctcacaccaaggagggcgttgatgcctacaacgaagtgatcgcccgggtgcgaatgtgggtgaacctgaacctgtggcagaagctgaagctaagcagagatgatgccaagcctctgctgagactgaagggattcccttcctttcctctggtcgagagacaggccaacgaagtggactggtgggacatggtgtgtaacgtgaagaagctgatcaacgagaaaaaggaggatggcaaggtgttttggcagaatctggctggctacaagagacaggaagccctgagaccatacctgagcagcgaggaagatcggaagaagggaaagaaattcgctcggtaccagctgggcgacctgctgctgcacctggaaaagaagcacggcgaggactggggaaaggtgtacgacgaggcctgggagcggattgacaagaaagtggaaggcctgagcaagcacatcaagctggaagaggaacggagaagcgaggacgcccagagcaaggccgccctgaccgactggctgcgggctaaggccagcttcgtgatcgagggcctgaaggaggccgacaaggacgagttctgcagatgcgagctgaagctgcagaagtggtacggggacctgcggggaaagcccttcgccatcgaagccgagaacagcatcctggacatcagcggcttcagcaagcagtacaactgtgccttcatctggcagaaggacggcgtgaagaagctgaacctgtacctgatcatcaactacttcaagggcggcaagctgcggttcaagaagatcaaacctgaagccttcgaagccaacagattctacaccgtgatcaacaaaaagagcggcgagatcgtgcccatggaggtgaacttcaacttcgacgaccccaacctgatcatcctgcctctggcctttggcaagagacagggcagagaattcatctggaacgacctgctgtccctggaaaccggcagcctgaagctggccaacggaagagtgatcgagaagacactgtacaacagaagaacccggcaggatgagcctgccctgttcgtggccctgaccttcgagcggcgggaggtcctggactcctccaatatcaaaccaatgaacctgatcggcgtggcaagaggcgaaaacatccccgccgtgatcgccctgaccgaccccgagggctgcccactgagccggtttaaggatagcctgggaaacccaacccacatcctgagaatcggcgagagctataaggagaagcagcggaccatccaggccaagaaggaggtggagcagcggagagccggcggctacagccggaagtacgccagcaaagccaagaatctggcagacgatatggtgagaaacaccgctagagatctgctgtactacgccgtgacccaggatgccatgctgatcttcgccaacctgagccggggcttcggccggcagggcaagcggaccttcatggccgagagacagtacacacggatggaggactggctgaccgccaagctggcctacgagggcctgagcaagacctacctgtccaagacactggcccagtacacctccaagacatgcagcaactgtgggtttaccatcaccagcgccgactacgacagggtgctggagaagctgaagaagacagcaacaggctggatgaccacaattaacggcaaggagctgaaggtggagggccagattacctactacaacagatacaagagacagaacgtagtcaaggacctgtccgtcgagctggatagactgagcgaagaatctgtgaacaacgacatctcctcctggacaaagggcagaagcggagaagctctgagcctcctgaagaaaagattctcccatagacccgtgcaggagaagttcgtgtgcctgaactgcggcttcgagacacacgcagccgagcaagccgccctgaacatcgccagatcctggctgttcctgcggagccaggagtacaagaaataccagacaaacaagacaaccggcaacaccgataagagagccttcgtcgagacctggcagtccttttaccggaagaagcttaaggaggtgtggaaacctgccgtgcggtctggcggatctggcggaggctcctgcctgggaggtggtgaccttccaggacgtggccgtggacttcaccagggaggagtggaggctgctgagccccccccagaaggagctgtacaaggaggtgatgctggagaacgtgaggaacctgctgagcgtgggcctgcccgccccccccgacgacgtggtgagctacctggagcagagggagggccccagcatgctggaccaggaggacctgaggacctgcggccccgagggcgagatcaggggatctggctccggcagcggccccaagaaaaagagaaaagtctaagctgccttctgcggggcttgccttctggccatgcccttcttctctcccttgcacctgtacctcttggtctttgaataaagcctgagtaggaaggctagcaaaaaaaaaaaaaaaaaaaaaaaaaaaaaaaaaaaaaaaaaaaaaaaaaaaaaaaaaaaaaaaaaaaaaaaaaaaaaaaa

SEQ ID NO: 16377 - RNA, 9485 nt, synthetic construct
  source 1..9485: mol_type = other RNA
aggaaataagagagaaaagaagagtaagaagaaatataagagccaccatggcccctaagaagaagcgtaaagtgagccggatggaacgcctcgtctacgaggtgcggcagaagtgcagaaacatcgaggacatctgcatctcctgcggatctctgaacgtgaccctggagcacccactgttcatcggcggcatgtgccagaactgtaaaaactgttttctggagtgtgcctatcaatacgacgatgacggctaccagagctactgcaccatctgttgcggcggaagagaggtgctgatgtgtggaaataacaactgctgccggtgcttctgcgtggaatgcgtggacctgctggtgggccccggcgccgcccaggccgctattaaggaagatccttggaactgctacatgtgcggccacaagggcacatacggcctgctgagacggagagaggactggcctagcagactgcagatgttcttcgccaataaccacgaccaggagttcgacccccctaaggtgtaccctcccgtccccgccgagaagagaaagcccatccgggtcctgagcctgttcgatggcatcgccaccggtctgctggtgctgaaggacctgggcatccaggtggataggtacattgcctccgaggtgtgcgaggactccatcaccgtgggaatggtgcgtcatcagggcaagatcatgtacgtgggcgacgtgcggagcgtgacacagaagcatatccaggagtggggccctttcgacctggtgatcggcggcagcccttgcaatgacctgagcatcgtgaacccagcccggaagggcctgtacgagggaaccggcagactgttcttcgagttttacagactgctgcacgacgcccggcctaaggaaggcgacgaccggcccttcttttggctgttcgagaatgtggtggccatgggagtcagcgacaagcgggatattagccggttcctggagagcaaccccgtgatgatcgatgccaaggaagtgagcgccgcccaccgggccagatacttctggggcaatctgcctggcatgaacagacccctggccagcaccgtgaacgacaagctggagctgcaggagtgcctggagcacggccggatcgccaagttcagcaaggtgagaaccatcaccacccgaagcaacagcatcaaacaaggcaaggaccagcactttcctgtgttcatgaacgagaaggaggacatcctgtggtgtaccgagatggagagagtgttcgggttcccagtccactacacagatgtcagcaacatgtctagactggccagacagagactgctgggaagaagctggtccgtccctgtgatcagacacctgttcgcccctctgaaggagtacttcgcctgcgtgagcagcggcaacagcaacgccaacagccggggccccagcttctctagcggcctggtgccactgtccctgagagggagccacatgggccccatggagatctacaaaaccgtgagcgcctggaagcggcagcctgtgcgcgtgctgagcctgtttcggaatatcgataaagtcctgaaaagcctgggattcctggagagcggctctggctccggcggtggcaccctgaagtacgtggaggatgtgacaaacgtggtcagacgggatgtggagaagtggggccccttcgatctggtgtacggcagcacccaacccctgggcagctcttgtgaccggtgccctggctggtacatgtttcagttccaccggatcctgcagtacgccctgccgagacaggagtcccagcggccattcttttggattttcatggacaacttgctgctgaccgaggatgaccaggaaactaccactcggttcctgcagaccgaagccgtgaccctgcaggacgtgagaggccgggactaccagaacgccatgcgggtgtggtccaacatccctggactgaaaagcaagcacgcacctctgacccctaaagaagaggagtacctgcaggcccaggtgcggagcagaagcaagctggacgcccctaaggtggatctgctggtgaagaattgcctcctgcccctgagagagtacttcaagtatttcagccagaatagtctgcccctgggaggcagcggcggcggcgccctggtgacatttgaggacgtcgccgtgcggttcacccaggaggaatgggctctgctggatccttctcagaaaatcctgtaccgggacgtgatgagagagacataccggaatctgacctccgtgggcatcaactgggaatgttgggaccttgaagcctgcttcagaagcctgggaagaaacctgagagtgcaggtggtgaagagaaagtgcgagctgaccaacagcggcccctgcgccgagggcggcccaagcagcggcgcccctcctcccagcggcggcagcccagccggctccccaacctctaccgaggagggcacctctgagtccgccacccccgagagcggccctggcacctccaccgagcccagcgagggcagcgcacccggcagccctgccggcagccccacctccacagaggagggaaccagcaccgagcccagcgaaggcagcgccccaggcaccagcaccgagcctagtgagcaggagattaaacggatcaacaagatcagaagaagacttgtgaaagacagcaacaccaagaaggccggcaagacaggccccatgaaaaccctgctggttagagtgatgacacccgatctgagagagcggctggaaaacctgagaaagaagcctgaaaatatcccccagcccatcagcaatacatctagagccaacctgaataagctgctgaccgattacaccgaaatgaagaaggcgatcctgcatgtgtactgggaagagttccagaaggaccctgtgggcctgatgagccgggtggcccagcctgccagcaagaagatcgatcagaacaagctgaaacctgagatggacgagaagggcaacctgaccaccgccggctttgcctgctctcagtgtggccagcccctgttcgtgtacaagctggagcaggtgtctgagaagggcaaggcttacaccaactacttcggacggtgcaatgtggccgagcacgaaaagctgatcctgctggcccagctgaagcccgagaaggatagcgacgaagccgtgacatatagcctgggaaagtttgggcagagggccctggatttctacagcattcatgtgaccaaggagtccacccaccccgtgaagcccctggcccagatcgccggaaacagatacgcctccggacctgtgggaaaggccctgagcgacgcatgtatgggcacaatcgcctccttcctgtctaagtaccaggacatcatcatcgaacaccagaaggtggtgaagggcaaccagaagagactggagagcctgcgggagctggccggcaaggaaaacctggaataccctagcgtgaccctgccacctcagcctcacaccaaggagggcgttgatgcctacaacgaagtgatcgcccgggtgcgaatgtgggtgaacctgaacctgtggcagaagctgaagctaagcagagatgatgccaagcctctgctgagactgaagggattcccttcctttcctctggtcgagagacaggccaacgaagtggactggtgggacatggtgtgtaacgtgaagaagctgatcaacgagaaaaaggaggatggcaaggtgttttggcagaatctggctggctacaagagacaggaagccctgagaccatacctgagcagcgaggaagatcggaagaagggaaagaaattcgctcggtaccagctgggcgacctgctgctgcacctggaaaagaagcacggcgaggactggggaaaggtgtacgacgaggcctgggagcggattgacaagaaagtggaaggcctgagcaagcacatcaagctggaagaggaacggagaagcgaggacgcccagagcaaggccgccctgaccgactggctgcgggctaaggccagcttcgtgatcgagggcctgaaggaggccgacaaggacgagttctgcagatgcgagctgaagctgcagaagtggtacggggacctgcggggaaagcccttcgccatcgaagccgagaacagcatcctggacatcagcggcttcagcaagcagtacaactgtgccttcatctggcagaaggacggcgtgaagaagctgaacctgtacctgatcatcaactacttcaagggcggcaagctgcggttcaagaagatcaaacctgaagccttcgaagccaacagattctacaccgtgatcaacaaaaagagcggcgagatcgtgcccatggaggtgaacttcaacttcgacgaccccaacctgatcatcctgcctctggcctttggcaagagacagggcagagaattcatctggaacgacctgctgtccctggaaaccggcagcctgaagctggccaacggaagagtgatcgagaagacactgtacaacagaagaacccggcaggatgagcctgccctgttcgtggccctgaccttcgagcggcgggaggtcctggactcctccaatatcaaaccaatgaacctgatcggcgtggcaagaggcgaaaacatccccgccgtgatcgccctgaccgaccccgagggctgcccactgagccggtttaaggatagcctgggaaacccaacccacatcctgagaatcggcgagagctataaggagaagcagcggaccatccaggccaagaaggaggtggagcagcggagagccggcggctacagccggaagtacgccagcaaagccaagaatctggcagacgatatggtgagaaacaccgctagagatctgctgtactacgccgtgacccaggatgccatgctgatcttcgccaacctgagccggggcttcggccggcagggcaagcggaccttcatggccgagagacagtacacacggatggaggactggctgaccgccaagctggcctacgagggcctgagcaagacctacctgtccaagacactggcccagtacacctccaagacatgcagcaactgtgggtttaccatcaccagcgccgactacgacagggtgctggagaagctgaagaagacagcaacaggctggatgaccacaattaacggcaaggagctgaaggtggagggccagattacctactacaacagatacaagagacagaacgtagtcaaggacctgtccgtcgagctggatagactgagcgaagaatctgtgaacaacgacatctcctcctggacaaagggcagaagcggagaagctctgagcctcctgaagaaaagattctcccatagacccgtgcaggagaagttcgtgtgcctgaactgcggcttcgagacacacgcagccgagcaagccgccctgaacatcgccagatcctggctgttcctgcggagccaggagtacaagaaataccagacaaacaagacaaccggcaacaccgataagagagccttcgtcgagacctggcagtccttttaccggaagaagcttaaggaggtgtggaaacctgccgtgcggtctggcggatctggcggaggctcccccaagggcctgctgaccttcagggacgtggccatcgagttcagccaggaggagtggggctgcctgaaccacacccagagggagctgtacagggacgtgatgctggagaactacggcaacctgctgttcctgggcctgatcgtgagcaagcccgacctggtgagcttcctggagcagaagaaggagccctggagcgtgaagaggaagaagagggtgaccatccaccccgcccagaggttcggcggcggcccaagcagcggcgcccctcctcccagcggcggcagcccagccggctccccaacctctaccgaggagggcacctctgagtccgccacccccgagagcggccctggcacctccaccgagcccagcgagggcagcgcacccggcagccctgccggcagccccacctccacagaggagggaaccagcaccgagcccagcgaaggcagcgccccaggcaccagcaccgagcctagtgagcaggagattaaacggatcaacaagatcagaagaagacttgtgaaagacagcaacaccaagaaggccggcaagacaggccccatgaaaaccctgctggttagagtgatgacacccgatctgagagagcggctggaaaacctgagaaagaagcctgaaaatatcccccagcccatcagcaatacatctagagccaacctgaataagctgctgaccgattacaccgaaatgaagaaggcgatcctgcatgtgtactgggaagagttccagaaggaccctgtgggcctgatgagccgggtggcccagcctgccagcaagaagatcgatcagaacaagctgaaacctgagatggacgagaagggcaacctgaccaccgccggctttgcctgctctcagtgtggccagcccctgttcgtgtacaagctggagcaggtgtctgagaagggcaaggcttacaccaactacttcggacggtgcaatgtggccgagcacgaaaagctgatcctgctggcccagctgaagcccgagaaggatagcgacgaagccgtgacatatagcctgggaaagtttgggcagagggccctggatttctacagcattcatgtgaccaaggagtccacccaccccgtgaagcccctggcccagatcgccggaaacagatacgcctccggacctgtgggaaaggccctgagcgacgcatgtatgggcacaatcgcctccttcctgtctaagtaccaggacatcatcatcgaacaccagaaggtggtgaagggcaaccagaagagactggagagcctgcgggagctggccggcaaggaaaacctggaataccctagcgtgaccctgccacctcagcctcacaccaaggagggcgttgatgcctacaacgaagtgatcgcccgggtgcgaatgtgggtgaacctgaacctgtggcagaagctgaagctaagcagagatgatgccaagcctctgctgagactgaagggattcccttcctttcctctggtcgagagacaggccaacgaagtggactggtgggacatggtgtgtaacgtgaagaagctgatcaacgagaaaaaggaggatggcaaggtgttttggcagaatctggctggctacaagagacaggaagccctgagaccatacctgagcagcgaggaagatcggaagaagggaaagaaattcgctcggtaccagctgggcgacctgctgctgcacctggaaaagaagcacggcgaggactggggaaaggtgtacgacgaggcctgggagcggattgacaagaaagtggaaggcctgagcaagcacatcaagctggaagaggaacggagaagcgaggacgcccagagcaaggccgccctgaccgactggctgcgggctaaggccagcttcgtgatcgagggcctgaaggaggccgacaaggacgagttctgcagatgcgagctgaagctgcagaagtggtacggggacctgcggggaaagcccttcgccatcgaagccgagaacagcatcctggacatcagcggcttcagcaagcagtacaactgtgccttcatctggcagaaggacggcgtgaagaagctgaacctgtacctgatcatcaactacttcaagggcggcaagctgcggttcaagaagatcaaacctgaagccttcgaagccaacagattctacaccgtgatcaacaaaaagagcggcgagatcgtgcccatggaggtgaacttcaacttcgacgaccccaacctgatcatcctgcctctggcctttggcaagagacagggcagagaattcatctggaacgacctgctgtccctggaaaccggcagcctgaagctggccaacggaagagtgatcgagaagacactgtacaacagaagaacccggcaggatgagcctgccctgttcgtggccctgaccttcgagcggcgggaggtcctggactcctccaatatcaaaccaatgaacctgatcggcgtggcaagaggcgaaaacatccccgccgtgatcgccctgaccgaccccgagggctgcccactgagccggtttaaggatagcctgggaaacccaacccacatcctgagaatcggcgagagctataaggagaagcagcggaccatccaggccaagaaggaggtggagcagcggagagccggcggctacagccggaagtacgccagcaaagccaagaatctggcagacgatatggtgagaaacaccgctagagatctgctgtactacgccgtgacccaggatgccatgctgatcttcgccaacctgagccggggcttcggccggcagggcaagcggaccttcatggccgagagacagtacacacggatggaggactggctgaccgccaagctggcctacgagggcctgagcaagacctacctgtccaagacactggcccagtacacctccaagacatgcagcaactgtgggtttaccatcaccagcgccgactacgacagggtgctggagaagctgaagaagacagcaacaggctggatgaccacaattaacggcaaggagctgaaggtggagggccagattacctactacaacagatacaagagacagaacgtagtcaaggacctgtccgtcgagctggatagactgagcgaagaatctgtgaacaacgacatctcctcctggacaaagggcagaagcggagaagctctgagcctcctgaagaaaagattctcccatagacccgtgcaggagaagttcgtgtgcctgaactgcggcttcgagacacacgcagccgagcaagccgccctgaacatcgccagatcctggctgttcctgcggagccaggagtacaagaaataccagacaaacaagacaaccggcaacaccgataagagagccttcgtcgagacctggcagtccttttaccggaagaagcttaaggaggtgtggaaacctgccgtgcggtctggcggatctggcggaggctcctcccaagggcctgctgaccttcagggacgtggccatcgagttcagccaggaggagtggggctgcctgaaccacacccagagggagctgtacagggacgtgatgctggagaactacggcaacctgctgttcctgggcctgatcgtgagcaagcccgacctggtgagcttcctggagcagaagaaggagccctggagcgtgaagaggaagaagagggtgaccatccaccccgcccagaggttcggcggatctggctccggcagcggccccaagaaaaagagaaaagtctaagctgccttctgcggggcttgccttctggccatgcccttcttctctcccttgcacctgtacctcttggtctttgaataaagcctgagtaggaaggctagcaaaaaaaaaaaaaaaaaaaaaaaaaaaaaaaaaaaaaaaaaaaaaaaaaaaaaaaaaaaaaaaaaaaaaaaaaaaaaaaa

SEQ ID NO: 16378 - RNA, 9485 nt, synthetic construct
  source 1..9485: mol_type = other RNA
aggaaataagagagaaaagaagagtaagaagaaatataagagccaccatggcccctaagaagaagcgtaaagtgagccggatggaacgcctcgtctacgaggtgcggcagaagtgcagaaacatcgaggacatctgcatctcctgcggatctctgaacgtgaccctggagcacccactgttcatcggcggcatgtgccagaactgtaaaaactgttttctggagtgtgcctatcaatacgacgatgacggctaccagagctactgcaccatctgttgcggcggaagagaggtgctgatgtgtggaaataacaactgctgccggtgcttctgcgtggaatgcgtggacctgctggtgggccccggcgccgcccaggccgctattaaggaagatccttggaactgctacatgtgcggccacaagggcacatacggcctgctgagacggagagaggactggcctagcagactgcagatgttcttcgccaataaccacgaccaggagttcgacccccctaaggtgtaccctcccgtccccgccgagaagagaaagcccatccgggtcctgagcctgttcgatggcatcgccaccggtctgctggtgctgaaggacctgggcatccaggtggataggtacattgcctccgaggtgtgcgaggactccatcaccgtgggaatggtgcgtcatcagggcaagatcatgtacgtgggcgacgtgcggagcgtgacacagaagcatatccaggagtggggccctttcgacctggtgatcggcggcagcccttgcaatgacctgagcatcgtgaacccagcccggaagggcctgtacgagggaaccggcagactgttcttcgagttttacagactgctgcacgacgcccggcctaaggaaggcgacgaccggcccttcttttggctgttcgagaatgtggtggccatgggagtcagcgacaagcgggatattagccggttcctggagagcaaccccgtgatgatcgatgccaaggaagtgagcgccgcccaccgggccagatacttctggggcaatctgcctggcatgaacagacccctggccagcaccgtgaacgacaagctggagctgcaggagtgcctggagcacggccggatcgccaagttcagcaaggtgagaaccatcaccacccgaagcaacagcatcaaacaaggcaaggaccagcactttcctgtgttcatgaacgagaaggaggacatcctgtggtgtaccgagatggagagagtgttcgggttcccagtccactacacagatgtcagcaacatgtctagactggccagacagagactgctgggaagaagctggtccgtccctgtgatcagacacctgttcgcccctctgaaggagtacttcgcctgcgtgagcagcggcaacagcaacgccaacagccggggccccagcttctctagcggcctggtgccactgtccctgagagggagccacatgggccccatggagatctacaaaaccgtgagcgcctggaagcggcagcctgtgcgcgtgctgagcctgtttcggaatatcgataaagtcctgaaaagcctgggattcctggagagcggctctggctccggcggtggcaccctgaagtacgtggaggatgtgacaaacgtggtcagacgggatgtggagaagtggggccccttcgatctggtgtacggcagcacccaacccctgggcagctcttgtgaccggtgccctggctggtacatgtttcagttccaccggatcctgcagtacgccctgccgagacaggagtcccagcggccattcttttggattttcatggacaacttgctgctgaccgaggatgaccaggaaactaccactcggttcctgcagaccgaagccgtgaccctgcaggacgtgagaggccgggactaccagaacgccatgcgggtgtggtccaacatccctggactgaaaagcaagcacgcacctctgacccctaaagaagaggagtacctgcaggcccaggtgcggagcagaagcaagctggacgcccctaaggtggatctgctggtgaagaattgcctcctgcccctgagagagtacttcaagtatttcagccagaatagtctgcccctgggaggcagcggcggcggcgccctggtgacatttgaggacgtcgccgtgcggttcacccaggaggaatgggctctgctggatccttctcagaaaatcctgtaccgggacgtgatgagagagacataccggaatctgacctccgtgggcatcaactgggaatgttgggaccttgaagcctgcttcagaagcctgggaagaaacctgagagtgcaggtggtgaagagaaagtgcgagctgaccaacagcggcccctgcgccgagggcggcccaagcagcggcgcccctcctcccagcggcggcagcccagccggctccccaacctctaccgaggagggcacctctgagtccgccacccccgagagcggccctggcacctccaccgagcccagcgagggcagcgcacccggcagccctgccggcagccccacctccacagaggagggaaccagcaccgagcccagcgaaggcagcgccccaggcaccagcaccgagcctagtgagcaggagattaaacggatcaacaagatcagaagaagacttgtgaaagacagcaacaccaagaaggccggcaagacaggccccatgaaaaccctgctggttagagtgatgacacccgatctgagagagcggctggaaaacctgagaaagaagcctgaaaatatcccccagcccatcagcaatacatctagagccaacctgaataagctgctgaccgattacaccgaaatgaagaaggcgatcctgcatgtgtactgggaagagttccagaaggaccctgtgggcctgatgagccgggtggcccagcctgccagcaagaagatcgatcagaacaagctgaaacctgagatggacgagaagggcaacctgaccaccgccggctttgcctgctctcagtgtggccagcccctgttcgtgtacaagctggagcaggtgtctgagaagggcaaggcttacaccaactacttcggacggtgcaatgtggccgagcacgaaaagctgatcctgctggcccagctgaagcccgagaaggatagcgacgaagccgtgacatatagcctgggaaagtttgggcagagggccctggatttctacagcattcatgtgaccaaggagtccacccaccccgtgaagcccctggcccagatcgccggaaacagatacgcctccggacctgtgggaaaggccctgagcgacgcatgtatgggcacaatcgcctccttcctgtctaagtaccaggacatcatcatcgaacaccagaaggtggtgaagggcaaccagaagagactggagagcctgcgggagctggccggcaaggaaaacctggaataccctagcgtgaccctgccacctcagcctcacaccaaggagggcgttgatgcctacaacgaagtgatcgcccgggtgcgaatgtgggtgaacctgaacctgtggcagaagctgaagctaagcagagatgatgccaagcctctgctgagactgaagggattcccttcctttcctctggtcgagagacaggccaacgaagtggactggtgggacatggtgtgtaacgtgaagaagctgatcaacgagaaaaaggaggatggcaaggtgttttggcagaatctggctggctacaagagacaggaagccctgagaccatacctgagcagcgaggaagatcggaagaagggaaagaaattcgctcggtaccagctgggcgacctgctgctgcacctggaaaagaagcacggcgaggactggggaaaggtgtacgacgaggcctgggagcggattgacaagaaagtggaaggcctgagcaagcacatcaagctggaagaggaacggagaagcgaggacgcccagagcaaggccgccctgaccgactggctgcgggctaaggccagcttcgtgatcgagggcctgaaggaggccgacaaggacgagttctgcagatgcgagctgaagctgcagaagtggtacggggacctgcggggaaagcccttcgccatcgaagccgagaacagcatcctggacatcagcggcttcagcaagcagtacaactgtgccttcatctggcagaaggacggcgtgaagaagctgaacctgtacctgatcatcaactacttcaagggcggcaagctgcggttcaagaagatcaaacctgaagccttcgaagccaacagattctacaccgtgatcaacaaaaagagcggcgagatcgtgcccatggaggtgaacttcaacttcgacgaccccaacctgatcatcctgcctctggcctttggcaagagacagggcagagaattcatctggaacgacctgctgtccctggaaaccggcagcctgaagctggccaacggaagagtgatcgagaagacactgtacaacagaagaacccggcaggatgagcctgccctgttcgtggccctgaccttcgagcggcgggaggtcctggactcctccaatatcaaaccaatgaacctgatcggcgtggcaagaggcgaaaacatccccgccgtgatcgccctgaccgaccccgagggctgcccactgagccggtttaaggatagcctgggaaacccaacccacatcctgagaatcggcgagagctataaggagaagcagcggaccatccaggccaagaaggaggtggagcagcggagagccggcggctacagccggaagtacgccagcaaagccaagaatctggcagacgatatggtgagaaacaccgctagagatctgctgtactacgccgtgacccaggatgccatgctgatcttcgccaacctgagccggggcttcggccggcagggcaagcggaccttcatggccgagagacagtacacacggatggaggactggctgaccgccaagctggcctacgagggcctgagcaagacctacctgtccaagacactggcccagtacacctccaagacatgcagcaactgtgggtttaccatcaccagcgccgactacgacagggtgctggagaagctgaagaagacagcaacaggctggatgaccacaattaacggcaaggagctgaaggtggagggccagattacctactacaacagatacaagagacagaacgtagtcaaggacctgtccgtcgagctggatagactgagcgaagaatctgtgaacaacgacatctcctcctggacaaagggcagaagcggagaagctctgagcctcctgaagaaaagattctcccatagacccgtgcaggagaagttcgtgtgcctgaactgcggcttcgagacacacgcagccgagcaagccgccctgaacatcgccagatcctggctgttcctgcggagccaggagtacaagaaataccagacaaacaagacaaccggcaacaccgataagagagccttcgtcgagacctggcagtccttttaccggaagaagcttaaggaggtgtggaaacctgccgtgcggtctggcggatctggcggaggctccccccaggagagcgtgaccttcaaggacatcgccgtggacttcacccaggaggagtgggccctgctggacaccagccagaggaagctgtacagggacgtgatgctggagaacatcagccacctggtgagcgtgggctaccacctgtgcaagagcgacgtgatcagccagctggagcagggcgtggagctgtggagggagggcaggggcttcccccagggcctgaaccccgacaggaagagcggcggcggcccaagcagcggcgcccctcctcccagcggcggcagcccagccggctccccaacctctaccgaggagggcacctctgagtccgccacccccgagagcggccctggcacctccaccgagcccagcgagggcagcgcacccggcagccctgccggcagccccacctccacagaggagggaaccagcaccgagcccagcgaaggcagcgccccaggcaccagcaccgagcctagtgagcaggagattaaacggatcaacaagatcagaagaagacttgtgaaagacagcaacaccaagaaggccggcaagacaggccccatgaaaaccctgctggttagagtgatgacacccgatctgagagagcggctggaaaacctgagaaagaagcctgaaaatatcccccagcccatcagcaatacatctagagccaacctgaataagctgctgaccgattacaccgaaatgaagaaggcgatcctgcatgtgtactgggaagagttccagaaggaccctgtgggcctgatgagccgggtggcccagcctgccagcaagaagatcgatcagaacaagctgaaacctgagatggacgagaagggcaacctgaccaccgccggctttgcctgctctcagtgtggccagcccctgttcgtgtacaagctggagcaggtgtctgagaagggcaaggcttacaccaactacttcggacggtgcaatgtggccgagcacgaaaagctgatcctgctggcccagctgaagcccgagaaggatagcgacgaagccgtgacatatagcctgggaaagtttgggcagagggccctggatttctacagcattcatgtgaccaaggagtccacccaccccgtgaagcccctggcccagatcgccggaaacagatacgcctccggacctgtgggaaaggccctgagcgacgcatgtatgggcacaatcgcctccttcctgtctaagtaccaggacatcatcatcgaacaccagaaggtggtgaagggcaaccagaagagactggagagcctgcgggagctggccggcaaggaaaacctggaataccctagcgtgaccctgccacctcagcctcacaccaaggagggcgttgatgcctacaacgaagtgatcgcccgggtgcgaatgtgggtgaacctgaacctgtggcagaagctgaagctaagcagagatgatgccaagcctctgctgagactgaagggattcccttcctttcctctggtcgagagacaggccaacgaagtggactggtgggacatggtgtgtaacgtgaagaagctgatcaacgagaaaaaggaggatggcaaggtgttttggcagaatctggctggctacaagagacaggaagccctgagaccatacctgagcagcgaggaagatcggaagaagggaaagaaattcgctcggtaccagctgggcgacctgctgctgcacctggaaaagaagcacggcgaggactggggaaaggtgtacgacgaggcctgggagcggattgacaagaaagtggaaggcctgagcaagcacatcaagctggaagaggaacggagaagcgaggacgcccagagcaaggccgccctgaccgactggctgcgggctaaggccagcttcgtgatcgagggcctgaaggaggccgacaaggacgagttctgcagatgcgagctgaagctgcagaagtggtacggggacctgcggggaaagcccttcgccatcgaagccgagaacagcatcctggacatcagcggcttcagcaagcagtacaactgtgccttcatctggcagaaggacggcgtgaagaagctgaacctgtacctgatcatcaactacttcaagggcggcaagctgcggttcaagaagatcaaacctgaagccttcgaagccaacagattctacaccgtgatcaacaaaaagagcggcgagatcgtgcccatggaggtgaacttcaacttcgacgaccccaacctgatcatcctgcctctggcctttggcaagagacagggcagagaattcatctggaacgacctgctgtccctggaaaccggcagcctgaagctggccaacggaagagtgatcgagaagacactgtacaacagaagaacccggcaggatgagcctgccctgttcgtggccctgaccttcgagcggcgggaggtcctggactcctccaatatcaaaccaatgaacctgatcggcgtggcaagaggcgaaaacatccccgccgtgatcgccctgaccgaccccgagggctgcccactgagccggtttaaggatagcctgggaaacccaacccacatcctgagaatcggcgagagctataaggagaagcagcggaccatccaggccaagaaggaggtggagcagcggagagccggcggctacagccggaagtacgccagcaaagccaagaatctggcagacgatatggtgagaaacaccgctagagatctgctgtactacgccgtgacccaggatgccatgctgatcttcgccaacctgagccggggcttcggccggcagggcaagcggaccttcatggccgagagacagtacacacggatggaggactggctgaccgccaagctggcctacgagggcctgagcaagacctacctgtccaagacactggcccagtacacctccaagacatgcagcaactgtgggtttaccatcaccagcgccgactacgacagggtgctggagaagctgaagaagacagcaacaggctggatgaccacaattaacggcaaggagctgaaggtggagggccagattacctactacaacagatacaagagacagaacgtagtcaaggacctgtccgtcgagctggatagactgagcgaagaatctgtgaacaacgacatctcctcctggacaaagggcagaagcggagaagctctgagcctcctgaagaaaagattctcccatagacccgtgcaggagaagttcgtgtgcctgaactgcggcttcgagacacacgcagccgagcaagccgccctgaacatcgccagatcctggctgttcctgcggagccaggagtacaagaaataccagacaaacaagacaaccggcaacaccgataagagagccttcgtcgagacctggcagtccttttaccggaagaagcttaaggaggtgtggaaacctgccgtgcggtctggcggatctggcggaggctcctccccaggagagcgtgaccttcaaggacatcgccgtggacttcacccaggaggagtgggccctgctggacaccagccagaggaagctgtacagggacgtgatgctggagaacatcagccacctggtgagcgtgggctaccacctgtgcaagagcgacgtgatcagccagctggagcagggcgtggagctgtggagggagggcaggggcttcccccagggcctgaaccccgacaggaagagcggcggatctggctccggcagcggccccaagaaaaagagaaaagtctaagctgccttctgcggggcttgccttctggccatgcccttcttctctcccttgcacctgtacctcttggtctttgaataaagcctgagtaggaaggctagcaaaaaaaaaaaaaaaaaaaaaaaaaaaaaaaaaaaaaaaaaaaaaaaaaaaaaaaaaaaaaaaaaaaaaaaaaaaaaaaa

SEQ ID NO: 16379 - RNA, 9485 nt, synthetic construct
  source 1..9485: mol_type = other RNA
aggaaataagagagaaaagaagagtaagaagaaatataagagccaccatggcccctaagaagaagcgtaaagtgagccggatggaacgcctcgtctacgaggtgcggcagaagtgcagaaacatcgaggacatctgcatctcctgcggatctctgaacgtgaccctggagcacccactgttcatcggcggcatgtgccagaactgtaaaaactgttttctggagtgtgcctatcaatacgacgatgacggctaccagagctactgcaccatctgttgcggcggaagagaggtgctgatgtgtggaaataacaactgctgccggtgcttctgcgtggaatgcgtggacctgctggtgggccccggcgccgcccaggccgctattaaggaagatccttggaactgctacatgtgcggccacaagggcacatacggcctgctgagacggagagaggactggcctagcagactgcagatgttcttcgccaataaccacgaccaggagttcgacccccctaaggtgtaccctcccgtccccgccgagaagagaaagcccatccgggtcctgagcctgttcgatggcatcgccaccggtctgctggtgctgaaggacctgggcatccaggtggataggtacattgcctccgaggtgtgcgaggactccatcaccgtgggaatggtgcgtcatcagggcaagatcatgtacgtgggcgacgtgcggagcgtgacacagaagcatatccaggagtggggccctttcgacctggtgatcggcggcagcccttgcaatgacctgagcatcgtgaacccagcccggaagggcctgtacgagggaaccggcagactgttcttcgagttttacagactgctgcacgacgcccggcctaaggaaggcgacgaccggcccttcttttggctgttcgagaatgtggtggccatgggagtcagcgacaagcgggatattagccggttcctggagagcaaccccgtgatgatcgatgccaaggaagtgagcgccgcccaccgggccagatacttctggggcaatctgcctggcatgaacagacccctggccagcaccgtgaacgacaagctggagctgcaggagtgcctggagcacggccggatcgccaagttcagcaaggtgagaaccatcaccacccgaagcaacagcatcaaacaaggcaaggaccagcactttcctgtgttcatgaacgagaaggaggacatcctgtggtgtaccgagatggagagagtgttcgggttcccagtccactacacagatgtcagcaacatgtctagactggccagacagagactgctgggaagaagctggtccgtccctgtgatcagacacctgttcgcccctctgaaggagtacttcgcctgcgtgagcagcggcaacagcaacgccaacagccggggccccagcttctctagcggcctggtgccactgtccctgagagggagccacatgggccccatggagatctacaaaaccgtgagcgcctggaagcggcagcctgtgcgcgtgctgagcctgtttcggaatatcgataaagtcctgaaaagcctgggattcctggagagcggctctggctccggcggtggcaccctgaagtacgtggaggatgtgacaaacgtggtcagacgggatgtggagaagtggggccccttcgatctggtgtacggcagcacccaacccctgggcagctcttgtgaccggtgccctggctggtacatgtttcagttccaccggatcctgcagtacgccctgccgagacaggagtcccagcggccattcttttggattttcatggacaacttgctgctgaccgaggatgaccaggaaactaccactcggttcctgcagaccgaagccgtgaccctgcaggacgtgagaggccgggactaccagaacgccatgcgggtgtggtccaacatccctggactgaaaagcaagcacgcacctctgacccctaaagaagaggagtacctgcaggcccaggtgcggagcagaagcaagctggacgcccctaaggtggatctgctggtgaagaattgcctcctgcccctgagagagtacttcaagtatttcagccagaatagtctgcccctgggaggcagcggcggcggcgccctggtgacatttgaggacgtcgccgtgcggttcacccaggaggaatgggctctgctggatccttctcagaaaatcctgtaccgggacgtgatgagagagacataccggaatctgacctccgtgggcatcaactgggaatgttgggaccttgaagcctgcttcagaagcctgggaagaaacctgagagtgcaggtggtgaagagaaagtgcgagctgaccaacagcggcccctgcgccgagggcggcccaagcagcggcgcccctcctcccagcggcggcagcccagccggctccccaacctctaccgaggagggcacctctgagtccgccacccccgagagcggccctggcacctccaccgagcccagcgagggcagcgcacccggcagccctgccggcagccccacctccacagaggagggaaccagcaccgagcccagcgaaggcagcgccccaggcaccagcaccgagcctagtgagcaggagattaaacggatcaacaagatcagaagaagacttgtgaaagacagcaacaccaagaaggccggcaagacaggccccatgaaaaccctgctggttagagtgatgacacccgatctgagagagcggctggaaaacctgagaaagaagcctgaaaatatcccccagcccatcagcaatacatctagagccaacctgaataagctgctgaccgattacaccgaaatgaagaaggcgatcctgcatgtgtactgggaagagttccagaaggaccctgtgggcctgatgagccgggtggcccagcctgccagcaagaagatcgatcagaacaagctgaaacctgagatggacgagaagggcaacctgaccaccgccggctttgcctgctctcagtgtggccagcccctgttcgtgtacaagctggagcaggtgtctgagaagggcaaggcttacaccaactacttcggacggtgcaatgtggccgagcacgaaaagctgatcctgctggcccagctgaagcccgagaaggatagcgacgaagccgtgacatatagcctgggaaagtttgggcagagggccctggatttctacagcattcatgtgaccaaggagtccacccaccccgtgaagcccctggcccagatcgccggaaacagatacgcctccggacctgtgggaaaggccctgagcgacgcatgtatgggcacaatcgcctccttcctgtctaagtaccaggacatcatcatcgaacaccagaaggtggtgaagggcaaccagaagagactggagagcctgcgggagctggccggcaaggaaaacctggaataccctagcgtgaccctgccacctcagcctcacaccaaggagggcgttgatgcctacaacgaagtgatcgcccgggtgcgaatgtgggtgaacctgaacctgtggcagaagctgaagctaagcagagatgatgccaagcctctgctgagactgaagggattcccttcctttcctctggtcgagagacaggccaacgaagtggactggtgggacatggtgtgtaacgtgaagaagctgatcaacgagaaaaaggaggatggcaaggtgttttggcagaatctggctggctacaagagacaggaagccctgagaccatacctgagcagcgaggaagatcggaagaagggaaagaaattcgctcggtaccagctgggcgacctgctgctgcacctggaaaagaagcacggcgaggactggggaaaggtgtacgacgaggcctgggagcggattgacaagaaagtggaaggcctgagcaagcacatcaagctggaagaggaacggagaagcgaggacgcccagagcaaggccgccctgaccgactggctgcgggctaaggccagcttcgtgatcgagggcctgaaggaggccgacaaggacgagttctgcagatgcgagctgaagctgcagaagtggtacggggacctgcggggaaagcccttcgccatcgaagccgagaacagcatcctggacatcagcggcttcagcaagcagtacaactgtgccttcatctggcagaaggacggcgtgaagaagctgaacctgtacctgatcatcaactacttcaagggcggcaagctgcggttcaagaagatcaaacctgaagccttcgaagccaacagattctacaccgtgatcaacaaaaagagcggcgagatcgtgcccatggaggtgaacttcaacttcgacgaccccaacctgatcatcctgcctctggcctttggcaagagacagggcagagaattcatctggaacgacctgctgtccctggaaaccggcagcctgaagctggccaacggaagagtgatcgagaagacactgtacaacagaagaacccggcaggatgagcctgccctgttcgtggccctgaccttcgagcggcgggaggtcctggactcctccaatatcaaaccaatgaacctgatcggcgtggcaagaggcgaaaacatccccgccgtgatcgccctgaccgaccccgagggctgcccactgagccggtttaaggatagcctgggaaacccaacccacatcctgagaatcggcgagagctataaggagaagcagcggaccatccaggccaagaaggaggtggagcagcggagagccggcggctacagccggaagtacgccagcaaagccaagaatctggcagacgatatggtgagaaacaccgctagagatctgctgtactacgccgtgacccaggatgccatgctgatcttcgccaacctgagccggggcttcggccggcagggcaagcggaccttcatggccgagagacagtacacacggatggaggactggctgaccgccaagctggcctacgagggcctgagcaagacctacctgtccaagacactggcccagtacacctccaagacatgcagcaactgtgggtttaccatcaccagcgccgactacgacagggtgctggagaagctgaagaagacagcaacaggctggatgaccacaattaacggcaaggagctgaaggtggagggccagattacctactacaacagatacaagagacagaacgtagtcaaggacctgtccgtcgagctggatagactgagcgaagaatctgtgaacaacgacatctcctcctggacaaagggcagaagcggagaagctctgagcctcctgaagaaaagattctcccatagacccgtgcaggagaagttcgtgtgcctgaactgcggcttcgagacacacgcagccgagcaagccgccctgaacatcgccagatcctggctgttcctgcggagccaggagtacaagaaataccagacaaacaagacaaccggcaacaccgataagagagccttcgtcgagacctggcagtccttttaccggaagaagcttaaggaggtgtggaaacctgccgtgcggtctggcggatctggcggaggctccagcaagggcagcctgatgttcagggacgtgagcatcgacttcagccaggaggagtgggagtgcctggacagcggccagatgaacctgtacaaggaggtgatgctggagaacttcagcaacctggtgagcgtgggcctgagcagcagcaagcccgccgtgatcagcctgctggagcagggcagggagccctggatggtggacagggagctgaccaggggcctgtgcagcgacctggagagcatgggcggcccaagcagcggcgcccctcctcccagcggcggcagcccagccggctccccaacctctaccgaggagggcacctctgagtccgccacccccgagagcggccctggcacctccaccgagcccagcgagggcagcgcacccggcagccctgccggcagccccacctccacagaggagggaaccagcaccgagcccagcgaaggcagcgccccaggcaccagcaccgagcctagtgagcaggagattaaacggatcaacaagatcagaagaagacttgtgaaagacagcaacaccaagaaggccggcaagacaggccccatgaaaaccctgctggttagagtgatgacacccgatctgagagagcggctggaaaacctgagaaagaagcctgaaaatatcccccagcccatcagcaatacatctagagccaacctgaataagctgctgaccgattacaccgaaatgaagaaggcgatcctgcatgtgtactgggaagagttccagaaggaccctgtgggcctgatgagccgggtggcccagcctgccagcaagaagatcgatcagaacaagctgaaacctgagatggacgagaagggcaacctgaccaccgccggctttgcctgctctcagtgtggccagcccctgttcgtgtacaagctggagcaggtgtctgagaagggcaaggcttacaccaactacttcggacggtgcaatgtggccgagcacgaaaagctgatcctgctggcccagctgaagcccgagaaggatagcgacgaagccgtgacatatagcctgggaaagtttgggcagagggccctggatttctacagcattcatgtgaccaaggagtccacccaccccgtgaagcccctggcccagatcgccggaaacagatacgcctccggacctgtgggaaaggccctgagcgacgcatgtatgggcacaatcgcctccttcctgtctaagtaccaggacatcatcatcgaacaccagaaggtggtgaagggcaaccagaagagactggagagcctgcgggagctggccggcaaggaaaacctggaataccctagcgtgaccctgccacctcagcctcacaccaaggagggcgttgatgcctacaacgaagtgatcgcccgggtgcgaatgtgggtgaacctgaacctgtggcagaagctgaagctaagcagagatgatgccaagcctctgctgagactgaagggattcccttcctttcctctggtcgagagacaggccaacgaagtggactggtgggacatggtgtgtaacgtgaagaagctgatcaacgagaaaaaggaggatggcaaggtgttttggcagaatctggctggctacaagagacaggaagccctgagaccatacctgagcagcgaggaagatcggaagaagggaaagaaattcgctcggtaccagctgggcgacctgctgctgcacctggaaaagaagcacggcgaggactggggaaaggtgtacgacgaggcctgggagcggattgacaagaaagtggaaggcctgagcaagcacatcaagctggaagaggaacggagaagcgaggacgcccagagcaaggccgccctgaccgactggctgcgggctaaggccagcttcgtgatcgagggcctgaaggaggccgacaaggacgagttctgcagatgcgagctgaagctgcagaagtggtacggggacctgcggggaaagcccttcgccatcgaagccgagaacagcatcctggacatcagcggcttcagcaagcagtacaactgtgccttcatctggcagaaggacggcgtgaagaagctgaacctgtacctgatcatcaactacttcaagggcggcaagctgcggttcaagaagatcaaacctgaagccttcgaagccaacagattctacaccgtgatcaacaaaaagagcggcgagatcgtgcccatggaggtgaacttcaacttcgacgaccccaacctgatcatcctgcctctggcctttggcaagagacagggcagagaattcatctggaacgacctgctgtccctggaaaccggcagcctgaagctggccaacggaagagtgatcgagaagacactgtacaacagaagaacccggcaggatgagcctgccctgttcgtggccctgaccttcgagcggcgggaggtcctggactcctccaatatcaaaccaatgaacctgatcggcgtggcaagaggcgaaaacatccccgccgtgatcgccctgaccgaccccgagggctgcccactgagccggtttaaggatagcctgggaaacccaacccacatcctgagaatcggcgagagctataaggagaagcagcggaccatccaggccaagaaggaggtggagcagcggagagccggcggctacagccggaagtacgccagcaaagccaagaatctggcagacgatatggtgagaaacaccgctagagatctgctgtactacgccgtgacccaggatgccatgctgatcttcgccaacctgagccggggcttcggccggcagggcaagcggaccttcatggccgagagacagtacacacggatggaggactggctgaccgccaagctggcctacgagggcctgagcaagacctacctgtccaagacactggcccagtacacctccaagacatgcagcaactgtgggtttaccatcaccagcgccgactacgacagggtgctggagaagctgaagaagacagcaacaggctggatgaccacaattaacggcaaggagctgaaggtggagggccagattacctactacaacagatacaagagacagaacgtagtcaaggacctgtccgtcgagctggatagactgagcgaagaatctgtgaacaacgacatctcctcctggacaaagggcagaagcggagaagctctgagcctcctgaagaaaagattctcccatagacccgtgcaggagaagttcgtgtgcctgaactgcggcttcgagacacacgcagccgagcaagccgccctgaacatcgccagatcctggctgttcctgcggagccaggagtacaagaaataccagacaaacaagacaaccggcaacaccgataagagagccttcgtcgagacctggcagtccttttaccggaagaagcttaaggaggtgtggaaacctgccgtgcggtctggcggatctggcggaggctcctagcaagggcagcctgatgttcagggacgtgagcatcgacttcagccaggaggagtgggagtgcctggacagcggccagatgaacctgtacaaggaggtgatgctggagaacttcagcaacctggtgagcgtgggcctgagcagcagcaagcccgccgtgatcagcctgctggagcagggcagggagccctggatggtggacagggagctgaccaggggcctgtgcagcgacctggagagcatgggatctggctccggcagcggccccaagaaaaagagaaaagtctaagctgccttctgcggggcttgccttctggccatgcccttcttctctcccttgcacctgtacctcttggtctttgaataaagcctgagtaggaaggctagcaaaaaaaaaaaaaaaaaaaaaaaaaaaaaaaaaaaaaaaaaaaaaaaaaaaaaaaaaaaaaaaaaaaaaaaaaaaaaaaa

SEQ ID NO: 16380 - RNA, 9485 nt, synthetic construct
  source 1..9485: mol_type = other RNA
aggaaataagagagaaaagaagagtaagaagaaatataagagccaccatggcccctaagaagaagcgtaaagtgagccggatggaacgcctcgtctacgaggtgcggcagaagtgcagaaacatcgaggacatctgcatctcctgcggatctctgaacgtgaccctggagcacccactgttcatcggcggcatgtgccagaactgtaaaaactgttttctggagtgtgcctatcaatacgacgatgacggctaccagagctactgcaccatctgttgcggcggaagagaggtgctgatgtgtggaaataacaactgctgccggtgcttctgcgtggaatgcgtggacctgctggtgggccccggcgccgcccaggccgctattaaggaagatccttggaactgctacatgtgcggccacaagggcacatacggcctgctgagacggagagaggactggcctagcagactgcagatgttcttcgccaataaccacgaccaggagttcgacccccctaaggtgtaccctcccgtccccgccgagaagagaaagcccatccgggtcctgagcctgttcgatggcatcgccaccggtctgctggtgctgaaggacctgggcatccaggtggataggtacattgcctccgaggtgtgcgaggactccatcaccgtgggaatggtgcgtcatcagggcaagatcatgtacgtgggcgacgtgcggagcgtgacacagaagcatatccaggagtggggccctttcgacctggtgatcggcggcagcccttgcaatgacctgagcatcgtgaacccagcccggaagggcctgtacgagggaaccggcagactgttcttcgagttttacagactgctgcacgacgcccggcctaaggaaggcgacgaccggcccttcttttggctgttcgagaatgtggtggccatgggagtcagcgacaagcgggatattagccggttcctggagagcaaccccgtgatgatcgatgccaaggaagtgagcgccgcccaccgggccagatacttctggggcaatctgcctggcatgaacagacccctggccagcaccgtgaacgacaagctggagctgcaggagtgcctggagcacggccggatcgccaagttcagcaaggtgagaaccatcaccacccgaagcaacagcatcaaacaaggcaaggaccagcactttcctgtgttcatgaacgagaaggaggacatcctgtggtgtaccgagatggagagagtgttcgggttcccagtccactacacagatgtcagcaacatgtctagactggccagacagagactgctgggaagaagctggtccgtccctgtgatcagacacctgttcgcccctctgaaggagtacttcgcctgcgtgagcagcggcaacagcaacgccaacagccggggccccagcttctctagcggcctggtgccactgtccctgagagggagccacatgggccccatggagatctacaaaaccgtgagcgcctggaagcggcagcctgtgcgcgtgctgagcctgtttcggaatatcgataaagtcctgaaaagcctgggattcctggagagcggctctggctccggcggtggcaccctgaagtacgtggaggatgtgacaaacgtggtcagacgggatgtggagaagtggggccccttcgatctggtgtacggcagcacccaacccctgggcagctcttgtgaccggtgccctggctggtacatgtttcagttccaccggatcctgcagtacgccctgccgagacaggagtcccagcggccattcttttggattttcatggacaacttgctgctgaccgaggatgaccaggaaactaccactcggttcctgcagaccgaagccgtgaccctgcaggacgtgagaggccgggactaccagaacgccatgcgggtgtggtccaacatccctggactgaaaagcaagcacgcacctctgacccctaaagaagaggagtacctgcaggcccaggtgcggagcagaagcaagctggacgcccctaaggtggatctgctggtgaagaattgcctcctgcccctgagagagtacttcaagtatttcagccagaatagtctgcccctgggaggcagcggcggcggcgccctggtgacatttgaggacgtcgccgtgcggttcacccaggaggaatgggctctgctggatccttctcagaaaatcctgtaccgggacgtgatgagagagacataccggaatctgacctccgtgggcatcaactgggaatgttgggaccttgaagcctgcttcagaagcctgggaagaaacctgagagtgcaggtggtgaagagaaagtgcgagctgaccaacagcggcccctgcgccgagggcggcccaagcagcggcgcccctcctcccagcggcggcagcccagccggctccccaacctctaccgaggagggcacctctgagtccgccacccccgagagcggccctggcacctccaccgagcccagcgagggcagcgcacccggcagccctgccggcagccccacctccacagaggagggaaccagcaccgagcccagcgaaggcagcgccccaggcaccagcaccgagcctagtgagcaggagattaaacggatcaacaagatcagaagaagacttgtgaaagacagcaacaccaagaaggccggcaagacaggccccatgaaaaccctgctggttagagtgatgacacccgatctgagagagcggctggaaaacctgagaaagaagcctgaaaatatcccccagcccatcagcaatacatctagagccaacctgaataagctgctgaccgattacaccgaaatgaagaaggcgatcctgcatgtgtactgggaagagttccagaaggaccctgtgggcctgatgagccgggtggcccagcctgccagcaagaagatcgatcagaacaagctgaaacctgagatggacgagaagggcaacctgaccaccgccggctttgcctgctctcagtgtggccagcccctgttcgtgtacaagctggagcaggtgtctgagaagggcaaggcttacaccaactacttcggacggtgcaatgtggccgagcacgaaaagctgatcctgctggcccagctgaagcccgagaaggatagcgacgaagccgtgacatatagcctgggaaagtttgggcagagggccctggatttctacagcattcatgtgaccaaggagtccacccaccccgtgaagcccctggcccagatcgccggaaacagatacgcctccggacctgtgggaaaggccctgagcgacgcatgtatgggcacaatcgcctccttcctgtctaagtaccaggacatcatcatcgaacaccagaaggtggtgaagggcaaccagaagagactggagagcctgcgggagctggccggcaaggaaaacctggaataccctagcgtgaccctgccacctcagcctcacaccaaggagggcgttgatgcctacaacgaagtgatcgcccgggtgcgaatgtgggtgaacctgaacctgtggcagaagctgaagctaagcagagatgatgccaagcctctgctgagactgaagggattcccttcctttcctctggtcgagagacaggccaacgaagtggactggtgggacatggtgtgtaacgtgaagaagctgatcaacgagaaaaaggaggatggcaaggtgttttggcagaatctggctggctacaagagacaggaagccctgagaccatacctgagcagcgaggaagatcggaagaagggaaagaaattcgctcggtaccagctgggcgacctgctgctgcacctggaaaagaagcacggcgaggactggggaaaggtgtacgacgaggcctgggagcggattgacaagaaagtggaaggcctgagcaagcacatcaagctggaagaggaacggagaagcgaggacgcccagagcaaggccgccctgaccgactggctgcgggctaaggccagcttcgtgatcgagggcctgaaggaggccgacaaggacgagttctgcagatgcgagctgaagctgcagaagtggtacggggacctgcggggaaagcccttcgccatcgaagccgagaacagcatcctggacatcagcggcttcagcaagcagtacaactgtgccttcatctggcagaaggacggcgtgaagaagctgaacctgtacctgatcatcaactacttcaagggcggcaagctgcggttcaagaagatcaaacctgaagccttcgaagccaacagattctacaccgtgatcaacaaaaagagcggcgagatcgtgcccatggaggtgaacttcaacttcgacgaccccaacctgatcatcctgcctctggcctttggcaagagacagggcagagaattcatctggaacgacctgctgtccctggaaaccggcagcctgaagctggccaacggaagagtgatcgagaagacactgtacaacagaagaacccggcaggatgagcctgccctgttcgtggccctgaccttcgagcggcgggaggtcctggactcctccaatatcaaaccaatgaacctgatcggcgtggcaagaggcgaaaacatccccgccgtgatcgccctgaccgaccccgagggctgcccactgagccggtttaaggatagcctgggaaacccaacccacatcctgagaatcggcgagagctataaggagaagcagcggaccatccaggccaagaaggaggtggagcagcggagagccggcggctacagccggaagtacgccagcaaagccaagaatctggcagacgatatggtgagaaacaccgctagagatctgctgtactacgccgtgacccaggatgccatgctgatcttcgccaacctgagccggggcttcggccggcagggcaagcggaccttcatggccgagagacagtacacacggatggaggactggctgaccgccaagctggcctacgagggcctgagcaagacctacctgtccaagacactggcccagtacacctccaagacatgcagcaactgtgggtttaccatcaccagcgccgactacgacagggtgctggagaagctgaagaagacagcaacaggctggatgaccacaattaacggcaaggagctgaaggtggagggccagattacctactacaacagatacaagagacagaacgtagtcaaggacctgtccgtcgagctggatagactgagcgaagaatctgtgaacaacgacatctcctcctggacaaagggcagaagcggagaagctctgagcctcctgaagaaaagattctcccatagacccgtgcaggagaagttcgtgtgcctgaactgcggcttcgagacacacgcagccgagcaagccgccctgaacatcgccagatcctggctgttcctgcggagccaggagtacaagaaataccagacaaacaagacaaccggcaacaccgataagagagccttcgtcgagacctggcagtccttttaccggaagaagcttaaggaggtgtggaaacctgccgtgcggtctggcggatctggcggaggctcccagaccgacctggtgaccttcgacagcgtggccgtggagttcacccaggaggagtggaccctgctggaccccacccagaggaacctgtacagggacgtgatgctggagaactacaagaacctgagcagcgtgggctaccagctgttcaagcccagcctgatcagctggctggaggaggaggaggagctgagcaccctgcccagggtgctgcaggagtggaagatgtgcctgaagaccaagggcggcggcccaagcagcggcgcccctcctcccagcggcggcagcccagccggctccccaacctctaccgaggagggcacctctgagtccgccacccccgagagcggccctggcacctccaccgagcccagcgagggcagcgcacccggcagccctgccggcagccccacctccacagaggagggaaccagcaccgagcccagcgaaggcagcgccccaggcaccagcaccgagcctagtgagcaggagattaaacggatcaacaagatcagaagaagacttgtgaaagacagcaacaccaagaaggccggcaagacaggccccatgaaaaccctgctggttagagtgatgacacccgatctgagagagcggctggaaaacctgagaaagaagcctgaaaatatcccccagcccatcagcaatacatctagagccaacctgaataagctgctgaccgattacaccgaaatgaagaaggcgatcctgcatgtgtactgggaagagttccagaaggaccctgtgggcctgatgagccgggtggcccagcctgccagcaagaagatcgatcagaacaagctgaaacctgagatggacgagaagggcaacctgaccaccgccggctttgcctgctctcagtgtggccagcccctgttcgtgtacaagctggagcaggtgtctgagaagggcaaggcttacaccaactacttcggacggtgcaatgtggccgagcacgaaaagctgatcctgctggcccagctgaagcccgagaaggatagcgacgaagccgtgacatatagcctgggaaagtttgggcagagggccctggatttctacagcattcatgtgaccaaggagtccacccaccccgtgaagcccctggcccagatcgccggaaacagatacgcctccggacctgtgggaaaggccctgagcgacgcatgtatgggcacaatcgcctccttcctgtctaagtaccaggacatcatcatcgaacaccagaaggtggtgaagggcaaccagaagagactggagagcctgcgggagctggccggcaaggaaaacctggaataccctagcgtgaccctgccacctcagcctcacaccaaggagggcgttgatgcctacaacgaagtgatcgcccgggtgcgaatgtgggtgaacctgaacctgtggcagaagctgaagctaagcagagatgatgccaagcctctgctgagactgaagggattcccttcctttcctctggtcgagagacaggccaacgaagtggactggtgggacatggtgtgtaacgtgaagaagctgatcaacgagaaaaaggaggatggcaaggtgttttggcagaatctggctggctacaagagacaggaagccctgagaccatacctgagcagcgaggaagatcggaagaagggaaagaaattcgctcggtaccagctgggcgacctgctgctgcacctggaaaagaagcacggcgaggactggggaaaggtgtacgacgaggcctgggagcggattgacaagaaagtggaaggcctgagcaagcacatcaagctggaagaggaacggagaagcgaggacgcccagagcaaggccgccctgaccgactggctgcgggctaaggccagcttcgtgatcgagggcctgaaggaggccgacaaggacgagttctgcagatgcgagctgaagctgcagaagtggtacggggacctgcggggaaagcccttcgccatcgaagccgagaacagcatcctggacatcagcggcttcagcaagcagtacaactgtgccttcatctggcagaaggacggcgtgaagaagctgaacctgtacctgatcatcaactacttcaagggcggcaagctgcggttcaagaagatcaaacctgaagccttcgaagccaacagattctacaccgtgatcaacaaaaagagcggcgagatcgtgcccatggaggtgaacttcaacttcgacgaccccaacctgatcatcctgcctctggcctttggcaagagacagggcagagaattcatctggaacgacctgctgtccctggaaaccggcagcctgaagctggccaacggaagagtgatcgagaagacactgtacaacagaagaacccggcaggatgagcctgccctgttcgtggccctgaccttcgagcggcgggaggtcctggactcctccaatatcaaaccaatgaacctgatcggcgtggcaagaggcgaaaacatccccgccgtgatcgccctgaccgaccccgagggctgcccactgagccggtttaaggatagcctgggaaacccaacccacatcctgagaatcggcgagagctataaggagaagcagcggaccatccaggccaagaaggaggtggagcagcggagagccggcggctacagccggaagtacgccagcaaagccaagaatctggcagacgatatggtgagaaacaccgctagagatctgctgtactacgccgtgacccaggatgccatgctgatcttcgccaacctgagccggggcttcggccggcagggcaagcggaccttcatggccgagagacagtacacacggatggaggactggctgaccgccaagctggcctacgagggcctgagcaagacctacctgtccaagacactggcccagtacacctccaagacatgcagcaactgtgggtttaccatcaccagcgccgactacgacagggtgctggagaagctgaagaagacagcaacaggctggatgaccacaattaacggcaaggagctgaaggtggagggccagattacctactacaacagatacaagagacagaacgtagtcaaggacctgtccgtcgagctggatagactgagcgaagaatctgtgaacaacgacatctcctcctggacaaagggcagaagcggagaagctctgagcctcctgaagaaaagattctcccatagacccgtgcaggagaagttcgtgtgcctgaactgcggcttcgagacacacgcagccgagcaagccgccctgaacatcgccagatcctggctgttcctgcggagccaggagtacaagaaataccagacaaacaagacaaccggcaacaccgataagagagccttcgtcgagacctggcagtccttttaccggaagaagcttaaggaggtgtggaaacctgccgtgcggtctggcggatctggcggaggctcctcagaccgacctggtgaccttcgacagcgtggccgtggagttcacccaggaggagtggaccctgctggaccccacccagaggaacctgtacagggacgtgatgctggagaactacaagaacctgagcagcgtgggctaccagctgttcaagcccagcctgatcagctggctggaggaggaggaggagctgagcaccctgcccagggtgctgcaggagtggaagatgtgcctgaagaccaagggcggatctggctccggcagcggccccaagaaaaagagaaaagtctaagctgccttctgcggggcttgccttctggccatgcccttcttctctcccttgcacctgtacctcttggtctttgaataaagcctgagtaggaaggctagcaaaaaaaaaaaaaaaaaaaaaaaaaaaaaaaaaaaaaaaaaaaaaaaaaaaaaaaaaaaaaaaaaaaaaaaaaaaaaaaa

SEQ ID NO: 16381 - RNA, 9485 nt, synthetic construct
  source 1..9485: mol_type = other RNA
aggaaataagagagaaaagaagagtaagaagaaatataagagccaccatggcccctaagaagaagcgtaaagtgagccggatggaacgcctcgtctacgaggtgcggcagaagtgcagaaacatcgaggacatctgcatctcctgcggatctctgaacgtgaccctggagcacccactgttcatcggcggcatgtgccagaactgtaaaaactgttttctggagtgtgcctatcaatacgacgatgacggctaccagagctactgcaccatctgttgcggcggaagagaggtgctgatgtgtggaaataacaactgctgccggtgcttctgcgtggaatgcgtggacctgctggtgggccccggcgccgcccaggccgctattaaggaagatccttggaactgctacatgtgcggccacaagggcacatacggcctgctgagacggagagaggactggcctagcagactgcagatgttcttcgccaataaccacgaccaggagttcgacccccctaaggtgtaccctcccgtccccgccgagaagagaaagcccatccgggtcctgagcctgttcgatggcatcgccaccggtctgctggtgctgaaggacctgggcatccaggtggataggtacattgcctccgaggtgtgcgaggactccatcaccgtgggaatggtgcgtcatcagggcaagatcatgtacgtgggcgacgtgcggagcgtgacacagaagcatatccaggagtggggccctttcgacctggtgatcggcggcagcccttgcaatgacctgagcatcgtgaacccagcccggaagggcctgtacgagggaaccggcagactgttcttcgagttttacagactgctgcacgacgcccggcctaaggaaggcgacgaccggcccttcttttggctgttcgagaatgtggtggccatgggagtcagcgacaagcgggatattagccggttcctggagagcaaccccgtgatgatcgatgccaaggaagtgagcgccgcccaccgggccagatacttctggggcaatctgcctggcatgaacagacccctggccagcaccgtgaacgacaagctggagctgcaggagtgcctggagcacggccggatcgccaagttcagcaaggtgagaaccatcaccacccgaagcaacagcatcaaacaaggcaaggaccagcactttcctgtgttcatgaacgagaaggaggacatcctgtggtgtaccgagatggagagagtgttcgggttcccagtccactacacagatgtcagcaacatgtctagactggccagacagagactgctgggaagaagctggtccgtccctgtgatcagacacctgttcgcccctctgaaggagtacttcgcctgcgtgagcagcggcaacagcaacgccaacagccggggccccagcttctctagcggcctggtgccactgtccctgagagggagccacatgggccccatggagatctacaaaaccgtgagcgcctggaagcggcagcctgtgcgcgtgctgagcctgtttcggaatatcgataaagtcctgaaaagcctgggattcctggagagcggctctggctccggcggtggcaccctgaagtacgtggaggatgtgacaaacgtggtcagacgggatgtggagaagtggggccccttcgatctggtgtacggcagcacccaacccctgggcagctcttgtgaccggtgccctggctggtacatgtttcagttccaccggatcctgcagtacgccctgccgagacaggagtcccagcggccattcttttggattttcatggacaacttgctgctgaccgaggatgaccaggaaactaccactcggttcctgcagaccgaagccgtgaccctgcaggacgtgagaggccgggactaccagaacgccatgcgggtgtggtccaacatccctggactgaaaagcaagcacgcacctctgacccctaaagaagaggagtacctgcaggcccaggtgcggagcagaagcaagctggacgcccctaaggtggatctgctggtgaagaattgcctcctgcccctgagagagtacttcaagtatttcagccagaatagtctgcccctgggaggcagcggcggcggcgccctggtgacatttgaggacgtcgccgtgcggttcacccaggaggaatgggctctgctggatccttctcagaaaatcctgtaccgggacgtgatgagagagacataccggaatctgacctccgtgggcatcaactgggaatgttgggaccttgaagcctgcttcagaagcctgggaagaaacctgagagtgcaggtggtgaagagaaagtgcgagctgaccaacagcggcccctgcgccgagggcggcccaagcagcggcgcccctcctcccagcggcggcagcccagccggctccccaacctctaccgaggagggcacctctgagtccgccacccccgagagcggccctggcacctccaccgagcccagcgagggcagcgcacccggcagccctgccggcagccccacctccacagaggagggaaccagcaccgagcccagcgaaggcagcgccccaggcaccagcaccgagcctagtgagcaggagattaaacggatcaacaagatcagaagaagacttgtgaaagacagcaacaccaagaaggccggcaagacaggccccatgaaaaccctgctggttagagtgatgacacccgatctgagagagcggctggaaaacctgagaaagaagcctgaaaatatcccccagcccatcagcaatacatctagagccaacctgaataagctgctgaccgattacaccgaaatgaagaaggcgatcctgcatgtgtactgggaagagttccagaaggaccctgtgggcctgatgagccgggtggcccagcctgccagcaagaagatcgatcagaacaagctgaaacctgagatggacgagaagggcaacctgaccaccgccggctttgcctgctctcagtgtggccagcccctgttcgtgtacaagctggagcaggtgtctgagaagggcaaggcttacaccaactacttcggacggtgcaatgtggccgagcacgaaaagctgatcctgctggcccagctgaagcccgagaaggatagcgacgaagccgtgacatatagcctgggaaagtttgggcagagggccctggatttctacagcattcatgtgaccaaggagtccacccaccccgtgaagcccctggcccagatcgccggaaacagatacgcctccggacctgtgggaaaggccctgagcgacgcatgtatgggcacaatcgcctccttcctgtctaagtaccaggacatcatcatcgaacaccagaaggtggtgaagggcaaccagaagagactggagagcctgcgggagctggccggcaaggaaaacctggaataccctagcgtgaccctgccacctcagcctcacaccaaggagggcgttgatgcctacaacgaagtgatcgcccgggtgcgaatgtgggtgaacctgaacctgtggcagaagctgaagctaagcagagatgatgccaagcctctgctgagactgaagggattcccttcctttcctctggtcgagagacaggccaacgaagtggactggtgggacatggtgtgtaacgtgaagaagctgatcaacgagaaaaaggaggatggcaaggtgttttggcagaatctggctggctacaagagacaggaagccctgagaccatacctgagcagcgaggaagatcggaagaagggaaagaaattcgctcggtaccagctgggcgacctgctgctgcacctggaaaagaagcacggcgaggactggggaaaggtgtacgacgaggcctgggagcggattgacaagaaagtggaaggcctgagcaagcacatcaagctggaagaggaacggagaagcgaggacgcccagagcaaggccgccctgaccgactggctgcgggctaaggccagcttcgtgatcgagggcctgaaggaggccgacaaggacgagttctgcagatgcgagctgaagctgcagaagtggtacggggacctgcggggaaagcccttcgccatcgaagccgagaacagcatcctggacatcagcggcttcagcaagcagtacaactgtgccttcatctggcagaaggacggcgtgaagaagctgaacctgtacctgatcatcaactacttcaagggcggcaagctgcggttcaagaagatcaaacctgaagccttcgaagccaacagattctacaccgtgatcaacaaaaagagcggcgagatcgtgcccatggaggtgaacttcaacttcgacgaccccaacctgatcatcctgcctctggcctttggcaagagacagggcagagaattcatctggaacgacctgctgtccctggaaaccggcagcctgaagctggccaacggaagagtgatcgagaagacactgtacaacagaagaacccggcaggatgagcctgccctgttcgtggccctgaccttcgagcggcgggaggtcctggactcctccaatatcaaaccaatgaacctgatcggcgtggcaagaggcgaaaacatccccgccgtgatcgccctgaccgaccccgagggctgcccactgagccggtttaaggatagcctgggaaacccaacccacatcctgagaatcggcgagagctataaggagaagcagcggaccatccaggccaagaaggaggtggagcagcggagagccggcggctacagccggaagtacgccagcaaagccaagaatctggcagacgatatggtgagaaacaccgctagagatctgctgtactacgccgtgacccaggatgccatgctgatcttcgccaacctgagccggggcttcggccggcagggcaagcggaccttcatggccgagagacagtacacacggatggaggactggctgaccgccaagctggcctacgagggcctgagcaagacctacctgtccaagacactggcccagtacacctccaagacatgcagcaactgtgggtttaccatcaccagcgccgactacgacagggtgctggagaagctgaagaagacagcaacaggctggatgaccacaattaacggcaaggagctgaaggtggagggccagattacctactacaacagatacaagagacagaacgtagtcaaggacctgtccgtcgagctggatagactgagcgaagaatctgtgaacaacgacatctcctcctggacaaagggcagaagcggagaagctctgagcctcctgaagaaaagattctcccatagacccgtgcaggagaagttcgtgtgcctgaactgcggcttcgagacacacgcagccgagcaagccgccctgaacatcgccagatcctggctgttcctgcggagccaggagtacaagaaataccagacaaacaagacaaccggcaacaccgataagagagccttcgtcgagacctggcagtccttttaccggaagaagcttaaggaggtgtggaaacctgccgtgcggtctggcggatctggcggaggctccatggtgaccttcgaggacgtggccgtgcacttcaccaagaccgagtggaccggcctgagccccgcccagagggccctgtacaggagcgtgatgctggagaacttcggcaacctgaccgccctgggctaccccgtgcccaagcccgccctgatcagcctgctggagggcggcgacatggcctggggcctggaggcccaggacgacgcccccgccgagaggaccaagaacatctgcaaggtgatcggcggcccaagcagcggcgcccctcctcccagcggcggcagcccagccggctccccaacctctaccgaggagggcacctctgagtccgccacccccgagagcggccctggcacctccaccgagcccagcgagggcagcgcacccggcagccctgccggcagccccacctccacagaggagggaaccagcaccgagcccagcgaaggcagcgccccaggcaccagcaccgagcctagtgagcaggagattaaacggatcaacaagatcagaagaagacttgtgaaagacagcaacaccaagaaggccggcaagacaggccccatgaaaaccctgctggttagagtgatgacacccgatctgagagagcggctggaaaacctgagaaagaagcctgaaaatatcccccagcccatcagcaatacatctagagccaacctgaataagctgctgaccgattacaccgaaatgaagaaggcgatcctgcatgtgtactgggaagagttccagaaggaccctgtgggcctgatgagccgggtggcccagcctgccagcaagaagatcgatcagaacaagctgaaacctgagatggacgagaagggcaacctgaccaccgccggctttgcctgctctcagtgtggccagcccctgttcgtgtacaagctggagcaggtgtctgagaagggcaaggcttacaccaactacttcggacggtgcaatgtggccgagcacgaaaagctgatcctgctggcccagctgaagcccgagaaggatagcgacgaagccgtgacatatagcctgggaaagtttgggcagagggccctggatttctacagcattcatgtgaccaaggagtccacccaccccgtgaagcccctggcccagatcgccggaaacagatacgcctccggacctgtgggaaaggccctgagcgacgcatgtatgggcacaatcgcctccttcctgtctaagtaccaggacatcatcatcgaacaccagaaggtggtgaagggcaaccagaagagactggagagcctgcgggagctggccggcaaggaaaacctggaataccctagcgtgaccctgccacctcagcctcacaccaaggagggcgttgatgcctacaacgaagtgatcgcccgggtgcgaatgtgggtgaacctgaacctgtggcagaagctgaagctaagcagagatgatgccaagcctctgctgagactgaagggattcccttcctttcctctggtcgagagacaggccaacgaagtggactggtgggacatggtgtgtaacgtgaagaagctgatcaacgagaaaaaggaggatggcaaggtgttttggcagaatctggctggctacaagagacaggaagccctgagaccatacctgagcagcgaggaagatcggaagaagggaaagaaattcgctcggtaccagctgggcgacctgctgctgcacctggaaaagaagcacggcgaggactggggaaaggtgtacgacgaggcctgggagcggattgacaagaaagtggaaggcctgagcaagcacatcaagctggaagaggaacggagaagcgaggacgcccagagcaaggccgccctgaccgactggctgcgggctaaggccagcttcgtgatcgagggcctgaaggaggccgacaaggacgagttctgcagatgcgagctgaagctgcagaagtggtacggggacctgcggggaaagcccttcgccatcgaagccgagaacagcatcctggacatcagcggcttcagcaagcagtacaactgtgccttcatctggcagaaggacggcgtgaagaagctgaacctgtacctgatcatcaactacttcaagggcggcaagctgcggttcaagaagatcaaacctgaagccttcgaagccaacagattctacaccgtgatcaacaaaaagagcggcgagatcgtgcccatggaggtgaacttcaacttcgacgaccccaacctgatcatcctgcctctggcctttggcaagagacagggcagagaattcatctggaacgacctgctgtccctggaaaccggcagcctgaagctggccaacggaagagtgatcgagaagacactgtacaacagaagaacccggcaggatgagcctgccctgttcgtggccctgaccttcgagcggcgggaggtcctggactcctccaatatcaaaccaatgaacctgatcggcgtggcaagaggcgaaaacatccccgccgtgatcgccctgaccgaccccgagggctgcccactgagccggtttaaggatagcctgggaaacccaacccacatcctgagaatcggcgagagctataaggagaagcagcggaccatccaggccaagaaggaggtggagcagcggagagccggcggctacagccggaagtacgccagcaaagccaagaatctggcagacgatatggtgagaaacaccgctagagatctgctgtactacgccgtgacccaggatgccatgctgatcttcgccaacctgagccggggcttcggccggcagggcaagcggaccttcatggccgagagacagtacacacggatggaggactggctgaccgccaagctggcctacgagggcctgagcaagacctacctgtccaagacactggcccagtacacctccaagacatgcagcaactgtgggtttaccatcaccagcgccgactacgacagggtgctggagaagctgaagaagacagcaacaggctggatgaccacaattaacggcaaggagctgaaggtggagggccagattacctactacaacagatacaagagacagaacgtagtcaaggacctgtccgtcgagctggatagactgagcgaagaatctgtgaacaacgacatctcctcctggacaaagggcagaagcggagaagctctgagcctcctgaagaaaagattctcccatagacccgtgcaggagaagttcgtgtgcctgaactgcggcttcgagacacacgcagccgagcaagccgccctgaacatcgccagatcctggctgttcctgcggagccaggagtacaagaaataccagacaaacaagacaaccggcaacaccgataagagagccttcgtcgagacctggcagtccttttaccggaagaagcttaaggaggtgtggaaacctgccgtgcggtctggcggatctggcggaggctcctatggtgaccttcgaggacgtggccgtgcacttcaccaagaccgagtggaccggcctgagccccgcccagagggccctgtacaggagcgtgatgctggagaacttcggcaacctgaccgccctgggctaccccgtgcccaagcccgccctgatcagcctgctggagggcggcgacatggcctggggcctggaggcccaggacgacgcccccgccgagaggaccaagaacatctgcaaggtgatcggatctggctccggcagcggccccaagaaaaagagaaaagtctaagctgccttctgcggggcttgccttctggccatgcccttcttctctcccttgcacctgtacctcttggtctttgaataaagcctgagtaggaaggctagcaaaaaaaaaaaaaaaaaaaaaaaaaaaaaaaaaaaaaaaaaaaaaaaaaaaaaaaaaaaaaaaaaaaaaaaaaaaaaaaa

SEQ ID NO: 16382 - RNA, 9485 nt, synthetic construct
  source 1..9485: mol_type = other RNA
aggaaataagagagaaaagaagagtaagaagaaatataagagccaccatggcccctaagaagaagcgtaaagtgagccggatggaacgcctcgtctacgaggtgcggcagaagtgcagaaacatcgaggacatctgcatctcctgcggatctctgaacgtgaccctggagcacccactgttcatcggcggcatgtgccagaactgtaaaaactgttttctggagtgtgcctatcaatacgacgatgacggctaccagagctactgcaccatctgttgcggcggaagagaggtgctgatgtgtggaaataacaactgctgccggtgcttctgcgtggaatgcgtggacctgctggtgggccccggcgccgcccaggccgctattaaggaagatccttggaactgctacatgtgcggccacaagggcacatacggcctgctgagacggagagaggactggcctagcagactgcagatgttcttcgccaataaccacgaccaggagttcgacccccctaaggtgtaccctcccgtccccgccgagaagagaaagcccatccgggtcctgagcctgttcgatggcatcgccaccggtctgctggtgctgaaggacctgggcatccaggtggataggtacattgcctccgaggtgtgcgaggactccatcaccgtgggaatggtgcgtcatcagggcaagatcatgtacgtgggcgacgtgcggagcgtgacacagaagcatatccaggagtggggccctttcgacctggtgatcggcggcagcccttgcaatgacctgagcatcgtgaacccagcccggaagggcctgtacgagggaaccggcagactgttcttcgagttttacagactgctgcacgacgcccggcctaaggaaggcgacgaccggcccttcttttggctgttcgagaatgtggtggccatgggagtcagcgacaagcgggatattagccggttcctggagagcaaccccgtgatgatcgatgccaaggaagtgagcgccgcccaccgggccagatacttctggggcaatctgcctggcatgaacagacccctggccagcaccgtgaacgacaagctggagctgcaggagtgcctggagcacggccggatcgccaagttcagcaaggtgagaaccatcaccacccgaagcaacagcatcaaacaaggcaaggaccagcactttcctgtgttcatgaacgagaaggaggacatcctgtggtgtaccgagatggagagagtgttcgggttcccagtccactacacagatgtcagcaacatgtctagactggccagacagagactgctgggaagaagctggtccgtccctgtgatcagacacctgttcgcccctctgaaggagtacttcgcctgcgtgagcagcggcaacagcaacgccaacagccggggccccagcttctctagcggcctggtgccactgtccctgagagggagccacatgggccccatggagatctacaaaaccgtgagcgcctggaagcggcagcctgtgcgcgtgctgagcctgtttcggaatatcgataaagtcctgaaaagcctgggattcctggagagcggctctggctccggcggtggcaccctgaagtacgtggaggatgtgacaaacgtggtcagacgggatgtggagaagtggggccccttcgatctggtgtacggcagcacccaacccctgggcagctcttgtgaccggtgccctggctggtacatgtttcagttccaccggatcctgcagtacgccctgccgagacaggagtcccagcggccattcttttggattttcatggacaacttgctgctgaccgaggatgaccaggaaactaccactcggttcctgcagaccgaagccgtgaccctgcaggacgtgagaggccgggactaccagaacgccatgcgggtgtggtccaacatccctggactgaaaagcaagcacgcacctctgacccctaaagaagaggagtacctgcaggcccaggtgcggagcagaagcaagctggacgcccctaaggtggatctgctggtgaagaattgcctcctgcccctgagagagtacttcaagtatttcagccagaatagtctgcccctgggaggcagcggcggcggcgccctggtgacatttgaggacgtcgccgtgcggttcacccaggaggaatgggctctgctggatccttctcagaaaatcctgtaccgggacgtgatgagagagacataccggaatctgacctccgtgggcatcaactgggaatgttgggaccttgaagcctgcttcagaagcctgggaagaaacctgagagtgcaggtggtgaagagaaagtgcgagctgaccaacagcggcccctgcgccgagggcggcccaagcagcggcgcccctcctcccagcggcggcagcccagccggctccccaacctctaccgaggagggcacctctgagtccgccacccccgagagcggccctggcacctccaccgagcccagcgagggcagcgcacccggcagccctgccggcagccccacctccacagaggagggaaccagcaccgagcccagcgaaggcagcgccccaggcaccagcaccgagcctagtgagcaggagattaaacggatcaacaagatcagaagaagacttgtgaaagacagcaacaccaagaaggccggcaagacaggccccatgaaaaccctgctggttagagtgatgacacccgatctgagagagcggctggaaaacctgagaaagaagcctgaaaatatcccccagcccatcagcaatacatctagagccaacctgaataagctgctgaccgattacaccgaaatgaagaaggcgatcctgcatgtgtactgggaagagttccagaaggaccctgtgggcctgatgagccgggtggcccagcctgccagcaagaagatcgatcagaacaagctgaaacctgagatggacgagaagggcaacctgaccaccgccggctttgcctgctctcagtgtggccagcccctgttcgtgtacaagctggagcaggtgtctgagaagggcaaggcttacaccaactacttcggacggtgcaatgtggccgagcacgaaaagctgatcctgctggcccagctgaagcccgagaaggatagcgacgaagccgtgacatatagcctgggaaagtttgggcagagggccctggatttctacagcattcatgtgaccaaggagtccacccaccccgtgaagcccctggcccagatcgccggaaacagatacgcctccggacctgtgggaaaggccctgagcgacgcatgtatgggcacaatcgcctccttcctgtctaagtaccaggacatcatcatcgaacaccagaaggtggtgaagggcaaccagaagagactggagagcctgcgggagctggccggcaaggaaaacctggaataccctagcgtgaccctgccacctcagcctcacaccaaggagggcgttgatgcctacaacgaagtgatcgcccgggtgcgaatgtgggtgaacctgaacctgtggcagaagctgaagctaagcagagatgatgccaagcctctgctgagactgaagggattcccttcctttcctctggtcgagagacaggccaacgaagtggactggtgggacatggtgtgtaacgtgaagaagctgatcaacgagaaaaaggaggatggcaaggtgttttggcagaatctggctggctacaagagacaggaagccctgagaccatacctgagcagcgaggaagatcggaagaagggaaagaaattcgctcggtaccagctgggcgacctgctgctgcacctggaaaagaagcacggcgaggactggggaaaggtgtacgacgaggcctgggagcggattgacaagaaagtggaaggcctgagcaagcacatcaagctggaagaggaacggagaagcgaggacgcccagagcaaggccgccctgaccgactggctgcgggctaaggccagcttcgtgatcgagggcctgaaggaggccgacaaggacgagttctgcagatgcgagctgaagctgcagaagtggtacggggacctgcggggaaagcccttcgccatcgaagccgagaacagcatcctggacatcagcggcttcagcaagcagtacaactgtgccttcatctggcagaaggacggcgtgaagaagctgaacctgtacctgatcatcaactacttcaagggcggcaagctgcggttcaagaagatcaaacctgaagccttcgaagccaacagattctacaccgtgatcaacaaaaagagcggcgagatcgtgcccatggaggtgaacttcaacttcgacgaccccaacctgatcatcctgcctctggcctttggcaagagacagggcagagaattcatctggaacgacctgctgtccctggaaaccggcagcctgaagctggccaacggaagagtgatcgagaagacactgtacaacagaagaacccggcaggatgagcctgccctgttcgtggccctgaccttcgagcggcgggaggtcctggactcctccaatatcaaaccaatgaacctgatcggcgtggcaagaggcgaaaacatccccgccgtgatcgccctgaccgaccccgagggctgcccactgagccggtttaaggatagcctgggaaacccaacccacatcctgagaatcggcgagagctataaggagaagcagcggaccatccaggccaagaaggaggtggagcagcggagagccggcggctacagccggaagtacgccagcaaagccaagaatctggcagacgatatggtgagaaacaccgctagagatctgctgtactacgccgtgacccaggatgccatgctgatcttcgccaacctgagccggggcttcggccggcagggcaagcggaccttcatggccgagagacagtacacacggatggaggactggctgaccgccaagctggcctacgagggcctgagcaagacctacctgtccaagacactggcccagtacacctccaagacatgcagcaactgtgggtttaccatcaccagcgccgactacgacagggtgctggagaagctgaagaagacagcaacaggctggatgaccacaattaacggcaaggagctgaaggtggagggccagattacctactacaacagatacaagagacagaacgtagtcaaggacctgtccgtcgagctggatagactgagcgaagaatctgtgaacaacgacatctcctcctggacaaagggcagaagcggagaagctctgagcctcctgaagaaaagattctcccatagacccgtgcaggagaagttcgtgtgcctgaactgcggcttcgagacacacgcagccgagcaagccgccctgaacatcgccagatcctggctgttcctgcggagccaggagtacaagaaataccagacaaacaagacaaccggcaacaccgataagagagccttcgtcgagacctggcagtccttttaccggaagaagcttaaggaggtgtggaaacctgccgtgcggtctggcggatctggcggaggctccagccaggtgagcgtgaccttcgaggacgtggccgtgctgttcaccagggacgagtggaggaagctggcccccagccagaggaacctgtaccaggacgtgatgctggagaactacagcaacctggtgagcctgggcctgcccttcagcaagcccgaggtgatcagcctgctgcagcagggcgaggacccctggaaggtggagaaggagagccccggcggcagcagcctgggcgagtggagcagcggcggcccaagcagcggcgcccctcctcccagcggcggcagcccagccggctccccaacctctaccgaggagggcacctctgagtccgccacccccgagagcggccctggcacctccaccgagcccagcgagggcagcgcacccggcagccctgccggcagccccacctccacagaggagggaaccagcaccgagcccagcgaaggcagcgccccaggcaccagcaccgagcctagtgagcaggagattaaacggatcaacaagatcagaagaagacttgtgaaagacagcaacaccaagaaggccggcaagacaggccccatgaaaaccctgctggttagagtgatgacacccgatctgagagagcggctggaaaacctgagaaagaagcctgaaaatatcccccagcccatcagcaatacatctagagccaacctgaataagctgctgaccgattacaccgaaatgaagaaggcgatcctgcatgtgtactgggaagagttccagaaggaccctgtgggcctgatgagccgggtggcccagcctgccagcaagaagatcgatcagaacaagctgaaacctgagatggacgagaagggcaacctgaccaccgccggctttgcctgctctcagtgtggccagcccctgttcgtgtacaagctggagcaggtgtctgagaagggcaaggcttacaccaactacttcggacggtgcaatgtggccgagcacgaaaagctgatcctgctggcccagctgaagcccgagaaggatagcgacgaagccgtgacatatagcctgggaaagtttgggcagagggccctggatttctacagcattcatgtgaccaaggagtccacccaccccgtgaagcccctggcccagatcgccggaaacagatacgcctccggacctgtgggaaaggccctgagcgacgcatgtatgggcacaatcgcctccttcctgtctaagtaccaggacatcatcatcgaacaccagaaggtggtgaagggcaaccagaagagactggagagcctgcgggagctggccggcaaggaaaacctggaataccctagcgtgaccctgccacctcagcctcacaccaaggagggcgttgatgcctacaacgaagtgatcgcccgggtgcgaatgtgggtgaacctgaacctgtggcagaagctgaagctaagcagagatgatgccaagcctctgctgagactgaagggattcccttcctttcctctggtcgagagacaggccaacgaagtggactggtgggacatggtgtgtaacgtgaagaagctgatcaacgagaaaaaggaggatggcaaggtgttttggcagaatctggctggctacaagagacaggaagccctgagaccatacctgagcagcgaggaagatcggaagaagggaaagaaattcgctcggtaccagctgggcgacctgctgctgcacctggaaaagaagcacggcgaggactggggaaaggtgtacgacgaggcctgggagcggattgacaagaaagtggaaggcctgagcaagcacatcaagctggaagaggaacggagaagcgaggacgcccagagcaaggccgccctgaccgactggctgcgggctaaggccagcttcgtgatcgagggcctgaaggaggccgacaaggacgagttctgcagatgcgagctgaagctgcagaagtggtacggggacctgcggggaaagcccttcgccatcgaagccgagaacagcatcctggacatcagcggcttcagcaagcagtacaactgtgccttcatctggcagaaggacggcgtgaagaagctgaacctgtacctgatcatcaactacttcaagggcggcaagctgcggttcaagaagatcaaacctgaagccttcgaagccaacagattctacaccgtgatcaacaaaaagagcggcgagatcgtgcccatggaggtgaacttcaacttcgacgaccccaacctgatcatcctgcctctggcctttggcaagagacagggcagagaattcatctggaacgacctgctgtccctggaaaccggcagcctgaagctggccaacggaagagtgatcgagaagacactgtacaacagaagaacccggcaggatgagcctgccctgttcgtggccctgaccttcgagcggcgggaggtcctggactcctccaatatcaaaccaatgaacctgatcggcgtggcaagaggcgaaaacatccccgccgtgatcgccctgaccgaccccgagggctgcccactgagccggtttaaggatagcctgggaaacccaacccacatcctgagaatcggcgagagctataaggagaagcagcggaccatccaggccaagaaggaggtggagcagcggagagccggcggctacagccggaagtacgccagcaaagccaagaatctggcagacgatatggtgagaaacaccgctagagatctgctgtactacgccgtgacccaggatgccatgctgatcttcgccaacctgagccggggcttcggccggcagggcaagcggaccttcatggccgagagacagtacacacggatggaggactggctgaccgccaagctggcctacgagggcctgagcaagacctacctgtccaagacactggcccagtacacctccaagacatgcagcaactgtgggtttaccatcaccagcgccgactacgacagggtgctggagaagctgaagaagacagcaacaggctggatgaccacaattaacggcaaggagctgaaggtggagggccagattacctactacaacagatacaagagacagaacgtagtcaaggacctgtccgtcgagctggatagactgagcgaagaatctgtgaacaacgacatctcctcctggacaaagggcagaagcggagaagctctgagcctcctgaagaaaagattctcccatagacccgtgcaggagaagttcgtgtgcctgaactgcggcttcgagacacacgcagccgagcaagccgccctgaacatcgccagatcctggctgttcctgcggagccaggagtacaagaaataccagacaaacaagacaaccggcaacaccgataagagagccttcgtcgagacctggcagtccttttaccggaagaagcttaaggaggtgtggaaacctgccgtgcggtctggcggatctggcggaggctcctagccaggtgagcgtgaccttcgaggacgtggccgtgctgttcaccagggacgagtggaggaagctggcccccagccagaggaacctgtaccaggacgtgatgctggagaactacagcaacctggtgagcctgggcctgcccttcagcaagcccgaggtgatcagcctgctgcagcagggcgaggacccctggaaggtggagaaggagagccccggcggcagcagcctgggcgagtggagcagcggatctggctccggcagcggccccaagaaaaagagaaaagtctaagctgccttctgcggggcttgccttctggccatgcccttcttctctcccttgcacctgtacctcttggtctttgaataaagcctgagtaggaaggctagcaaaaaaaaaaaaaaaaaaaaaaaaaaaaaaaaaaaaaaaaaaaaaaaaaaaaaaaaaaaaaaaaaaaaaaaaaaaaaaaa

SEQ ID NO: 16383 - RNA, 9485 nt, synthetic construct
  source 1..9485: mol_type = other RNA
aggaaataagagagaaaagaagagtaagaagaaatataagagccaccatggcccctaagaagaagcgtaaagtgagccggatggaacgcctcgtctacgaggtgcggcagaagtgcagaaacatcgaggacatctgcatctcctgcggatctctgaacgtgaccctggagcacccactgttcatcggcggcatgtgccagaactgtaaaaactgttttctggagtgtgcctatcaatacgacgatgacggctaccagagctactgcaccatctgttgcggcggaagagaggtgctgatgtgtggaaataacaactgctgccggtgcttctgcgtggaatgcgtggacctgctggtgggccccggcgccgcccaggccgctattaaggaagatccttggaactgctacatgtgcggccacaagggcacatacggcctgctgagacggagagaggactggcctagcagactgcagatgttcttcgccaataaccacgaccaggagttcgacccccctaaggtgtaccctcccgtccccgccgagaagagaaagcccatccgggtcctgagcctgttcgatggcatcgccaccggtctgctggtgctgaaggacctgggcatccaggtggataggtacattgcctccgaggtgtgcgaggactccatcaccgtgggaatggtgcgtcatcagggcaagatcatgtacgtgggcgacgtgcggagcgtgacacagaagcatatccaggagtggggccctttcgacctggtgatcggcggcagcccttgcaatgacctgagcatcgtgaacccagcccggaagggcctgtacgagggaaccggcagactgttcttcgagttttacagactgctgcacgacgcccggcctaaggaaggcgacgaccggcccttcttttggctgttcgagaatgtggtggccatgggagtcagcgacaagcgggatattagccggttcctggagagcaaccccgtgatgatcgatgccaaggaagtgagcgccgcccaccgggccagatacttctggggcaatctgcctggcatgaacagacccctggccagcaccgtgaacgacaagctggagctgcaggagtgcctggagcacggccggatcgccaagttcagcaaggtgagaaccatcaccacccgaagcaacagcatcaaacaaggcaaggaccagcactttcctgtgttcatgaacgagaaggaggacatcctgtggtgtaccgagatggagagagtgttcgggttcccagtccactacacagatgtcagcaacatgtctagactggccagacagagactgctgggaagaagctggtccgtccctgtgatcagacacctgttcgcccctctgaaggagtacttcgcctgcgtgagcagcggcaacagcaacgccaacagccggggccccagcttctctagcggcctggtgccactgtccctgagagggagccacatgggccccatggagatctacaaaaccgtgagcgcctggaagcggcagcctgtgcgcgtgctgagcctgtttcggaatatcgataaagtcctgaaaagcctgggattcctggagagcggctctggctccggcggtggcaccctgaagtacgtggaggatgtgacaaacgtggtcagacgggatgtggagaagtggggccccttcgatctggtgtacggcagcacccaacccctgggcagctcttgtgaccggtgccctggctggtacatgtttcagttccaccggatcctgcagtacgccctgccgagacaggagtcccagcggccattcttttggattttcatggacaacttgctgctgaccgaggatgaccaggaaactaccactcggttcctgcagaccgaagccgtgaccctgcaggacgtgagaggccgggactaccagaacgccatgcgggtgtggtccaacatccctggactgaaaagcaagcacgcacctctgacccctaaagaagaggagtacctgcaggcccaggtgcggagcagaagcaagctggacgcccctaaggtggatctgctggtgaagaattgcctcctgcccctgagagagtacttcaagtatttcagccagaatagtctgcccctgggaggcagcggcggcggcgccctggtgacatttgaggacgtcgccgtgcggttcacccaggaggaatgggctctgctggatccttctcagaaaatcctgtaccgggacgtgatgagagagacataccggaatctgacctccgtgggcatcaactgggaatgttgggaccttgaagcctgcttcagaagcctgggaagaaacctgagagtgcaggtggtgaagagaaagtgcgagctgaccaacagcggcccctgcgccgagggcggcccaagcagcggcgcccctcctcccagcggcggcagcccagccggctccccaacctctaccgaggagggcacctctgagtccgccacccccgagagcggccctggcacctccaccgagcccagcgagggcagcgcacccggcagccctgccggcagccccacctccacagaggagggaaccagcaccgagcccagcgaaggcagcgccccaggcaccagcaccgagcctagtgagcaggagattaaacggatcaacaagatcagaagaagacttgtgaaagacagcaacaccaagaaggccggcaagacaggccccatgaaaaccctgctggttagagtgatgacacccgatctgagagagcggctggaaaacctgagaaagaagcctgaaaatatcccccagcccatcagcaatacatctagagccaacctgaataagctgctgaccgattacaccgaaatgaagaaggcgatcctgcatgtgtactgggaagagttccagaaggaccctgtgggcctgatgagccgggtggcccagcctgccagcaagaagatcgatcagaacaagctgaaacctgagatggacgagaagggcaacctgaccaccgccggctttgcctgctctcagtgtggccagcccctgttcgtgtacaagctggagcaggtgtctgagaagggcaaggcttacaccaactacttcggacggtgcaatgtggccgagcacgaaaagctgatcctgctggcccagctgaagcccgagaaggatagcgacgaagccgtgacatatagcctgggaaagtttgggcagagggccctggatttctacagcattcatgtgaccaaggagtccacccaccccgtgaagcccctggcccagatcgccggaaacagatacgcctccggacctgtgggaaaggccctgagcgacgcatgtatgggcacaatcgcctccttcctgtctaagtaccaggacatcatcatcgaacaccagaaggtggtgaagggcaaccagaagagactggagagcctgcgggagctggccggcaaggaaaacctggaataccctagcgtgaccctgccacctcagcctcacaccaaggagggcgttgatgcctacaacgaagtgatcgcccgggtgcgaatgtgggtgaacctgaacctgtggcagaagctgaagctaagcagagatgatgccaagcctctgctgagactgaagggattcccttcctttcctctggtcgagagacaggccaacgaagtggactggtgggacatggtgtgtaacgtgaagaagctgatcaacgagaaaaaggaggatggcaaggtgttttggcagaatctggctggctacaagagacaggaagccctgagaccatacctgagcagcgaggaagatcggaagaagggaaagaaattcgctcggtaccagctgggcgacctgctgctgcacctggaaaagaagcacggcgaggactggggaaaggtgtacgacgaggcctgggagcggattgacaagaaagtggaaggcctgagcaagcacatcaagctggaagaggaacggagaagcgaggacgcccagagcaaggccgccctgaccgactggctgcgggctaaggccagcttcgtgatcgagggcctgaaggaggccgacaaggacgagttctgcagatgcgagctgaagctgcagaagtggtacggggacctgcggggaaagcccttcgccatcgaagccgagaacagcatcctggacatcagcggcttcagcaagcagtacaactgtgccttcatctggcagaaggacggcgtgaagaagctgaacctgtacctgatcatcaactacttcaagggcggcaagctgcggttcaagaagatcaaacctgaagccttcgaagccaacagattctacaccgtgatcaacaaaaagagcggcgagatcgtgcccatggaggtgaacttcaacttcgacgaccccaacctgatcatcctgcctctggcctttggcaagagacagggcagagaattcatctggaacgacctgctgtccctggaaaccggcagcctgaagctggccaacggaagagtgatcgagaagacactgtacaacagaagaacccggcaggatgagcctgccctgttcgtggccctgaccttcgagcggcgggaggtcctggactcctccaatatcaaaccaatgaacctgatcggcgtggcaagaggcgaaaacatccccgccgtgatcgccctgaccgaccccgagggctgcccactgagccggtttaaggatagcctgggaaacccaacccacatcctgagaatcggcgagagctataaggagaagcagcggaccatccaggccaagaaggaggtggagcagcggagagccggcggctacagccggaagtacgccagcaaagccaagaatctggcagacgatatggtgagaaacaccgctagagatctgctgtactacgccgtgacccaggatgccatgctgatcttcgccaacctgagccggggcttcggccggcagggcaagcggaccttcatggccgagagacagtacacacggatggaggactggctgaccgccaagctggcctacgagggcctgagcaagacctacctgtccaagacactggcccagtacacctccaagacatgcagcaactgtgggtttaccatcaccagcgccgactacgacagggtgctggagaagctgaagaagacagcaacaggctggatgaccacaattaacggcaaggagctgaaggtggagggccagattacctactacaacagatacaagagacagaacgtagtcaaggacctgtccgtcgagctggatagactgagcgaagaatctgtgaacaacgacatctcctcctggacaaagggcagaagcggagaagctctgagcctcctgaagaaaagattctcccatagacccgtgcaggagaagttcgtgtgcctgaactgcggcttcgagacacacgcagccgagcaagccgccctgaacatcgccagatcctggctgttcctgcggagccaggagtacaagaaataccagacaaacaagacaaccggcaacaccgataagagagccttcgtcgagacctggcagtccttttaccggaagaagcttaaggaggtgtggaaacctgccgtgcggtctggcggatctggcggaggctccaggcaggagagggtgaccttcggcgacgtggccgtggacttcaccctggacgagtgggtgtgcctggacagcgcccagaaggccctgtacagggacgtgatgctggagaactacggccacctggtgtgcctgggcctggccggcgccaagcccgccgtgatccagaggctggagaggggcgaggccgcctggtgccccggcgtgcccggcagcaggctgcccgactgggagaccaggctggagggcggcccaagcagcggcgcccctcctcccagcggcggcagcccagccggctccccaacctctaccgaggagggcacctctgagtccgccacccccgagagcggccctggcacctccaccgagcccagcgagggcagcgcacccggcagccctgccggcagccccacctccacagaggagggaaccagcaccgagcccagcgaaggcagcgccccaggcaccagcaccgagcctagtgagcaggagattaaacggatcaacaagatcagaagaagacttgtgaaagacagcaacaccaagaaggccggcaagacaggccccatgaaaaccctgctggttagagtgatgacacccgatctgagagagcggctggaaaacctgagaaagaagcctgaaaatatcccccagcccatcagcaatacatctagagccaacctgaataagctgctgaccgattacaccgaaatgaagaaggcgatcctgcatgtgtactgggaagagttccagaaggaccctgtgggcctgatgagccgggtggcccagcctgccagcaagaagatcgatcagaacaagctgaaacctgagatggacgagaagggcaacctgaccaccgccggctttgcctgctctcagtgtggccagcccctgttcgtgtacaagctggagcaggtgtctgagaagggcaaggcttacaccaactacttcggacggtgcaatgtggccgagcacgaaaagctgatcctgctggcccagctgaagcccgagaaggatagcgacgaagccgtgacatatagcctgggaaagtttgggcagagggccctggatttctacagcattcatgtgaccaaggagtccacccaccccgtgaagcccctggcccagatcgccggaaacagatacgcctccggacctgtgggaaaggccctgagcgacgcatgtatgggcacaatcgcctccttcctgtctaagtaccaggacatcatcatcgaacaccagaaggtggtgaagggcaaccagaagagactggagagcctgcgggagctggccggcaaggaaaacctggaataccctagcgtgaccctgccacctcagcctcacaccaaggagggcgttgatgcctacaacgaagtgatcgcccgggtgcgaatgtgggtgaacctgaacctgtggcagaagctgaagctaagcagagatgatgccaagcctctgctgagactgaagggattcccttcctttcctctggtcgagagacaggccaacgaagtggactggtgggacatggtgtgtaacgtgaagaagctgatcaacgagaaaaaggaggatggcaaggtgttttggcagaatctggctggctacaagagacaggaagccctgagaccatacctgagcagcgaggaagatcggaagaagggaaagaaattcgctcggtaccagctgggcgacctgctgctgcacctggaaaagaagcacggcgaggactggggaaaggtgtacgacgaggcctgggagcggattgacaagaaagtggaaggcctgagcaagcacatcaagctggaagaggaacggagaagcgaggacgcccagagcaaggccgccctgaccgactggctgcgggctaaggccagcttcgtgatcgagggcctgaaggaggccgacaaggacgagttctgcagatgcgagctgaagctgcagaagtggtacggggacctgcggggaaagcccttcgccatcgaagccgagaacagcatcctggacatcagcggcttcagcaagcagtacaactgtgccttcatctggcagaaggacggcgtgaagaagctgaacctgtacctgatcatcaactacttcaagggcggcaagctgcggttcaagaagatcaaacctgaagccttcgaagccaacagattctacaccgtgatcaacaaaaagagcggcgagatcgtgcccatggaggtgaacttcaacttcgacgaccccaacctgatcatcctgcctctggcctttggcaagagacagggcagagaattcatctggaacgacctgctgtccctggaaaccggcagcctgaagctggccaacggaagagtgatcgagaagacactgtacaacagaagaacccggcaggatgagcctgccctgttcgtggccctgaccttcgagcggcgggaggtcctggactcctccaatatcaaaccaatgaacctgatcggcgtggcaagaggcgaaaacatccccgccgtgatcgccctgaccgaccccgagggctgcccactgagccggtttaaggatagcctgggaaacccaacccacatcctgagaatcggcgagagctataaggagaagcagcggaccatccaggccaagaaggaggtggagcagcggagagccggcggctacagccggaagtacgccagcaaagccaagaatctggcagacgatatggtgagaaacaccgctagagatctgctgtactacgccgtgacccaggatgccatgctgatcttcgccaacctgagccggggcttcggccggcagggcaagcggaccttcatggccgagagacagtacacacggatggaggactggctgaccgccaagctggcctacgagggcctgagcaagacctacctgtccaagacactggcccagtacacctccaagacatgcagcaactgtgggtttaccatcaccagcgccgactacgacagggtgctggagaagctgaagaagacagcaacaggctggatgaccacaattaacggcaaggagctgaaggtggagggccagattacctactacaacagatacaagagacagaacgtagtcaaggacctgtccgtcgagctggatagactgagcgaagaatctgtgaacaacgacatctcctcctggacaaagggcagaagcggagaagctctgagcctcctgaagaaaagattctcccatagacccgtgcaggagaagttcgtgtgcctgaactgcggcttcgagacacacgcagccgagcaagccgccctgaacatcgccagatcctggctgttcctgcggagccaggagtacaagaaataccagacaaacaagacaaccggcaacaccgataagagagccttcgtcgagacctggcagtccttttaccggaagaagcttaaggaggtgtggaaacctgccgtgcggtctggcggatctggcggaggctcctaggcaggagagggtgaccttcggcgacgtggccgtggacttcaccctggacgagtgggtgtgcctggacagcgcccagaaggccctgtacagggacgtgatgctggagaactacggccacctggtgtgcctgggcctggccggcgccaagcccgccgtgatccagaggctggagaggggcgaggccgcctggtgccccggcgtgcccggcagcaggctgcccgactgggagaccaggctggagggatctggctccggcagcggccccaagaaaaagagaaaagtctaagctgccttctgcggggcttgccttctggccatgcccttcttctctcccttgcacctgtacctcttggtctttgaataaagcctgagtaggaaggctagcaaaaaaaaaaaaaaaaaaaaaaaaaaaaaaaaaaaaaaaaaaaaaaaaaaaaaaaaaaaaaaaaaaaaaaaaaaaaaaaa

SEQ ID NO: 16384 - RNA, 9485 nt, synthetic construct
  source 1..9485: mol_type = other RNA
aggaaataagagagaaaagaagagtaagaagaaatataagagccaccatggcccctaagaagaagcgtaaagtgagccggatggaacgcctcgtctacgaggtgcggcagaagtgcagaaacatcgaggacatctgcatctcctgcggatctctgaacgtgaccctggagcacccactgttcatcggcggcatgtgccagaactgtaaaaactgttttctggagtgtgcctatcaatacgacgatgacggctaccagagctactgcaccatctgttgcggcggaagagaggtgctgatgtgtggaaataacaactgctgccggtgcttctgcgtggaatgcgtggacctgctggtgggccccggcgccgcccaggccgctattaaggaagatccttggaactgctacatgtgcggccacaagggcacatacggcctgctgagacggagagaggactggcctagcagactgcagatgttcttcgccaataaccacgaccaggagttcgacccccctaaggtgtaccctcccgtccccgccgagaagagaaagcccatccgggtcctgagcctgttcgatggcatcgccaccggtctgctggtgctgaaggacctgggcatccaggtggataggtacattgcctccgaggtgtgcgaggactccatcaccgtgggaatggtgcgtcatcagggcaagatcatgtacgtgggcgacgtgcggagcgtgacacagaagcatatccaggagtggggccctttcgacctggtgatcggcggcagcccttgcaatgacctgagcatcgtgaacccagcccggaagggcctgtacgagggaaccggcagactgttcttcgagttttacagactgctgcacgacgcccggcctaaggaaggcgacgaccggcccttcttttggctgttcgagaatgtggtggccatgggagtcagcgacaagcgggatattagccggttcctggagagcaaccccgtgatgatcgatgccaaggaagtgagcgccgcccaccgggccagatacttctggggcaatctgcctggcatgaacagacccctggccagcaccgtgaacgacaagctggagctgcaggagtgcctggagcacggccggatcgccaagttcagcaaggtgagaaccatcaccacccgaagcaacagcatcaaacaaggcaaggaccagcactttcctgtgttcatgaacgagaaggaggacatcctgtggtgtaccgagatggagagagtgttcgggttcccagtccactacacagatgtcagcaacatgtctagactggccagacagagactgctgggaagaagctggtccgtccctgtgatcagacacctgttcgcccctctgaaggagtacttcgcctgcgtgagcagcggcaacagcaacgccaacagccggggccccagcttctctagcggcctggtgccactgtccctgagagggagccacatgggccccatggagatctacaaaaccgtgagcgcctggaagcggcagcctgtgcgcgtgctgagcctgtttcggaatatcgataaagtcctgaaaagcctgggattcctggagagcggctctggctccggcggtggcaccctgaagtacgtggaggatgtgacaaacgtggtcagacgggatgtggagaagtggggccccttcgatctggtgtacggcagcacccaacccctgggcagctcttgtgaccggtgccctggctggtacatgtttcagttccaccggatcctgcagtacgccctgccgagacaggagtcccagcggccattcttttggattttcatggacaacttgctgctgaccgaggatgaccaggaaactaccactcggttcctgcagaccgaagccgtgaccctgcaggacgtgagaggccgggactaccagaacgccatgcgggtgtggtccaacatccctggactgaaaagcaagcacgcacctctgacccctaaagaagaggagtacctgcaggcccaggtgcggagcagaagcaagctggacgcccctaaggtggatctgctggtgaagaattgcctcctgcccctgagagagtacttcaagtatttcagccagaatagtctgcccctgggaggcagcggcggcggcgccctggtgacatttgaggacgtcgccgtgcggttcacccaggaggaatgggctctgctggatccttctcagaaaatcctgtaccgggacgtgatgagagagacataccggaatctgacctccgtgggcatcaactgggaatgttgggaccttgaagcctgcttcagaagcctgggaagaaacctgagagtgcaggtggtgaagagaaagtgcgagctgaccaacagcggcccctgcgccgagggcggcccaagcagcggcgcccctcctcccagcggcggcagcccagccggctccccaacctctaccgaggagggcacctctgagtccgccacccccgagagcggccctggcacctccaccgagcccagcgagggcagcgcacccggcagccctgccggcagccccacctccacagaggagggaaccagcaccgagcccagcgaaggcagcgccccaggcaccagcaccgagcctagtgagcaggagattaaacggatcaacaagatcagaagaagacttgtgaaagacagcaacaccaagaaggccggcaagacaggccccatgaaaaccctgctggttagagtgatgacacccgatctgagagagcggctggaaaacctgagaaagaagcctgaaaatatcccccagcccatcagcaatacatctagagccaacctgaataagctgctgaccgattacaccgaaatgaagaaggcgatcctgcatgtgtactgggaagagttccagaaggaccctgtgggcctgatgagccgggtggcccagcctgccagcaagaagatcgatcagaacaagctgaaacctgagatggacgagaagggcaacctgaccaccgccggctttgcctgctctcagtgtggccagcccctgttcgtgtacaagctggagcaggtgtctgagaagggcaaggcttacaccaactacttcggacggtgcaatgtggccgagcacgaaaagctgatcctgctggcccagctgaagcccgagaaggatagcgacgaagccgtgacatatagcctgggaaagtttgggcagagggccctggatttctacagcattcatgtgaccaaggagtccacccaccccgtgaagcccctggcccagatcgccggaaacagatacgcctccggacctgtgggaaaggccctgagcgacgcatgtatgggcacaatcgcctccttcctgtctaagtaccaggacatcatcatcgaacaccagaaggtggtgaagggcaaccagaagagactggagagcctgcgggagctggccggcaaggaaaacctggaataccctagcgtgaccctgccacctcagcctcacaccaaggagggcgttgatgcctacaacgaagtgatcgcccgggtgcgaatgtgggtgaacctgaacctgtggcagaagctgaagctaagcagagatgatgccaagcctctgctgagactgaagggattcccttcctttcctctggtcgagagacaggccaacgaagtggactggtgggacatggtgtgtaacgtgaagaagctgatcaacgagaaaaaggaggatggcaaggtgttttggcagaatctggctggctacaagagacaggaagccctgagaccatacctgagcagcgaggaagatcggaagaagggaaagaaattcgctcggtaccagctgggcgacctgctgctgcacctggaaaagaagcacggcgaggactggggaaaggtgtacgacgaggcctgggagcggattgacaagaaagtggaaggcctgagcaagcacatcaagctggaagaggaacggagaagcgaggacgcccagagcaaggccgccctgaccgactggctgcgggctaaggccagcttcgtgatcgagggcctgaaggaggccgacaaggacgagttctgcagatgcgagctgaagctgcagaagtggtacggggacctgcggggaaagcccttcgccatcgaagccgagaacagcatcctggacatcagcggcttcagcaagcagtacaactgtgccttcatctggcagaaggacggcgtgaagaagctgaacctgtacctgatcatcaactacttcaagggcggcaagctgcggttcaagaagatcaaacctgaagccttcgaagccaacagattctacaccgtgatcaacaaaaagagcggcgagatcgtgcccatggaggtgaacttcaacttcgacgaccccaacctgatcatcctgcctctggcctttggcaagagacagggcagagaattcatctggaacgacctgctgtccctggaaaccggcagcctgaagctggccaacggaagagtgatcgagaagacactgtacaacagaagaacccggcaggatgagcctgccctgttcgtggccctgaccttcgagcggcgggaggtcctggactcctccaatatcaaaccaatgaacctgatcggcgtggcaagaggcgaaaacatccccgccgtgatcgccctgaccgaccccgagggctgcccactgagccggtttaaggatagcctgggaaacccaacccacatcctgagaatcggcgagagctataaggagaagcagcggaccatccaggccaagaaggaggtggagcagcggagagccggcggctacagccggaagtacgccagcaaagccaagaatctggcagacgatatggtgagaaacaccgctagagatctgctgtactacgccgtgacccaggatgccatgctgatcttcgccaacctgagccggggcttcggccggcagggcaagcggaccttcatggccgagagacagtacacacggatggaggactggctgaccgccaagctggcctacgagggcctgagcaagacctacctgtccaagacactggcccagtacacctccaagacatgcagcaactgtgggtttaccatcaccagcgccgactacgacagggtgctggagaagctgaagaagacagcaacaggctggatgaccacaattaacggcaaggagctgaaggtggagggccagattacctactacaacagatacaagagacagaacgtagtcaaggacctgtccgtcgagctggatagactgagcgaagaatctgtgaacaacgacatctcctcctggacaaagggcagaagcggagaagctctgagcctcctgaagaaaagattctcccatagacccgtgcaggagaagttcgtgtgcctgaactgcggcttcgagacacacgcagccgagcaagccgccctgaacatcgccagatcctggctgttcctgcggagccaggagtacaagaaataccagacaaacaagacaaccggcaacaccgataagagagccttcgtcgagacctggcagtccttttaccggaagaagcttaaggaggtgtggaaacctgccgtgcggtctggcggatctggcggaggctccagcgccgccagcgtgaccttcagggacgtggccgtggacttcagcagggaggagtggagcaggctggacgccgcccagagggccctgtacagggacgtgatgtgggagacctacgagaacctggtgagcaccggcatccccgtgagcaggctggacgtgatcagcctgctggccaagcaggaggcccagtggacccccgaggaggtgcccggctggaccagccccgacagcttcagcgaggagggcggcccaagcagcggcgcccctcctcccagcggcggcagcccagccggctccccaacctctaccgaggagggcacctctgagtccgccacccccgagagcggccctggcacctccaccgagcccagcgagggcagcgcacccggcagccctgccggcagccccacctccacagaggagggaaccagcaccgagcccagcgaaggcagcgccccaggcaccagcaccgagcctagtgagcaggagattaaacggatcaacaagatcagaagaagacttgtgaaagacagcaacaccaagaaggccggcaagacaggccccatgaaaaccctgctggttagagtgatgacacccgatctgagagagcggctggaaaacctgagaaagaagcctgaaaatatcccccagcccatcagcaatacatctagagccaacctgaataagctgctgaccgattacaccgaaatgaagaaggcgatcctgcatgtgtactgggaagagttccagaaggaccctgtgggcctgatgagccgggtggcccagcctgccagcaagaagatcgatcagaacaagctgaaacctgagatggacgagaagggcaacctgaccaccgccggctttgcctgctctcagtgtggccagcccctgttcgtgtacaagctggagcaggtgtctgagaagggcaaggcttacaccaactacttcggacggtgcaatgtggccgagcacgaaaagctgatcctgctggcccagctgaagcccgagaaggatagcgacgaagccgtgacatatagcctgggaaagtttgggcagagggccctggatttctacagcattcatgtgaccaaggagtccacccaccccgtgaagcccctggcccagatcgccggaaacagatacgcctccggacctgtgggaaaggccctgagcgacgcatgtatgggcacaatcgcctccttcctgtctaagtaccaggacatcatcatcgaacaccagaaggtggtgaagggcaaccagaagagactggagagcctgcgggagctggccggcaaggaaaacctggaataccctagcgtgaccctgccacctcagcctcacaccaaggagggcgttgatgcctacaacgaagtgatcgcccgggtgcgaatgtgggtgaacctgaacctgtggcagaagctgaagctaagcagagatgatgccaagcctctgctgagactgaagggattcccttcctttcctctggtcgagagacaggccaacgaagtggactggtgggacatggtgtgtaacgtgaagaagctgatcaacgagaaaaaggaggatggcaaggtgttttggcagaatctggctggctacaagagacaggaagccctgagaccatacctgagcagcgaggaagatcggaagaagggaaagaaattcgctcggtaccagctgggcgacctgctgctgcacctggaaaagaagcacggcgaggactggggaaaggtgtacgacgaggcctgggagcggattgacaagaaagtggaaggcctgagcaagcacatcaagctggaagaggaacggagaagcgaggacgcccagagcaaggccgccctgaccgactggctgcgggctaaggccagcttcgtgatcgagggcctgaaggaggccgacaaggacgagttctgcagatgcgagctgaagctgcagaagtggtacggggacctgcggggaaagcccttcgccatcgaagccgagaacagcatcctggacatcagcggcttcagcaagcagtacaactgtgccttcatctggcagaaggacggcgtgaagaagctgaacctgtacctgatcatcaactacttcaagggcggcaagctgcggttcaagaagatcaaacctgaagccttcgaagccaacagattctacaccgtgatcaacaaaaagagcggcgagatcgtgcccatggaggtgaacttcaacttcgacgaccccaacctgatcatcctgcctctggcctttggcaagagacagggcagagaattcatctggaacgacctgctgtccctggaaaccggcagcctgaagctggccaacggaagagtgatcgagaagacactgtacaacagaagaacccggcaggatgagcctgccctgttcgtggccctgaccttcgagcggcgggaggtcctggactcctccaatatcaaaccaatgaacctgatcggcgtggcaagaggcgaaaacatccccgccgtgatcgccctgaccgaccccgagggctgcccactgagccggtttaaggatagcctgggaaacccaacccacatcctgagaatcggcgagagctataaggagaagcagcggaccatccaggccaagaaggaggtggagcagcggagagccggcggctacagccggaagtacgccagcaaagccaagaatctggcagacgatatggtgagaaacaccgctagagatctgctgtactacgccgtgacccaggatgccatgctgatcttcgccaacctgagccggggcttcggccggcagggcaagcggaccttcatggccgagagacagtacacacggatggaggactggctgaccgccaagctggcctacgagggcctgagcaagacctacctgtccaagacactggcccagtacacctccaagacatgcagcaactgtgggtttaccatcaccagcgccgactacgacagggtgctggagaagctgaagaagacagcaacaggctggatgaccacaattaacggcaaggagctgaaggtggagggccagattacctactacaacagatacaagagacagaacgtagtcaaggacctgtccgtcgagctggatagactgagcgaagaatctgtgaacaacgacatctcctcctggacaaagggcagaagcggagaagctctgagcctcctgaagaaaagattctcccatagacccgtgcaggagaagttcgtgtgcctgaactgcggcttcgagacacacgcagccgagcaagccgccctgaacatcgccagatcctggctgttcctgcggagccaggagtacaagaaataccagacaaacaagacaaccggcaacaccgataagagagccttcgtcgagacctggcagtccttttaccggaagaagcttaaggaggtgtggaaacctgccgtgcggtctggcggatctggcggaggctcctagcgccgccagcgtgaccttcagggacgtggccgtggacttcagcagggaggagtggagcaggctggacgccgcccagagggccctgtacagggacgtgatgtgggagacctacgagaacctggtgagcaccggcatccccgtgagcaggctggacgtgatcagcctgctggccaagcaggaggcccagtggacccccgaggaggtgcccggctggaccagccccgacagcttcagcgaggagggatctggctccggcagcggccccaagaaaaagagaaaagtctaagctgccttctgcggggcttgccttctggccatgcccttcttctctcccttgcacctgtacctcttggtctttgaataaagcctgagtaggaaggctagcaaaaaaaaaaaaaaaaaaaaaaaaaaaaaaaaaaaaaaaaaaaaaaaaaaaaaaaaaaaaaaaaaaaaaaaaaaaaaaaa

SEQ ID NO: 16385 - RNA, 9485 nt, synthetic construct
  source 1..9485: mol_type = other RNA
aggaaataagagagaaaagaagagtaagaagaaatataagagccaccatggcccctaagaagaagcgtaaagtgagccggatggaacgcctcgtctacgaggtgcggcagaagtgcagaaacatcgaggacatctgcatctcctgcggatctctgaacgtgaccctggagcacccactgttcatcggcggcatgtgccagaactgtaaaaactgttttctggagtgtgcctatcaatacgacgatgacggctaccagagctactgcaccatctgttgcggcggaagagaggtgctgatgtgtggaaataacaactgctgccggtgcttctgcgtggaatgcgtggacctgctggtgggccccggcgccgcccaggccgctattaaggaagatccttggaactgctacatgtgcggccacaagggcacatacggcctgctgagacggagagaggactggcctagcagactgcagatgttcttcgccaataaccacgaccaggagttcgacccccctaaggtgtaccctcccgtccccgccgagaagagaaagcccatccgggtcctgagcctgttcgatggcatcgccaccggtctgctggtgctgaaggacctgggcatccaggtggataggtacattgcctccgaggtgtgcgaggactccatcaccgtgggaatggtgcgtcatcagggcaagatcatgtacgtgggcgacgtgcggagcgtgacacagaagcatatccaggagtggggccctttcgacctggtgatcggcggcagcccttgcaatgacctgagcatcgtgaacccagcccggaagggcctgtacgagggaaccggcagactgttcttcgagttttacagactgctgcacgacgcccggcctaaggaaggcgacgaccggcccttcttttggctgttcgagaatgtggtggccatgggagtcagcgacaagcgggatattagccggttcctggagagcaaccccgtgatgatcgatgccaaggaagtgagcgccgcccaccgggccagatacttctggggcaatctgcctggcatgaacagacccctggccagcaccgtgaacgacaagctggagctgcaggagtgcctggagcacggccggatcgccaagttcagcaaggtgagaaccatcaccacccgaagcaacagcatcaaacaaggcaaggaccagcactttcctgtgttcatgaacgagaaggaggacatcctgtggtgtaccgagatggagagagtgttcgggttcccagtccactacacagatgtcagcaacatgtctagactggccagacagagactgctgggaagaagctggtccgtccctgtgatcagacacctgttcgcccctctgaaggagtacttcgcctgcgtgagcagcggcaacagcaacgccaacagccggggccccagcttctctagcggcctggtgccactgtccctgagagggagccacatgggccccatggagatctacaaaaccgtgagcgcctggaagcggcagcctgtgcgcgtgctgagcctgtttcggaatatcgataaagtcctgaaaagcctgggattcctggagagcggctctggctccggcggtggcaccctgaagtacgtggaggatgtgacaaacgtggtcagacgggatgtggagaagtggggccccttcgatctggtgtacggcagcacccaacccctgggcagctcttgtgaccggtgccctggctggtacatgtttcagttccaccggatcctgcagtacgccctgccgagacaggagtcccagcggccattcttttggattttcatggacaacttgctgctgaccgaggatgaccaggaaactaccactcggttcctgcagaccgaagccgtgaccctgcaggacgtgagaggccgggactaccagaacgccatgcgggtgtggtccaacatccctggactgaaaagcaagcacgcacctctgacccctaaagaagaggagtacctgcaggcccaggtgcggagcagaagcaagctggacgcccctaaggtggatctgctggtgaagaattgcctcctgcccctgagagagtacttcaagtatttcagccagaatagtctgcccctgggaggcagcggcggcggcgccctggtgacatttgaggacgtcgccgtgcggttcacccaggaggaatgggctctgctggatccttctcagaaaatcctgtaccgggacgtgatgagagagacataccggaatctgacctccgtgggcatcaactgggaatgttgggaccttgaagcctgcttcagaagcctgggaagaaacctgagagtgcaggtggtgaagagaaagtgcgagctgaccaacagcggcccctgcgccgagggcggcccaagcagcggcgcccctcctcccagcggcggcagcccagccggctccccaacctctaccgaggagggcacctctgagtccgccacccccgagagcggccctggcacctccaccgagcccagcgagggcagcgcacccggcagccctgccggcagccccacctccacagaggagggaaccagcaccgagcccagcgaaggcagcgccccaggcaccagcaccgagcctagtgagcaggagattaaacggatcaacaagatcagaagaagacttgtgaaagacagcaacaccaagaaggccggcaagacaggccccatgaaaaccctgctggttagagtgatgacacccgatctgagagagcggctggaaaacctgagaaagaagcctgaaaatatcccccagcccatcagcaatacatctagagccaacctgaataagctgctgaccgattacaccgaaatgaagaaggcgatcctgcatgtgtactgggaagagttccagaaggaccctgtgggcctgatgagccgggtggcccagcctgccagcaagaagatcgatcagaacaagctgaaacctgagatggacgagaagggcaacctgaccaccgccggctttgcctgctctcagtgtggccagcccctgttcgtgtacaagctggagcaggtgtctgagaagggcaaggcttacaccaactacttcggacggtgcaatgtggccgagcacgaaaagctgatcctgctggcccagctgaagcccgagaaggatagcgacgaagccgtgacatatagcctgggaaagtttgggcagagggccctggatttctacagcattcatgtgaccaaggagtccacccaccccgtgaagcccctggcccagatcgccggaaacagatacgcctccggacctgtgggaaaggccctgagcgacgcatgtatgggcacaatcgcctccttcctgtctaagtaccaggacatcatcatcgaacaccagaaggtggtgaagggcaaccagaagagactggagagcctgcgggagctggccggcaaggaaaacctggaataccctagcgtgaccctgccacctcagcctcacaccaaggagggcgttgatgcctacaacgaagtgatcgcccgggtgcgaatgtgggtgaacctgaacctgtggcagaagctgaagctaagcagagatgatgccaagcctctgctgagactgaagggattcccttcctttcctctggtcgagagacaggccaacgaagtggactggtgggacatggtgtgtaacgtgaagaagctgatcaacgagaaaaaggaggatggcaaggtgttttggcagaatctggctggctacaagagacaggaagccctgagaccatacctgagcagcgaggaagatcggaagaagggaaagaaattcgctcggtaccagctgggcgacctgctgctgcacctggaaaagaagcacggcgaggactggggaaaggtgtacgacgaggcctgggagcggattgacaagaaagtggaaggcctgagcaagcacatcaagctggaagaggaacggagaagcgaggacgcccagagcaaggccgccctgaccgactggctgcgggctaaggccagcttcgtgatcgagggcctgaaggaggccgacaaggacgagttctgcagatgcgagctgaagctgcagaagtggtacggggacctgcggggaaagcccttcgccatcgaagccgagaacagcatcctggacatcagcggcttcagcaagcagtacaactgtgccttcatctggcagaaggacggcgtgaagaagctgaacctgtacctgatcatcaactacttcaagggcggcaagctgcggttcaagaagatcaaacctgaagccttcgaagccaacagattctacaccgtgatcaacaaaaagagcggcgagatcgtgcccatggaggtgaacttcaacttcgacgaccccaacctgatcatcctgcctctggcctttggcaagagacagggcagagaattcatctggaacgacctgctgtccctggaaaccggcagcctgaagctggccaacggaagagtgatcgagaagacactgtacaacagaagaacccggcaggatgagcctgccctgttcgtggccctgaccttcgagcggcgggaggtcctggactcctccaatatcaaaccaatgaacctgatcggcgtggcaagaggcgaaaacatccccgccgtgatcgccctgaccgaccccgagggctgcccactgagccggtttaaggatagcctgggaaacccaacccacatcctgagaatcggcgagagctataaggagaagcagcggaccatccaggccaagaaggaggtggagcagcggagagccggcggctacagccggaagtacgccagcaaagccaagaatctggcagacgatatggtgagaaacaccgctagagatctgctgtactacgccgtgacccaggatgccatgctgatcttcgccaacctgagccggggcttcggccggcagggcaagcggaccttcatggccgagagacagtacacacggatggaggactggctgaccgccaagctggcctacgagggcctgagcaagacctacctgtccaagacactggcccagtacacctccaagacatgcagcaactgtgggtttaccatcaccagcgccgactacgacagggtgctggagaagctgaagaagacagcaacaggctggatgaccacaattaacggcaaggagctgaaggtggagggccagattacctactacaacagatacaagagacagaacgtagtcaaggacctgtccgtcgagctggatagactgagcgaagaatctgtgaacaacgacatctcctcctggacaaagggcagaagcggagaagctctgagcctcctgaagaaaagattctcccatagacccgtgcaggagaagttcgtgtgcctgaactgcggcttcgagacacacgcagccgagcaagccgccctgaacatcgccagatcctggctgttcctgcggagccaggagtacaagaaataccagacaaacaagacaaccggcaacaccgataagagagccttcgtcgagacctggcagtccttttaccggaagaagcttaaggaggtgtggaaacctgccgtgcggtctggcggatctggcggaggctccccccaggtgctggtgagcttcgaggacgtggccgtgttcctgagcagggaggagtggggctgcctgggccccgcccagaggggcctgtacagggacgtgatgctggagacctacaggaacctgatcagcctgggcttccaggacagcaagcccgacgtgatcagcaagctggaggagggcgaggagccctgggccccctacagccccaggatcgaggagggctggatccagagccacggcagcggcggcccaagcagcggcgcccctcctcccagcggcggcagcccagccggctccccaacctctaccgaggagggcacctctgagtccgccacccccgagagcggccctggcacctccaccgagcccagcgagggcagcgcacccggcagccctgccggcagccccacctccacagaggagggaaccagcaccgagcccagcgaaggcagcgccccaggcaccagcaccgagcctagtgagcaggagattaaacggatcaacaagatcagaagaagacttgtgaaagacagcaacaccaagaaggccggcaagacaggccccatgaaaaccctgctggttagagtgatgacacccgatctgagagagcggctggaaaacctgagaaagaagcctgaaaatatcccccagcccatcagcaatacatctagagccaacctgaataagctgctgaccgattacaccgaaatgaagaaggcgatcctgcatgtgtactgggaagagttccagaaggaccctgtgggcctgatgagccgggtggcccagcctgccagcaagaagatcgatcagaacaagctgaaacctgagatggacgagaagggcaacctgaccaccgccggctttgcctgctctcagtgtggccagcccctgttcgtgtacaagctggagcaggtgtctgagaagggcaaggcttacaccaactacttcggacggtgcaatgtggccgagcacgaaaagctgatcctgctggcccagctgaagcccgagaaggatagcgacgaagccgtgacatatagcctgggaaagtttgggcagagggccctggatttctacagcattcatgtgaccaaggagtccacccaccccgtgaagcccctggcccagatcgccggaaacagatacgcctccggacctgtgggaaaggccctgagcgacgcatgtatgggcacaatcgcctccttcctgtctaagtaccaggacatcatcatcgaacaccagaaggtggtgaagggcaaccagaagagactggagagcctgcgggagctggccggcaaggaaaacctggaataccctagcgtgaccctgccacctcagcctcacaccaaggagggcgttgatgcctacaacgaagtgatcgcccgggtgcgaatgtgggtgaacctgaacctgtggcagaagctgaagctaagcagagatgatgccaagcctctgctgagactgaagggattcccttcctttcctctggtcgagagacaggccaacgaagtggactggtgggacatggtgtgtaacgtgaagaagctgatcaacgagaaaaaggaggatggcaaggtgttttggcagaatctggctggctacaagagacaggaagccctgagaccatacctgagcagcgaggaagatcggaagaagggaaagaaattcgctcggtaccagctgggcgacctgctgctgcacctggaaaagaagcacggcgaggactggggaaaggtgtacgacgaggcctgggagcggattgacaagaaagtggaaggcctgagcaagcacatcaagctggaagaggaacggagaagcgaggacgcccagagcaaggccgccctgaccgactggctgcgggctaaggccagcttcgtgatcgagggcctgaaggaggccgacaaggacgagttctgcagatgcgagctgaagctgcagaagtggtacggggacctgcggggaaagcccttcgccatcgaagccgagaacagcatcctggacatcagcggcttcagcaagcagtacaactgtgccttcatctggcagaaggacggcgtgaagaagctgaacctgtacctgatcatcaactacttcaagggcggcaagctgcggttcaagaagatcaaacctgaagccttcgaagccaacagattctacaccgtgatcaacaaaaagagcggcgagatcgtgcccatggaggtgaacttcaacttcgacgaccccaacctgatcatcctgcctctggcctttggcaagagacagggcagagaattcatctggaacgacctgctgtccctggaaaccggcagcctgaagctggccaacggaagagtgatcgagaagacactgtacaacagaagaacccggcaggatgagcctgccctgttcgtggccctgaccttcgagcggcgggaggtcctggactcctccaatatcaaaccaatgaacctgatcggcgtggcaagaggcgaaaacatccccgccgtgatcgccctgaccgaccccgagggctgcccactgagccggtttaaggatagcctgggaaacccaacccacatcctgagaatcggcgagagctataaggagaagcagcggaccatccaggccaagaaggaggtggagcagcggagagccggcggctacagccggaagtacgccagcaaagccaagaatctggcagacgatatggtgagaaacaccgctagagatctgctgtactacgccgtgacccaggatgccatgctgatcttcgccaacctgagccggggcttcggccggcagggcaagcggaccttcatggccgagagacagtacacacggatggaggactggctgaccgccaagctggcctacgagggcctgagcaagacctacctgtccaagacactggcccagtacacctccaagacatgcagcaactgtgggtttaccatcaccagcgccgactacgacagggtgctggagaagctgaagaagacagcaacaggctggatgaccacaattaacggcaaggagctgaaggtggagggccagattacctactacaacagatacaagagacagaacgtagtcaaggacctgtccgtcgagctggatagactgagcgaagaatctgtgaacaacgacatctcctcctggacaaagggcagaagcggagaagctctgagcctcctgaagaaaagattctcccatagacccgtgcaggagaagttcgtgtgcctgaactgcggcttcgagacacacgcagccgagcaagccgccctgaacatcgccagatcctggctgttcctgcggagccaggagtacaagaaataccagacaaacaagacaaccggcaacaccgataagagagccttcgtcgagacctggcagtccttttaccggaagaagcttaaggaggtgtggaaacctgccgtgcggtctggcggatctggcggaggctcctccccaggtgctggtgagcttcgaggacgtggccgtgttcctgagcagggaggagtggggctgcctgggccccgcccagaggggcctgtacagggacgtgatgctggagacctacaggaacctgatcagcctgggcttccaggacagcaagcccgacgtgatcagcaagctggaggagggcgaggagccctgggccccctacagccccaggatcgaggagggctggatccagagccacggcagcggatctggctccggcagcggccccaagaaaaagagaaaagtctaagctgccttctgcggggcttgccttctggccatgcccttcttctctcccttgcacctgtacctcttggtctttgaataaagcctgagtaggaaggctagcaaaaaaaaaaaaaaaaaaaaaaaaaaaaaaaaaaaaaaaaaaaaaaaaaaaaaaaaaaaaaaaaaaaaaaaaaaaaaaaa

SEQ ID NO: 16386 - RNA, 9485 nt, synthetic construct
  source 1..9485: mol_type = other RNA
aggaaataagagagaaaagaagagtaagaagaaatataagagccaccatggcccctaagaagaagcgtaaagtgagccggatggaacgcctcgtctacgaggtgcggcagaagtgcagaaacatcgaggacatctgcatctcctgcggatctctgaacgtgaccctggagcacccactgttcatcggcggcatgtgccagaactgtaaaaactgttttctggagtgtgcctatcaatacgacgatgacggctaccagagctactgcaccatctgttgcggcggaagagaggtgctgatgtgtggaaataacaactgctgccggtgcttctgcgtggaatgcgtggacctgctggtgggccccggcgccgcccaggccgctattaaggaagatccttggaactgctacatgtgcggccacaagggcacatacggcctgctgagacggagagaggactggcctagcagactgcagatgttcttcgccaataaccacgaccaggagttcgacccccctaaggtgtaccctcccgtccccgccgagaagagaaagcccatccgggtcctgagcctgttcgatggcatcgccaccggtctgctggtgctgaaggacctgggcatccaggtggataggtacattgcctccgaggtgtgcgaggactccatcaccgtgggaatggtgcgtcatcagggcaagatcatgtacgtgggcgacgtgcggagcgtgacacagaagcatatccaggagtggggccctttcgacctggtgatcggcggcagcccttgcaatgacctgagcatcgtgaacccagcccggaagggcctgtacgagggaaccggcagactgttcttcgagttttacagactgctgcacgacgcccggcctaaggaaggcgacgaccggcccttcttttggctgttcgagaatgtggtggccatgggagtcagcgacaagcgggatattagccggttcctggagagcaaccccgtgatgatcgatgccaaggaagtgagcgccgcccaccgggccagatacttctggggcaatctgcctggcatgaacagacccctggccagcaccgtgaacgacaagctggagctgcaggagtgcctggagcacggccggatcgccaagttcagcaaggtgagaaccatcaccacccgaagcaacagcatcaaacaaggcaaggaccagcactttcctgtgttcatgaacgagaaggaggacatcctgtggtgtaccgagatggagagagtgttcgggttcccagtccactacacagatgtcagcaacatgtctagactggccagacagagactgctgggaagaagctggtccgtccctgtgatcagacacctgttcgcccctctgaaggagtacttcgcctgcgtgagcagcggcaacagcaacgccaacagccggggccccagcttctctagcggcctggtgccactgtccctgagagggagccacatgggccccatggagatctacaaaaccgtgagcgcctggaagcggcagcctgtgcgcgtgctgagcctgtttcggaatatcgataaagtcctgaaaagcctgggattcctggagagcggctctggctccggcggtggcaccctgaagtacgtggaggatgtgacaaacgtggtcagacgggatgtggagaagtggggccccttcgatctggtgtacggcagcacccaacccctgggcagctcttgtgaccggtgccctggctggtacatgtttcagttccaccggatcctgcagtacgccctgccgagacaggagtcccagcggccattcttttggattttcatggacaacttgctgctgaccgaggatgaccaggaaactaccactcggttcctgcagaccgaagccgtgaccctgcaggacgtgagaggccgggactaccagaacgccatgcgggtgtggtccaacatccctggactgaaaagcaagcacgcacctctgacccctaaagaagaggagtacctgcaggcccaggtgcggagcagaagcaagctggacgcccctaaggtggatctgctggtgaagaattgcctcctgcccctgagagagtacttcaagtatttcagccagaatagtctgcccctgggaggcagcggcggcggcgccctggtgacatttgaggacgtcgccgtgcggttcacccaggaggaatgggctctgctggatccttctcagaaaatcctgtaccgggacgtgatgagagagacataccggaatctgacctccgtgggcatcaactgggaatgttgggaccttgaagcctgcttcagaagcctgggaagaaacctgagagtgcaggtggtgaagagaaagtgcgagctgaccaacagcggcccctgcgccgagggcggcccaagcagcggcgcccctcctcccagcggcggcagcccagccggctccccaacctctaccgaggagggcacctctgagtccgccacccccgagagcggccctggcacctccaccgagcccagcgagggcagcgcacccggcagccctgccggcagccccacctccacagaggagggaaccagcaccgagcccagcgaaggcagcgccccaggcaccagcaccgagcctagtgagcaggagattaaacggatcaacaagatcagaagaagacttgtgaaagacagcaacaccaagaaggccggcaagacaggccccatgaaaaccctgctggttagagtgatgacacccgatctgagagagcggctggaaaacctgagaaagaagcctgaaaatatcccccagcccatcagcaatacatctagagccaacctgaataagctgctgaccgattacaccgaaatgaagaaggcgatcctgcatgtgtactgggaagagttccagaaggaccctgtgggcctgatgagccgggtggcccagcctgccagcaagaagatcgatcagaacaagctgaaacctgagatggacgagaagggcaacctgaccaccgccggctttgcctgctctcagtgtggccagcccctgttcgtgtacaagctggagcaggtgtctgagaagggcaaggcttacaccaactacttcggacggtgcaatgtggccgagcacgaaaagctgatcctgctggcccagctgaagcccgagaaggatagcgacgaagccgtgacatatagcctgggaaagtttgggcagagggccctggatttctacagcattcatgtgaccaaggagtccacccaccccgtgaagcccctggcccagatcgccggaaacagatacgcctccggacctgtgggaaaggccctgagcgacgcatgtatgggcacaatcgcctccttcctgtctaagtaccaggacatcatcatcgaacaccagaaggtggtgaagggcaaccagaagagactggagagcctgcgggagctggccggcaaggaaaacctggaataccctagcgtgaccctgccacctcagcctcacaccaaggagggcgttgatgcctacaacgaagtgatcgcccgggtgcgaatgtgggtgaacctgaacctgtggcagaagctgaagctaagcagagatgatgccaagcctctgctgagactgaagggattcccttcctttcctctggtcgagagacaggccaacgaagtggactggtgggacatggtgtgtaacgtgaagaagctgatcaacgagaaaaaggaggatggcaaggtgttttggcagaatctggctggctacaagagacaggaagccctgagaccatacctgagcagcgaggaagatcggaagaagggaaagaaattcgctcggtaccagctgggcgacctgctgctgcacctggaaaagaagcacggcgaggactggggaaaggtgtacgacgaggcctgggagcggattgacaagaaagtggaaggcctgagcaagcacatcaagctggaagaggaacggagaagcgaggacgcccagagcaaggccgccctgaccgactggctgcgggctaaggccagcttcgtgatcgagggcctgaaggaggccgacaaggacgagttctgcagatgcgagctgaagctgcagaagtggtacggggacctgcggggaaagcccttcgccatcgaagccgagaacagcatcctggacatcagcggcttcagcaagcagtacaactgtgccttcatctggcagaaggacggcgtgaagaagctgaacctgtacctgatcatcaactacttcaagggcggcaagctgcggttcaagaagatcaaacctgaagccttcgaagccaacagattctacaccgtgatcaacaaaaagagcggcgagatcgtgcccatggaggtgaacttcaacttcgacgaccccaacctgatcatcctgcctctggcctttggcaagagacagggcagagaattcatctggaacgacctgctgtccctggaaaccggcagcctgaagctggccaacggaagagtgatcgagaagacactgtacaacagaagaacccggcaggatgagcctgccctgttcgtggccctgaccttcgagcggcgggaggtcctggactcctccaatatcaaaccaatgaacctgatcggcgtggcaagaggcgaaaacatccccgccgtgatcgccctgaccgaccccgagggctgcccactgagccggtttaaggatagcctgggaaacccaacccacatcctgagaatcggcgagagctataaggagaagcagcggaccatccaggccaagaaggaggtggagcagcggagagccggcggctacagccggaagtacgccagcaaagccaagaatctggcagacgatatggtgagaaacaccgctagagatctgctgtactacgccgtgacccaggatgccatgctgatcttcgccaacctgagccggggcttcggccggcagggcaagcggaccttcatggccgagagacagtacacacggatggaggactggctgaccgccaagctggcctacgagggcctgagcaagacctacctgtccaagacactggcccagtacacctccaagacatgcagcaactgtgggtttaccatcaccagcgccgactacgacagggtgctggagaagctgaagaagacagcaacaggctggatgaccacaattaacggcaaggagctgaaggtggagggccagattacctactacaacagatacaagagacagaacgtagtcaaggacctgtccgtcgagctggatagactgagcgaagaatctgtgaacaacgacatctcctcctggacaaagggcagaagcggagaagctctgagcctcctgaagaaaagattctcccatagacccgtgcaggagaagttcgtgtgcctgaactgcggcttcgagacacacgcagccgagcaagccgccctgaacatcgccagatcctggctgttcctgcggagccaggagtacaagaaataccagacaaacaagacaaccggcaacaccgataagagagccttcgtcgagacctggcagtccttttaccggaagaagcttaaggaggtgtggaaacctgccgtgcggtctggcggatctggcggaggctccatgaacggcatgacctacgacgacgtgcacgtgaacttcaccggcgaggagtgggccctgctgagccccagccagaagaggctgtacaaggacgtgatgctggagacctacaggaacctgaccgccatcggctacagctgggaggacaggaacatcgaggagcacttccagaggagcaggaggcacggcaggcacgagaggagccacaccggcgagaaccccagcgtgtacacccagtgcaacggcggcccaagcagcggcgcccctcctcccagcggcggcagcccagccggctccccaacctctaccgaggagggcacctctgagtccgccacccccgagagcggccctggcacctccaccgagcccagcgagggcagcgcacccggcagccctgccggcagccccacctccacagaggagggaaccagcaccgagcccagcgaaggcagcgccccaggcaccagcaccgagcctagtgagcaggagattaaacggatcaacaagatcagaagaagacttgtgaaagacagcaacaccaagaaggccggcaagacaggccccatgaaaaccctgctggttagagtgatgacacccgatctgagagagcggctggaaaacctgagaaagaagcctgaaaatatcccccagcccatcagcaatacatctagagccaacctgaataagctgctgaccgattacaccgaaatgaagaaggcgatcctgcatgtgtactgggaagagttccagaaggaccctgtgggcctgatgagccgggtggcccagcctgccagcaagaagatcgatcagaacaagctgaaacctgagatggacgagaagggcaacctgaccaccgccggctttgcctgctctcagtgtggccagcccctgttcgtgtacaagctggagcaggtgtctgagaagggcaaggcttacaccaactacttcggacggtgcaatgtggccgagcacgaaaagctgatcctgctggcccagctgaagcccgagaaggatagcgacgaagccgtgacatatagcctgggaaagtttgggcagagggccctggatttctacagcattcatgtgaccaaggagtccacccaccccgtgaagcccctggcccagatcgccggaaacagatacgcctccggacctgtgggaaaggccctgagcgacgcatgtatgggcacaatcgcctccttcctgtctaagtaccaggacatcatcatcgaacaccagaaggtggtgaagggcaaccagaagagactggagagcctgcgggagctggccggcaaggaaaacctggaataccctagcgtgaccctgccacctcagcctcacaccaaggagggcgttgatgcctacaacgaagtgatcgcccgggtgcgaatgtgggtgaacctgaacctgtggcagaagctgaagctaagcagagatgatgccaagcctctgctgagactgaagggattcccttcctttcctctggtcgagagacaggccaacgaagtggactggtgggacatggtgtgtaacgtgaagaagctgatcaacgagaaaaaggaggatggcaaggtgttttggcagaatctggctggctacaagagacaggaagccctgagaccatacctgagcagcgaggaagatcggaagaagggaaagaaattcgctcggtaccagctgggcgacctgctgctgcacctggaaaagaagcacggcgaggactggggaaaggtgtacgacgaggcctgggagcggattgacaagaaagtggaaggcctgagcaagcacatcaagctggaagaggaacggagaagcgaggacgcccagagcaaggccgccctgaccgactggctgcgggctaaggccagcttcgtgatcgagggcctgaaggaggccgacaaggacgagttctgcagatgcgagctgaagctgcagaagtggtacggggacctgcggggaaagcccttcgccatcgaagccgagaacagcatcctggacatcagcggcttcagcaagcagtacaactgtgccttcatctggcagaaggacggcgtgaagaagctgaacctgtacctgatcatcaactacttcaagggcggcaagctgcggttcaagaagatcaaacctgaagccttcgaagccaacagattctacaccgtgatcaacaaaaagagcggcgagatcgtgcccatggaggtgaacttcaacttcgacgaccccaacctgatcatcctgcctctggcctttggcaagagacagggcagagaattcatctggaacgacctgctgtccctggaaaccggcagcctgaagctggccaacggaagagtgatcgagaagacactgtacaacagaagaacccggcaggatgagcctgccctgttcgtggccctgaccttcgagcggcgggaggtcctggactcctccaatatcaaaccaatgaacctgatcggcgtggcaagaggcgaaaacatccccgccgtgatcgccctgaccgaccccgagggctgcccactgagccggtttaaggatagcctgggaaacccaacccacatcctgagaatcggcgagagctataaggagaagcagcggaccatccaggccaagaaggaggtggagcagcggagagccggcggctacagccggaagtacgccagcaaagccaagaatctggcagacgatatggtgagaaacaccgctagagatctgctgtactacgccgtgacccaggatgccatgctgatcttcgccaacctgagccggggcttcggccggcagggcaagcggaccttcatggccgagagacagtacacacggatggaggactggctgaccgccaagctggcctacgagggcctgagcaagacctacctgtccaagacactggcccagtacacctccaagacatgcagcaactgtgggtttaccatcaccagcgccgactacgacagggtgctggagaagctgaagaagacagcaacaggctggatgaccacaattaacggcaaggagctgaaggtggagggccagattacctactacaacagatacaagagacagaacgtagtcaaggacctgtccgtcgagctggatagactgagcgaagaatctgtgaacaacgacatctcctcctggacaaagggcagaagcggagaagctctgagcctcctgaagaaaagattctcccatagacccgtgcaggagaagttcgtgtgcctgaactgcggcttcgagacacacgcagccgagcaagccgccctgaacatcgccagatcctggctgttcctgcggagccaggagtacaagaaataccagacaaacaagacaaccggcaacaccgataagagagccttcgtcgagacctggcagtccttttaccggaagaagcttaaggaggtgtggaaacctgccgtgcggtctggcggatctggcggaggctcctatgaacggcatgacctacgacgacgtgcacgtgaacttcaccggcgaggagtgggccctgctgagccccagccagaagaggctgtacaaggacgtgatgctggagacctacaggaacctgaccgccatcggctacagctgggaggacaggaacatcgaggagcacttccagaggagcaggaggcacggcaggcacgagaggagccacaccggcgagaaccccagcgtgtacacccagtgcaacggatctggctccggcagcggccccaagaaaaagagaaaagtctaagctgccttctgcggggcttgccttctggccatgcccttcttctctcccttgcacctgtacctcttggtctttgaataaagcctgagtaggaaggctagcaaaaaaaaaaaaaaaaaaaaaaaaaaaaaaaaaaaaaaaaaaaaaaaaaaaaaaaaaaaaaaaaaaaaaaaaaaaaaaaa

SEQ ID NO: 16387 - RNA, 9485 nt, synthetic construct
  source 1..9485: mol_type = other RNA
aggaaataagagagaaaagaagagtaagaagaaatataagagccaccatggcccctaagaagaagcgtaaagtgagccggatggaacgcctcgtctacgaggtgcggcagaagtgcagaaacatcgaggacatctgcatctcctgcggatctctgaacgtgaccctggagcacccactgttcatcggcggcatgtgccagaactgtaaaaactgttttctggagtgtgcctatcaatacgacgatgacggctaccagagctactgcaccatctgttgcggcggaagagaggtgctgatgtgtggaaataacaactgctgccggtgcttctgcgtggaatgcgtggacctgctggtgggccccggcgccgcccaggccgctattaaggaagatccttggaactgctacatgtgcggccacaagggcacatacggcctgctgagacggagagaggactggcctagcagactgcagatgttcttcgccaataaccacgaccaggagttcgacccccctaaggtgtaccctcccgtccccgccgagaagagaaagcccatccgggtcctgagcctgttcgatggcatcgccaccggtctgctggtgctgaaggacctgggcatccaggtggataggtacattgcctccgaggtgtgcgaggactccatcaccgtgggaatggtgcgtcatcagggcaagatcatgtacgtgggcgacgtgcggagcgtgacacagaagcatatccaggagtggggccctttcgacctggtgatcggcggcagcccttgcaatgacctgagcatcgtgaacccagcccggaagggcctgtacgagggaaccggcagactgttcttcgagttttacagactgctgcacgacgcccggcctaaggaaggcgacgaccggcccttcttttggctgttcgagaatgtggtggccatgggagtcagcgacaagcgggatattagccggttcctggagagcaaccccgtgatgatcgatgccaaggaagtgagcgccgcccaccgggccagatacttctggggcaatctgcctggcatgaacagacccctggccagcaccgtgaacgacaagctggagctgcaggagtgcctggagcacggccggatcgccaagttcagcaaggtgagaaccatcaccacccgaagcaacagcatcaaacaaggcaaggaccagcactttcctgtgttcatgaacgagaaggaggacatcctgtggtgtaccgagatggagagagtgttcgggttcccagtccactacacagatgtcagcaacatgtctagactggccagacagagactgctgggaagaagctggtccgtccctgtgatcagacacctgttcgcccctctgaaggagtacttcgcctgcgtgagcagcggcaacagcaacgccaacagccggggccccagcttctctagcggcctggtgccactgtccctgagagggagccacatgggccccatggagatctacaaaaccgtgagcgcctggaagcggcagcctgtgcgcgtgctgagcctgtttcggaatatcgataaagtcctgaaaagcctgggattcctggagagcggctctggctccggcggtggcaccctgaagtacgtggaggatgtgacaaacgtggtcagacgggatgtggagaagtggggccccttcgatctggtgtacggcagcacccaacccctgggcagctcttgtgaccggtgccctggctggtacatgtttcagttccaccggatcctgcagtacgccctgccgagacaggagtcccagcggccattcttttggattttcatggacaacttgctgctgaccgaggatgaccaggaaactaccactcggttcctgcagaccgaagccgtgaccctgcaggacgtgagaggccgggactaccagaacgccatgcgggtgtggtccaacatccctggactgaaaagcaagcacgcacctctgacccctaaagaagaggagtacctgcaggcccaggtgcggagcagaagcaagctggacgcccctaaggtggatctgctggtgaagaattgcctcctgcccctgagagagtacttcaagtatttcagccagaatagtctgcccctgggaggcagcggcggcggcgccctggtgacatttgaggacgtcgccgtgcggttcacccaggaggaatgggctctgctggatccttctcagaaaatcctgtaccgggacgtgatgagagagacataccggaatctgacctccgtgggcatcaactgggaatgttgggaccttgaagcctgcttcagaagcctgggaagaaacctgagagtgcaggtggtgaagagaaagtgcgagctgaccaacagcggcccctgcgccgagggcggcccaagcagcggcgcccctcctcccagcggcggcagcccagccggctccccaacctctaccgaggagggcacctctgagtccgccacccccgagagcggccctggcacctccaccgagcccagcgagggcagcgcacccggcagccctgccggcagccccacctccacagaggagggaaccagcaccgagcccagcgaaggcagcgccccaggcaccagcaccgagcctagtgagcaggagattaaacggatcaacaagatcagaagaagacttgtgaaagacagcaacaccaagaaggccggcaagacaggccccatgaaaaccctgctggttagagtgatgacacccgatctgagagagcggctggaaaacctgagaaagaagcctgaaaatatcccccagcccatcagcaatacatctagagccaacctgaataagctgctgaccgattacaccgaaatgaagaaggcgatcctgcatgtgtactgggaagagttccagaaggaccctgtgggcctgatgagccgggtggcccagcctgccagcaagaagatcgatcagaacaagctgaaacctgagatggacgagaagggcaacctgaccaccgccggctttgcctgctctcagtgtggccagcccctgttcgtgtacaagctggagcaggtgtctgagaagggcaaggcttacaccaactacttcggacggtgcaatgtggccgagcacgaaaagctgatcctgctggcccagctgaagcccgagaaggatagcgacgaagccgtgacatatagcctgggaaagtttgggcagagggccctggatttctacagcattcatgtgaccaaggagtccacccaccccgtgaagcccctggcccagatcgccggaaacagatacgcctccggacctgtgggaaaggccctgagcgacgcatgtatgggcacaatcgcctccttcctgtctaagtaccaggacatcatcatcgaacaccagaaggtggtgaagggcaaccagaagagactggagagcctgcgggagctggccggcaaggaaaacctggaataccctagcgtgaccctgccacctcagcctcacaccaaggagggcgttgatgcctacaacgaagtgatcgcccgggtgcgaatgtgggtgaacctgaacctgtggcagaagctgaagctaagcagagatgatgccaagcctctgctgagactgaagggattcccttcctttcctctggtcgagagacaggccaacgaagtggactggtgggacatggtgtgtaacgtgaagaagctgatcaacgagaaaaaggaggatggcaaggtgttttggcagaatctggctggctacaagagacaggaagccctgagaccatacctgagcagcgaggaagatcggaagaagggaaagaaattcgctcggtaccagctgggcgacctgctgctgcacctggaaaagaagcacggcgaggactggggaaaggtgtacgacgaggcctgggagcggattgacaagaaagtggaaggcctgagcaagcacatcaagctggaagaggaacggagaagcgaggacgcccagagcaaggccgccctgaccgactggctgcgggctaaggccagcttcgtgatcgagggcctgaaggaggccgacaaggacgagttctgcagatgcgagctgaagctgcagaagtggtacggggacctgcggggaaagcccttcgccatcgaagccgagaacagcatcctggacatcagcggcttcagcaagcagtacaactgtgccttcatctggcagaaggacggcgtgaagaagctgaacctgtacctgatcatcaactacttcaagggcggcaagctgcggttcaagaagatcaaacctgaagccttcgaagccaacagattctacaccgtgatcaacaaaaagagcggcgagatcgtgcccatggaggtgaacttcaacttcgacgaccccaacctgatcatcctgcctctggcctttggcaagagacagggcagagaattcatctggaacgacctgctgtccctggaaaccggcagcctgaagctggccaacggaagagtgatcgagaagacactgtacaacagaagaacccggcaggatgagcctgccctgttcgtggccctgaccttcgagcggcgggaggtcctggactcctccaatatcaaaccaatgaacctgatcggcgtggcaagaggcgaaaacatccccgccgtgatcgccctgaccgaccccgagggctgcccactgagccggtttaaggatagcctgggaaacccaacccacatcctgagaatcggcgagagctataaggagaagcagcggaccatccaggccaagaaggaggtggagcagcggagagccggcggctacagccggaagtacgccagcaaagccaagaatctggcagacgatatggtgagaaacaccgctagagatctgctgtactacgccgtgacccaggatgccatgctgatcttcgccaacctgagccggggcttcggccggcagggcaagcggaccttcatggccgagagacagtacacacggatggaggactggctgaccgccaagctggcctacgagggcctgagcaagacctacctgtccaagacactggcccagtacacctccaagacatgcagcaactgtgggtttaccatcaccagcgccgactacgacagggtgctggagaagctgaagaagacagcaacaggctggatgaccacaattaacggcaaggagctgaaggtggagggccagattacctactacaacagatacaagagacagaacgtagtcaaggacctgtccgtcgagctggatagactgagcgaagaatctgtgaacaacgacatctcctcctggacaaagggcagaagcggagaagctctgagcctcctgaagaaaagattctcccatagacccgtgcaggagaagttcgtgtgcctgaactgcggcttcgagacacacgcagccgagcaagccgccctgaacatcgccagatcctggctgttcctgcggagccaggagtacaagaaataccagacaaacaagacaaccggcaacaccgataagagagccttcgtcgagacctggcagtccttttaccggaagaagcttaaggaggtgtggaaacctgccgtgcggtctggcggatctggcggaggctccgcccaggagagcgtgaccttcgaggacgtggccgtgaacttcaccgacagggagtggcagtgcctgacctacgcccagaggcacctgtacaaggacgtgatgctggagaactacggcaacatggtgagcgtgggcttcctgttccccaagccccccctgatcagccacctggagaggggcgtggagccctgcgtgcaggacccccaggacagggagagcctgagctgcagctgcctggtgagcggcggcccaagcagcggcgcccctcctcccagcggcggcagcccagccggctccccaacctctaccgaggagggcacctctgagtccgccacccccgagagcggccctggcacctccaccgagcccagcgagggcagcgcacccggcagccctgccggcagccccacctccacagaggagggaaccagcaccgagcccagcgaaggcagcgccccaggcaccagcaccgagcctagtgagcaggagattaaacggatcaacaagatcagaagaagacttgtgaaagacagcaacaccaagaaggccggcaagacaggccccatgaaaaccctgctggttagagtgatgacacccgatctgagagagcggctggaaaacctgagaaagaagcctgaaaatatcccccagcccatcagcaatacatctagagccaacctgaataagctgctgaccgattacaccgaaatgaagaaggcgatcctgcatgtgtactgggaagagttccagaaggaccctgtgggcctgatgagccgggtggcccagcctgccagcaagaagatcgatcagaacaagctgaaacctgagatggacgagaagggcaacctgaccaccgccggctttgcctgctctcagtgtggccagcccctgttcgtgtacaagctggagcaggtgtctgagaagggcaaggcttacaccaactacttcggacggtgcaatgtggccgagcacgaaaagctgatcctgctggcccagctgaagcccgagaaggatagcgacgaagccgtgacatatagcctgggaaagtttgggcagagggccctggatttctacagcattcatgtgaccaaggagtccacccaccccgtgaagcccctggcccagatcgccggaaacagatacgcctccggacctgtgggaaaggccctgagcgacgcatgtatgggcacaatcgcctccttcctgtctaagtaccaggacatcatcatcgaacaccagaaggtggtgaagggcaaccagaagagactggagagcctgcgggagctggccggcaaggaaaacctggaataccctagcgtgaccctgccacctcagcctcacaccaaggagggcgttgatgcctacaacgaagtgatcgcccgggtgcgaatgtgggtgaacctgaacctgtggcagaagctgaagctaagcagagatgatgccaagcctctgctgagactgaagggattcccttcctttcctctggtcgagagacaggccaacgaagtggactggtgggacatggtgtgtaacgtgaagaagctgatcaacgagaaaaaggaggatggcaaggtgttttggcagaatctggctggctacaagagacaggaagccctgagaccatacctgagcagcgaggaagatcggaagaagggaaagaaattcgctcggtaccagctgggcgacctgctgctgcacctggaaaagaagcacggcgaggactggggaaaggtgtacgacgaggcctgggagcggattgacaagaaagtggaaggcctgagcaagcacatcaagctggaagaggaacggagaagcgaggacgcccagagcaaggccgccctgaccgactggctgcgggctaaggccagcttcgtgatcgagggcctgaaggaggccgacaaggacgagttctgcagatgcgagctgaagctgcagaagtggtacggggacctgcggggaaagcccttcgccatcgaagccgagaacagcatcctggacatcagcggcttcagcaagcagtacaactgtgccttcatctggcagaaggacggcgtgaagaagctgaacctgtacctgatcatcaactacttcaagggcggcaagctgcggttcaagaagatcaaacctgaagccttcgaagccaacagattctacaccgtgatcaacaaaaagagcggcgagatcgtgcccatggaggtgaacttcaacttcgacgaccccaacctgatcatcctgcctctggcctttggcaagagacagggcagagaattcatctggaacgacctgctgtccctggaaaccggcagcctgaagctggccaacggaagagtgatcgagaagacactgtacaacagaagaacccggcaggatgagcctgccctgttcgtggccctgaccttcgagcggcgggaggtcctggactcctccaatatcaaaccaatgaacctgatcggcgtggcaagaggcgaaaacatccccgccgtgatcgccctgaccgaccccgagggctgcccactgagccggtttaaggatagcctgggaaacccaacccacatcctgagaatcggcgagagctataaggagaagcagcggaccatccaggccaagaaggaggtggagcagcggagagccggcggctacagccggaagtacgccagcaaagccaagaatctggcagacgatatggtgagaaacaccgctagagatctgctgtactacgccgtgacccaggatgccatgctgatcttcgccaacctgagccggggcttcggccggcagggcaagcggaccttcatggccgagagacagtacacacggatggaggactggctgaccgccaagctggcctacgagggcctgagcaagacctacctgtccaagacactggcccagtacacctccaagacatgcagcaactgtgggtttaccatcaccagcgccgactacgacagggtgctggagaagctgaagaagacagcaacaggctggatgaccacaattaacggcaaggagctgaaggtggagggccagattacctactacaacagatacaagagacagaacgtagtcaaggacctgtccgtcgagctggatagactgagcgaagaatctgtgaacaacgacatctcctcctggacaaagggcagaagcggagaagctctgagcctcctgaagaaaagattctcccatagacccgtgcaggagaagttcgtgtgcctgaactgcggcttcgagacacacgcagccgagcaagccgccctgaacatcgccagatcctggctgttcctgcggagccaggagtacaagaaataccagacaaacaagacaaccggcaacaccgataagagagccttcgtcgagacctggcagtccttttaccggaagaagcttaaggaggtgtggaaacctgccgtgcggtctggcggatctggcggaggctcctgcccaggagagcgtgaccttcgaggacgtggccgtgaacttcaccgacagggagtggcagtgcctgacctacgcccagaggcacctgtacaaggacgtgatgctggagaactacggcaacatggtgagcgtgggcttcctgttccccaagccccccctgatcagccacctggagaggggcgtggagccctgcgtgcaggacccccaggacagggagagcctgagctgcagctgcctggtgagcggatctggctccggcagcggccccaagaaaaagagaaaagtctaagctgccttctgcggggcttgccttctggccatgcccttcttctctcccttgcacctgtacctcttggtctttgaataaagcctgagtaggaaggctagcaaaaaaaaaaaaaaaaaaaaaaaaaaaaaaaaaaaaaaaaaaaaaaaaaaaaaaaaaaaaaaaaaaaaaaaaaaaaaaaa

SEQ ID NO: 16388 - RNA, 9485 nt, synthetic construct
  source 1..9485: mol_type = other RNA
aggaaataagagagaaaagaagagtaagaagaaatataagagccaccatggcccctaagaagaagcgtaaagtgagccggatggaacgcctcgtctacgaggtgcggcagaagtgcagaaacatcgaggacatctgcatctcctgcggatctctgaacgtgaccctggagcacccactgttcatcggcggcatgtgccagaactgtaaaaactgttttctggagtgtgcctatcaatacgacgatgacggctaccagagctactgcaccatctgttgcggcggaagagaggtgctgatgtgtggaaataacaactgctgccggtgcttctgcgtggaatgcgtggacctgctggtgggccccggcgccgcccaggccgctattaaggaagatccttggaactgctacatgtgcggccacaagggcacatacggcctgctgagacggagagaggactggcctagcagactgcagatgttcttcgccaataaccacgaccaggagttcgacccccctaaggtgtaccctcccgtccccgccgagaagagaaagcccatccgggtcctgagcctgttcgatggcatcgccaccggtctgctggtgctgaaggacctgggcatccaggtggataggtacattgcctccgaggtgtgcgaggactccatcaccgtgggaatggtgcgtcatcagggcaagatcatgtacgtgggcgacgtgcggagcgtgacacagaagcatatccaggagtggggccctttcgacctggtgatcggcggcagcccttgcaatgacctgagcatcgtgaacccagcccggaagggcctgtacgagggaaccggcagactgttcttcgagttttacagactgctgcacgacgcccggcctaaggaaggcgacgaccggcccttcttttggctgttcgagaatgtggtggccatgggagtcagcgacaagcgggatattagccggttcctggagagcaaccccgtgatgatcgatgccaaggaagtgagcgccgcccaccgggccagatacttctggggcaatctgcctggcatgaacagacccctggccagcaccgtgaacgacaagctggagctgcaggagtgcctggagcacggccggatcgccaagttcagcaaggtgagaaccatcaccacccgaagcaacagcatcaaacaaggcaaggaccagcactttcctgtgttcatgaacgagaaggaggacatcctgtggtgtaccgagatggagagagtgttcgggttcccagtccactacacagatgtcagcaacatgtctagactggccagacagagactgctgggaagaagctggtccgtccctgtgatcagacacctgttcgcccctctgaaggagtacttcgcctgcgtgagcagcggcaacagcaacgccaacagccggggccccagcttctctagcggcctggtgccactgtccctgagagggagccacatgggccccatggagatctacaaaaccgtgagcgcctggaagcggcagcctgtgcgcgtgctgagcctgtttcggaatatcgataaagtcctgaaaagcctgggattcctggagagcggctctggctccggcggtggcaccctgaagtacgtggaggatgtgacaaacgtggtcagacgggatgtggagaagtggggccccttcgatctggtgtacggcagcacccaacccctgggcagctcttgtgaccggtgccctggctggtacatgtttcagttccaccggatcctgcagtacgccctgccgagacaggagtcccagcggccattcttttggattttcatggacaacttgctgctgaccgaggatgaccaggaaactaccactcggttcctgcagaccgaagccgtgaccctgcaggacgtgagaggccgggactaccagaacgccatgcgggtgtggtccaacatccctggactgaaaagcaagcacgcacctctgacccctaaagaagaggagtacctgcaggcccaggtgcggagcagaagcaagctggacgcccctaaggtggatctgctggtgaagaattgcctcctgcccctgagagagtacttcaagtatttcagccagaatagtctgcccctgggaggcagcggcggcggcgccctggtgacatttgaggacgtcgccgtgcggttcacccaggaggaatgggctctgctggatccttctcagaaaatcctgtaccgggacgtgatgagagagacataccggaatctgacctccgtgggcatcaactgggaatgttgggaccttgaagcctgcttcagaagcctgggaagaaacctgagagtgcaggtggtgaagagaaagtgcgagctgaccaacagcggcccctgcgccgagggcggcccaagcagcggcgcccctcctcccagcggcggcagcccagccggctccccaacctctaccgaggagggcacctctgagtccgccacccccgagagcggccctggcacctccaccgagcccagcgagggcagcgcacccggcagccctgccggcagccccacctccacagaggagggaaccagcaccgagcccagcgaaggcagcgccccaggcaccagcaccgagcctagtgagcaggagattaaacggatcaacaagatcagaagaagacttgtgaaagacagcaacaccaagaaggccggcaagacaggccccatgaaaaccctgctggttagagtgatgacacccgatctgagagagcggctggaaaacctgagaaagaagcctgaaaatatcccccagcccatcagcaatacatctagagccaacctgaataagctgctgaccgattacaccgaaatgaagaaggcgatcctgcatgtgtactgggaagagttccagaaggaccctgtgggcctgatgagccgggtggcccagcctgccagcaagaagatcgatcagaacaagctgaaacctgagatggacgagaagggcaacctgaccaccgccggctttgcctgctctcagtgtggccagcccctgttcgtgtacaagctggagcaggtgtctgagaagggcaaggcttacaccaactacttcggacggtgcaatgtggccgagcacgaaaagctgatcctgctggcccagctgaagcccgagaaggatagcgacgaagccgtgacatatagcctgggaaagtttgggcagagggccctggatttctacagcattcatgtgaccaaggagtccacccaccccgtgaagcccctggcccagatcgccggaaacagatacgcctccggacctgtgggaaaggccctgagcgacgcatgtatgggcacaatcgcctccttcctgtctaagtaccaggacatcatcatcgaacaccagaaggtggtgaagggcaaccagaagagactggagagcctgcgggagctggccggcaaggaaaacctggaataccctagcgtgaccctgccacctcagcctcacaccaaggagggcgttgatgcctacaacgaagtgatcgcccgggtgcgaatgtgggtgaacctgaacctgtggcagaagctgaagctaagcagagatgatgccaagcctctgctgagactgaagggattcccttcctttcctctggtcgagagacaggccaacgaagtggactggtgggacatggtgtgtaacgtgaagaagctgatcaacgagaaaaaggaggatggcaaggtgttttggcagaatctggctggctacaagagacaggaagccctgagaccatacctgagcagcgaggaagatcggaagaagggaaagaaattcgctcggtaccagctgggcgacctgctgctgcacctggaaaagaagcacggcgaggactggggaaaggtgtacgacgaggcctgggagcggattgacaagaaagtggaaggcctgagcaagcacatcaagctggaagaggaacggagaagcgaggacgcccagagcaaggccgccctgaccgactggctgcgggctaaggccagcttcgtgatcgagggcctgaaggaggccgacaaggacgagttctgcagatgcgagctgaagctgcagaagtggtacggggacctgcggggaaagcccttcgccatcgaagccgagaacagcatcctggacatcagcggcttcagcaagcagtacaactgtgccttcatctggcagaaggacggcgtgaagaagctgaacctgtacctgatcatcaactacttcaagggcggcaagctgcggttcaagaagatcaaacctgaagccttcgaagccaacagattctacaccgtgatcaacaaaaagagcggcgagatcgtgcccatggaggtgaacttcaacttcgacgaccccaacctgatcatcctgcctctggcctttggcaagagacagggcagagaattcatctggaacgacctgctgtccctggaaaccggcagcctgaagctggccaacggaagagtgatcgagaagacactgtacaacagaagaacccggcaggatgagcctgccctgttcgtggccctgaccttcgagcggcgggaggtcctggactcctccaatatcaaaccaatgaacctgatcggcgtggcaagaggcgaaaacatccccgccgtgatcgccctgaccgaccccgagggctgcccactgagccggtttaaggatagcctgggaaacccaacccacatcctgagaatcggcgagagctataaggagaagcagcggaccatccaggccaagaaggaggtggagcagcggagagccggcggctacagccggaagtacgccagcaaagccaagaatctggcagacgatatggtgagaaacaccgctagagatctgctgtactacgccgtgacccaggatgccatgctgatcttcgccaacctgagccggggcttcggccggcagggcaagcggaccttcatggccgagagacagtacacacggatggaggactggctgaccgccaagctggcctacgagggcctgagcaagacctacctgtccaagacactggcccagtacacctccaagacatgcagcaactgtgggtttaccatcaccagcgccgactacgacagggtgctggagaagctgaagaagacagcaacaggctggatgaccacaattaacggcaaggagctgaaggtggagggccagattacctactacaacagatacaagagacagaacgtagtcaaggacctgtccgtcgagctggatagactgagcgaagaatctgtgaacaacgacatctcctcctggacaaagggcagaagcggagaagctctgagcctcctgaagaaaagattctcccatagacccgtgcaggagaagttcgtgtgcctgaactgcggcttcgagacacacgcagccgagcaagccgccctgaacatcgccagatcctggctgttcctgcggagccaggagtacaagaaataccagacaaacaagacaaccggcaacaccgataagagagccttcgtcgagacctggcagtccttttaccggaagaagcttaaggaggtgtggaaacctgccgtgcggtctggcggatctggcggaggctccagccagagcctggtgaccttcggcgacgtggccatcaacttcagccaggaggagtgggagtggctgaacagcgcccagaggaacctgtacaggagcgtgatgctggagaactacaggaacctggtgagcctgggcctgtgcgtgagcaagcccgacatgatcagcagcctggagcagaggaaggagccctggatggtgaagaggaagctgaccaggggcaggtgccccgacctgaaggccgtgggcggcccaagcagcggcgcccctcctcccagcggcggcagcccagccggctccccaacctctaccgaggagggcacctctgagtccgccacccccgagagcggccctggcacctccaccgagcccagcgagggcagcgcacccggcagccctgccggcagccccacctccacagaggagggaaccagcaccgagcccagcgaaggcagcgccccaggcaccagcaccgagcctagtgagcaggagattaaacggatcaacaagatcagaagaagacttgtgaaagacagcaacaccaagaaggccggcaagacaggccccatgaaaaccctgctggttagagtgatgacacccgatctgagagagcggctggaaaacctgagaaagaagcctgaaaatatcccccagcccatcagcaatacatctagagccaacctgaataagctgctgaccgattacaccgaaatgaagaaggcgatcctgcatgtgtactgggaagagttccagaaggaccctgtgggcctgatgagccgggtggcccagcctgccagcaagaagatcgatcagaacaagctgaaacctgagatggacgagaagggcaacctgaccaccgccggctttgcctgctctcagtgtggccagcccctgttcgtgtacaagctggagcaggtgtctgagaagggcaaggcttacaccaactacttcggacggtgcaatgtggccgagcacgaaaagctgatcctgctggcccagctgaagcccgagaaggatagcgacgaagccgtgacatatagcctgggaaagtttgggcagagggccctggatttctacagcattcatgtgaccaaggagtccacccaccccgtgaagcccctggcccagatcgccggaaacagatacgcctccggacctgtgggaaaggccctgagcgacgcatgtatgggcacaatcgcctccttcctgtctaagtaccaggacatcatcatcgaacaccagaaggtggtgaagggcaaccagaagagactggagagcctgcgggagctggccggcaaggaaaacctggaataccctagcgtgaccctgccacctcagcctcacaccaaggagggcgttgatgcctacaacgaagtgatcgcccgggtgcgaatgtgggtgaacctgaacctgtggcagaagctgaagctaagcagagatgatgccaagcctctgctgagactgaagggattcccttcctttcctctggtcgagagacaggccaacgaagtggactggtgggacatggtgtgtaacgtgaagaagctgatcaacgagaaaaaggaggatggcaaggtgttttggcagaatctggctggctacaagagacaggaagccctgagaccatacctgagcagcgaggaagatcggaagaagggaaagaaattcgctcggtaccagctgggcgacctgctgctgcacctggaaaagaagcacggcgaggactggggaaaggtgtacgacgaggcctgggagcggattgacaagaaagtggaaggcctgagcaagcacatcaagctggaagaggaacggagaagcgaggacgcccagagcaaggccgccctgaccgactggctgcgggctaaggccagcttcgtgatcgagggcctgaaggaggccgacaaggacgagttctgcagatgcgagctgaagctgcagaagtggtacggggacctgcggggaaagcccttcgccatcgaagccgagaacagcatcctggacatcagcggcttcagcaagcagtacaactgtgccttcatctggcagaaggacggcgtgaagaagctgaacctgtacctgatcatcaactacttcaagggcggcaagctgcggttcaagaagatcaaacctgaagccttcgaagccaacagattctacaccgtgatcaacaaaaagagcggcgagatcgtgcccatggaggtgaacttcaacttcgacgaccccaacctgatcatcctgcctctggcctttggcaagagacagggcagagaattcatctggaacgacctgctgtccctggaaaccggcagcctgaagctggccaacggaagagtgatcgagaagacactgtacaacagaagaacccggcaggatgagcctgccctgttcgtggccctgaccttcgagcggcgggaggtcctggactcctccaatatcaaaccaatgaacctgatcggcgtggcaagaggcgaaaacatccccgccgtgatcgccctgaccgaccccgagggctgcccactgagccggtttaaggatagcctgggaaacccaacccacatcctgagaatcggcgagagctataaggagaagcagcggaccatccaggccaagaaggaggtggagcagcggagagccggcggctacagccggaagtacgccagcaaagccaagaatctggcagacgatatggtgagaaacaccgctagagatctgctgtactacgccgtgacccaggatgccatgctgatcttcgccaacctgagccggggcttcggccggcagggcaagcggaccttcatggccgagagacagtacacacggatggaggactggctgaccgccaagctggcctacgagggcctgagcaagacctacctgtccaagacactggcccagtacacctccaagacatgcagcaactgtgggtttaccatcaccagcgccgactacgacagggtgctggagaagctgaagaagacagcaacaggctggatgaccacaattaacggcaaggagctgaaggtggagggccagattacctactacaacagatacaagagacagaacgtagtcaaggacctgtccgtcgagctggatagactgagcgaagaatctgtgaacaacgacatctcctcctggacaaagggcagaagcggagaagctctgagcctcctgaagaaaagattctcccatagacccgtgcaggagaagttcgtgtgcctgaactgcggcttcgagacacacgcagccgagcaagccgccctgaacatcgccagatcctggctgttcctgcggagccaggagtacaagaaataccagacaaacaagacaaccggcaacaccgataagagagccttcgtcgagacctggcagtccttttaccggaagaagcttaaggaggtgtggaaacctgccgtgcggtctggcggatctggcggaggctcctagccagagcctggtgaccttcggcgacgtggccatcaacttcagccaggaggagtgggagtggctgaacagcgcccagaggaacctgtacaggagcgtgatgctggagaactacaggaacctggtgagcctgggcctgtgcgtgagcaagcccgacatgatcagcagcctggagcagaggaaggagccctggatggtgaagaggaagctgaccaggggcaggtgccccgacctgaaggccgtgggatctggctccggcagcggccccaagaaaaagagaaaagtctaagctgccttctgcggggcttgccttctggccatgcccttcttctctcccttgcacctgtacctcttggtctttgaataaagcctgagtaggaaggctagcaaaaaaaaaaaaaaaaaaaaaaaaaaaaaaaaaaaaaaaaaaaaaaaaaaaaaaaaaaaaaaaaaaaaaaaaaaaaaaaa

SEQ ID NO: 16389 - RNA, 9485 nt, synthetic construct
  source 1..9485: mol_type = other RNA
aggaaataagagagaaaagaagagtaagaagaaatataagagccaccatggcccctaagaagaagcgtaaagtgagccggatggaacgcctcgtctacgaggtgcggcagaagtgcagaaacatcgaggacatctgcatctcctgcggatctctgaacgtgaccctggagcacccactgttcatcggcggcatgtgccagaactgtaaaaactgttttctggagtgtgcctatcaatacgacgatgacggctaccagagctactgcaccatctgttgcggcggaagagaggtgctgatgtgtggaaataacaactgctgccggtgcttctgcgtggaatgcgtggacctgctggtgggccccggcgccgcccaggccgctattaaggaagatccttggaactgctacatgtgcggccacaagggcacatacggcctgctgagacggagagaggactggcctagcagactgcagatgttcttcgccaataaccacgaccaggagttcgacccccctaaggtgtaccctcccgtccccgccgagaagagaaagcccatccgggtcctgagcctgttcgatggcatcgccaccggtctgctggtgctgaaggacctgggcatccaggtggataggtacattgcctccgaggtgtgcgaggactccatcaccgtgggaatggtgcgtcatcagggcaagatcatgtacgtgggcgacgtgcggagcgtgacacagaagcatatccaggagtggggccctttcgacctggtgatcggcggcagcccttgcaatgacctgagcatcgtgaacccagcccggaagggcctgtacgagggaaccggcagactgttcttcgagttttacagactgctgcacgacgcccggcctaaggaaggcgacgaccggcccttcttttggctgttcgagaatgtggtggccatgggagtcagcgacaagcgggatattagccggttcctggagagcaaccccgtgatgatcgatgccaaggaagtgagcgccgcccaccgggccagatacttctggggcaatctgcctggcatgaacagacccctggccagcaccgtgaacgacaagctggagctgcaggagtgcctggagcacggccggatcgccaagttcagcaaggtgagaaccatcaccacccgaagcaacagcatcaaacaaggcaaggaccagcactttcctgtgttcatgaacgagaaggaggacatcctgtggtgtaccgagatggagagagtgttcgggttcccagtccactacacagatgtcagcaacatgtctagactggccagacagagactgctgggaagaagctggtccgtccctgtgatcagacacctgttcgcccctctgaaggagtacttcgcctgcgtgagcagcggcaacagcaacgccaacagccggggccccagcttctctagcggcctggtgccactgtccctgagagggagccacatgggccccatggagatctacaaaaccgtgagcgcctggaagcggcagcctgtgcgcgtgctgagcctgtttcggaatatcgataaagtcctgaaaagcctgggattcctggagagcggctctggctccggcggtggcaccctgaagtacgtggaggatgtgacaaacgtggtcagacgggatgtggagaagtggggccccttcgatctggtgtacggcagcacccaacccctgggcagctcttgtgaccggtgccctggctggtacatgtttcagttccaccggatcctgcagtacgccctgccgagacaggagtcccagcggccattcttttggattttcatggacaacttgctgctgaccgaggatgaccaggaaactaccactcggttcctgcagaccgaagccgtgaccctgcaggacgtgagaggccgggactaccagaacgccatgcgggtgtggtccaacatccctggactgaaaagcaagcacgcacctctgacccctaaagaagaggagtacctgcaggcccaggtgcggagcagaagcaagctggacgcccctaaggtggatctgctggtgaagaattgcctcctgcccctgagagagtacttcaagtatttcagccagaatagtctgcccctgggaggcagcggcggcggcgccctggtgacatttgaggacgtcgccgtgcggttcacccaggaggaatgggctctgctggatccttctcagaaaatcctgtaccgggacgtgatgagagagacataccggaatctgacctccgtgggcatcaactgggaatgttgggaccttgaagcctgcttcagaagcctgggaagaaacctgagagtgcaggtggtgaagagaaagtgcgagctgaccaacagcggcccctgcgccgagggcggcccaagcagcggcgcccctcctcccagcggcggcagcccagccggctccccaacctctaccgaggagggcacctctgagtccgccacccccgagagcggccctggcacctccaccgagcccagcgagggcagcgcacccggcagccctgccggcagccccacctccacagaggagggaaccagcaccgagcccagcgaaggcagcgccccaggcaccagcaccgagcctagtgagcaggagattaaacggatcaacaagatcagaagaagacttgtgaaagacagcaacaccaagaaggccggcaagacaggccccatgaaaaccctgctggttagagtgatgacacccgatctgagagagcggctggaaaacctgagaaagaagcctgaaaatatcccccagcccatcagcaatacatctagagccaacctgaataagctgctgaccgattacaccgaaatgaagaaggcgatcctgcatgtgtactgggaagagttccagaaggaccctgtgggcctgatgagccgggtggcccagcctgccagcaagaagatcgatcagaacaagctgaaacctgagatggacgagaagggcaacctgaccaccgccggctttgcctgctctcagtgtggccagcccctgttcgtgtacaagctggagcaggtgtctgagaagggcaaggcttacaccaactacttcggacggtgcaatgtggccgagcacgaaaagctgatcctgctggcccagctgaagcccgagaaggatagcgacgaagccgtgacatatagcctgggaaagtttgggcagagggccctggatttctacagcattcatgtgaccaaggagtccacccaccccgtgaagcccctggcccagatcgccggaaacagatacgcctccggacctgtgggaaaggccctgagcgacgcatgtatgggcacaatcgcctccttcctgtctaagtaccaggacatcatcatcgaacaccagaaggtggtgaagggcaaccagaagagactggagagcctgcgggagctggccggcaaggaaaacctggaataccctagcgtgaccctgccacctcagcctcacaccaaggagggcgttgatgcctacaacgaagtgatcgcccgggtgcgaatgtgggtgaacctgaacctgtggcagaagctgaagctaagcagagatgatgccaagcctctgctgagactgaagggattcccttcctttcctctggtcgagagacaggccaacgaagtggactggtgggacatggtgtgtaacgtgaagaagctgatcaacgagaaaaaggaggatggcaaggtgttttggcagaatctggctggctacaagagacaggaagccctgagaccatacctgagcagcgaggaagatcggaagaagggaaagaaattcgctcggtaccagctgggcgacctgctgctgcacctggaaaagaagcacggcgaggactggggaaaggtgtacgacgaggcctgggagcggattgacaagaaagtggaaggcctgagcaagcacatcaagctggaagaggaacggagaagcgaggacgcccagagcaaggccgccctgaccgactggctgcgggctaaggccagcttcgtgatcgagggcctgaaggaggccgacaaggacgagttctgcagatgcgagctgaagctgcagaagtggtacggggacctgcggggaaagcccttcgccatcgaagccgagaacagcatcctggacatcagcggcttcagcaagcagtacaactgtgccttcatctggcagaaggacggcgtgaagaagctgaacctgtacctgatcatcaactacttcaagggcggcaagctgcggttcaagaagatcaaacctgaagccttcgaagccaacagattctacaccgtgatcaacaaaaagagcggcgagatcgtgcccatggaggtgaacttcaacttcgacgaccccaacctgatcatcctgcctctggcctttggcaagagacagggcagagaattcatctggaacgacctgctgtccctggaaaccggcagcctgaagctggccaacggaagagtgatcgagaagacactgtacaacagaagaacccggcaggatgagcctgccctgttcgtggccctgaccttcgagcggcgggaggtcctggactcctccaatatcaaaccaatgaacctgatcggcgtggcaagaggcgaaaacatccccgccgtgatcgccctgaccgaccccgagggctgcccactgagccggtttaaggatagcctgggaaacccaacccacatcctgagaatcggcgagagctataaggagaagcagcggaccatccaggccaagaaggaggtggagcagcggagagccggcggctacagccggaagtacgccagcaaagccaagaatctggcagacgatatggtgagaaacaccgctagagatctgctgtactacgccgtgacccaggatgccatgctgatcttcgccaacctgagccggggcttcggccggcagggcaagcggaccttcatggccgagagacagtacacacggatggaggactggctgaccgccaagctggcctacgagggcctgagcaagacctacctgtccaagacactggcccagtacacctccaagacatgcagcaactgtgggtttaccatcaccagcgccgactacgacagggtgctggagaagctgaagaagacagcaacaggctggatgaccacaattaacggcaaggagctgaaggtggagggccagattacctactacaacagatacaagagacagaacgtagtcaaggacctgtccgtcgagctggatagactgagcgaagaatctgtgaacaacgacatctcctcctggacaaagggcagaagcggagaagctctgagcctcctgaagaaaagattctcccatagacccgtgcaggagaagttcgtgtgcctgaactgcggcttcgagacacacgcagccgagcaagccgccctgaacatcgccagatcctggctgttcctgcggagccaggagtacaagaaataccagacaaacaagacaaccggcaacaccgataagagagccttcgtcgagacctggcagtccttttaccggaagaagcttaaggaggtgtggaaacctgccgtgcggtctggcggatctggcggaggctccttccagggcagcgtgaccttcagggacgtggccatcgacttcagccaggaggagtgggagtggctgcagcccgcccagagggacctgtacaggcacgtgatgctggagaactacggccacctggtgagcctgggcctgaacatcagcaagccccacgtggtgagcctgctggagcagggcagggacccctggcccgacaacggcgccgtgggcggcggcctgttcagcgagagcaagggcgagggcggcccaagcagcggcgcccctcctcccagcggcggcagcccagccggctccccaacctctaccgaggagggcacctctgagtccgccacccccgagagcggccctggcacctccaccgagcccagcgagggcagcgcacccggcagccctgccggcagccccacctccacagaggagggaaccagcaccgagcccagcgaaggcagcgccccaggcaccagcaccgagcctagtgagcaggagattaaacggatcaacaagatcagaagaagacttgtgaaagacagcaacaccaagaaggccggcaagacaggccccatgaaaaccctgctggttagagtgatgacacccgatctgagagagcggctggaaaacctgagaaagaagcctgaaaatatcccccagcccatcagcaatacatctagagccaacctgaataagctgctgaccgattacaccgaaatgaagaaggcgatcctgcatgtgtactgggaagagttccagaaggaccctgtgggcctgatgagccgggtggcccagcctgccagcaagaagatcgatcagaacaagctgaaacctgagatggacgagaagggcaacctgaccaccgccggctttgcctgctctcagtgtggccagcccctgttcgtgtacaagctggagcaggtgtctgagaagggcaaggcttacaccaactacttcggacggtgcaatgtggccgagcacgaaaagctgatcctgctggcccagctgaagcccgagaaggatagcgacgaagccgtgacatatagcctgggaaagtttgggcagagggccctggatttctacagcattcatgtgaccaaggagtccacccaccccgtgaagcccctggcccagatcgccggaaacagatacgcctccggacctgtgggaaaggccctgagcgacgcatgtatgggcacaatcgcctccttcctgtctaagtaccaggacatcatcatcgaacaccagaaggtggtgaagggcaaccagaagagactggagagcctgcgggagctggccggcaaggaaaacctggaataccctagcgtgaccctgccacctcagcctcacaccaaggagggcgttgatgcctacaacgaagtgatcgcccgggtgcgaatgtgggtgaacctgaacctgtggcagaagctgaagctaagcagagatgatgccaagcctctgctgagactgaagggattcccttcctttcctctggtcgagagacaggccaacgaagtggactggtgggacatggtgtgtaacgtgaagaagctgatcaacgagaaaaaggaggatggcaaggtgttttggcagaatctggctggctacaagagacaggaagccctgagaccatacctgagcagcgaggaagatcggaagaagggaaagaaattcgctcggtaccagctgggcgacctgctgctgcacctggaaaagaagcacggcgaggactggggaaaggtgtacgacgaggcctgggagcggattgacaagaaagtggaaggcctgagcaagcacatcaagctggaagaggaacggagaagcgaggacgcccagagcaaggccgccctgaccgactggctgcgggctaaggccagcttcgtgatcgagggcctgaaggaggccgacaaggacgagttctgcagatgcgagctgaagctgcagaagtggtacggggacctgcggggaaagcccttcgccatcgaagccgagaacagcatcctggacatcagcggcttcagcaagcagtacaactgtgccttcatctggcagaaggacggcgtgaagaagctgaacctgtacctgatcatcaactacttcaagggcggcaagctgcggttcaagaagatcaaacctgaagccttcgaagccaacagattctacaccgtgatcaacaaaaagagcggcgagatcgtgcccatggaggtgaacttcaacttcgacgaccccaacctgatcatcctgcctctggcctttggcaagagacagggcagagaattcatctggaacgacctgctgtccctggaaaccggcagcctgaagctggccaacggaagagtgatcgagaagacactgtacaacagaagaacccggcaggatgagcctgccctgttcgtggccctgaccttcgagcggcgggaggtcctggactcctccaatatcaaaccaatgaacctgatcggcgtggcaagaggcgaaaacatccccgccgtgatcgccctgaccgaccccgagggctgcccactgagccggtttaaggatagcctgggaaacccaacccacatcctgagaatcggcgagagctataaggagaagcagcggaccatccaggccaagaaggaggtggagcagcggagagccggcggctacagccggaagtacgccagcaaagccaagaatctggcagacgatatggtgagaaacaccgctagagatctgctgtactacgccgtgacccaggatgccatgctgatcttcgccaacctgagccggggcttcggccggcagggcaagcggaccttcatggccgagagacagtacacacggatggaggactggctgaccgccaagctggcctacgagggcctgagcaagacctacctgtccaagacactggcccagtacacctccaagacatgcagcaactgtgggtttaccatcaccagcgccgactacgacagggtgctggagaagctgaagaagacagcaacaggctggatgaccacaattaacggcaaggagctgaaggtggagggccagattacctactacaacagatacaagagacagaacgtagtcaaggacctgtccgtcgagctggatagactgagcgaagaatctgtgaacaacgacatctcctcctggacaaagggcagaagcggagaagctctgagcctcctgaagaaaagattctcccatagacccgtgcaggagaagttcgtgtgcctgaactgcggcttcgagacacacgcagccgagcaagccgccctgaacatcgccagatcctggctgttcctgcggagccaggagtacaagaaataccagacaaacaagacaaccggcaacaccgataagagagccttcgtcgagacctggcagtccttttaccggaagaagcttaaggaggtgtggaaacctgccgtgcggtctggcggatctggcggaggctcctttccagggcagcgtgaccttcagggacgtggccatcgacttcagccaggaggagtgggagtggctgcagcccgcccagagggacctgtacaggcacgtgatgctggagaactacggccacctggtgagcctgggcctgaacatcagcaagccccacgtggtgagcctgctggagcagggcagggacccctggcccgacaacggcgccgtgggcggcggcctgttcagcgagagcaagggcgagggatctggctccggcagcggccccaagaaaaagagaaaagtctaagctgccttctgcggggcttgccttctggccatgcccttcttctctcccttgcacctgtacctcttggtctttgaataaagcctgagtaggaaggctagcaaaaaaaaaaaaaaaaaaaaaaaaaaaaaaaaaaaaaaaaaaaaaaaaaaaaaaaaaaaaaaaaaaaaaaaaaaaaaaaa

SEQ ID NO: 16390 - RNA, 9485 nt, synthetic construct
  source 1..9485: mol_type = other RNA
aggaaataagagagaaaagaagagtaagaagaaatataagagccaccatggcccctaagaagaagcgtaaagtgagccggatggaacgcctcgtctacgaggtgcggcagaagtgcagaaacatcgaggacatctgcatctcctgcggatctctgaacgtgaccctggagcacccactgttcatcggcggcatgtgccagaactgtaaaaactgttttctggagtgtgcctatcaatacgacgatgacggctaccagagctactgcaccatctgttgcggcggaagagaggtgctgatgtgtggaaataacaactgctgccggtgcttctgcgtggaatgcgtggacctgctggtgggccccggcgccgcccaggccgctattaaggaagatccttggaactgctacatgtgcggccacaagggcacatacggcctgctgagacggagagaggactggcctagcagactgcagatgttcttcgccaataaccacgaccaggagttcgacccccctaaggtgtaccctcccgtccccgccgagaagagaaagcccatccgggtcctgagcctgttcgatggcatcgccaccggtctgctggtgctgaaggacctgggcatccaggtggataggtacattgcctccgaggtgtgcgaggactccatcaccgtgggaatggtgcgtcatcagggcaagatcatgtacgtgggcgacgtgcggagcgtgacacagaagcatatccaggagtggggccctttcgacctggtgatcggcggcagcccttgcaatgacctgagcatcgtgaacccagcccggaagggcctgtacgagggaaccggcagactgttcttcgagttttacagactgctgcacgacgcccggcctaaggaaggcgacgaccggcccttcttttggctgttcgagaatgtggtggccatgggagtcagcgacaagcgggatattagccggttcctggagagcaaccccgtgatgatcgatgccaaggaagtgagcgccgcccaccgggccagatacttctggggcaatctgcctggcatgaacagacccctggccagcaccgtgaacgacaagctggagctgcaggagtgcctggagcacggccggatcgccaagttcagcaaggtgagaaccatcaccacccgaagcaacagcatcaaacaaggcaaggaccagcactttcctgtgttcatgaacgagaaggaggacatcctgtggtgtaccgagatggagagagtgttcgggttcccagtccactacacagatgtcagcaacatgtctagactggccagacagagactgctgggaagaagctggtccgtccctgtgatcagacacctgttcgcccctctgaaggagtacttcgcctgcgtgagcagcggcaacagcaacgccaacagccggggccccagcttctctagcggcctggtgccactgtccctgagagggagccacatgggccccatggagatctacaaaaccgtgagcgcctggaagcggcagcctgtgcgcgtgctgagcctgtttcggaatatcgataaagtcctgaaaagcctgggattcctggagagcggctctggctccggcggtggcaccctgaagtacgtggaggatgtgacaaacgtggtcagacgggatgtggagaagtggggccccttcgatctggtgtacggcagcacccaacccctgggcagctcttgtgaccggtgccctggctggtacatgtttcagttccaccggatcctgcagtacgccctgccgagacaggagtcccagcggccattcttttggattttcatggacaacttgctgctgaccgaggatgaccaggaaactaccactcggttcctgcagaccgaagccgtgaccctgcaggacgtgagaggccgggactaccagaacgccatgcgggtgtggtccaacatccctggactgaaaagcaagcacgcacctctgacccctaaagaagaggagtacctgcaggcccaggtgcggagcagaagcaagctggacgcccctaaggtggatctgctggtgaagaattgcctcctgcccctgagagagtacttcaagtatttcagccagaatagtctgcccctgggaggcagcggcggcggcgccctggtgacatttgaggacgtcgccgtgcggttcacccaggaggaatgggctctgctggatccttctcagaaaatcctgtaccgggacgtgatgagagagacataccggaatctgacctccgtgggcatcaactgggaatgttgggaccttgaagcctgcttcagaagcctgggaagaaacctgagagtgcaggtggtgaagagaaagtgcgagctgaccaacagcggcccctgcgccgagggcggcccaagcagcggcgcccctcctcccagcggcggcagcccagccggctccccaacctctaccgaggagggcacctctgagtccgccacccccgagagcggccctggcacctccaccgagcccagcgagggcagcgcacccggcagccctgccggcagccccacctccacagaggagggaaccagcaccgagcccagcgaaggcagcgccccaggcaccagcaccgagcctagtgagcaggagattaaacggatcaacaagatcagaagaagacttgtgaaagacagcaacaccaagaaggccggcaagacaggccccatgaaaaccctgctggttagagtgatgacacccgatctgagagagcggctggaaaacctgagaaagaagcctgaaaatatcccccagcccatcagcaatacatctagagccaacctgaataagctgctgaccgattacaccgaaatgaagaaggcgatcctgcatgtgtactgggaagagttccagaaggaccctgtgggcctgatgagccgggtggcccagcctgccagcaagaagatcgatcagaacaagctgaaacctgagatggacgagaagggcaacctgaccaccgccggctttgcctgctctcagtgtggccagcccctgttcgtgtacaagctggagcaggtgtctgagaagggcaaggcttacaccaactacttcggacggtgcaatgtggccgagcacgaaaagctgatcctgctggcccagctgaagcccgagaaggatagcgacgaagccgtgacatatagcctgggaaagtttgggcagagggccctggatttctacagcattcatgtgaccaaggagtccacccaccccgtgaagcccctggcccagatcgccggaaacagatacgcctccggacctgtgggaaaggccctgagcgacgcatgtatgggcacaatcgcctccttcctgtctaagtaccaggacatcatcatcgaacaccagaaggtggtgaagggcaaccagaagagactggagagcctgcgggagctggccggcaaggaaaacctggaataccctagcgtgaccctgccacctcagcctcacaccaaggagggcgttgatgcctacaacgaagtgatcgcccgggtgcgaatgtgggtgaacctgaacctgtggcagaagctgaagctaagcagagatgatgccaagcctctgctgagactgaagggattcccttcctttcctctggtcgagagacaggccaacgaagtggactggtgggacatggtgtgtaacgtgaagaagctgatcaacgagaaaaaggaggatggcaaggtgttttggcagaatctggctggctacaagagacaggaagccctgagaccatacctgagcagcgaggaagatcggaagaagggaaagaaattcgctcggtaccagctgggcgacctgctgctgcacctggaaaagaagcacggcgaggactggggaaaggtgtacgacgaggcctgggagcggattgacaagaaagtggaaggcctgagcaagcacatcaagctggaagaggaacggagaagcgaggacgcccagagcaaggccgccctgaccgactggctgcgggctaaggccagcttcgtgatcgagggcctgaaggaggccgacaaggacgagttctgcagatgcgagctgaagctgcagaagtggtacggggacctgcggggaaagcccttcgccatcgaagccgagaacagcatcctggacatcagcggcttcagcaagcagtacaactgtgccttcatctggcagaaggacggcgtgaagaagctgaacctgtacctgatcatcaactacttcaagggcggcaagctgcggttcaagaagatcaaacctgaagccttcgaagccaacagattctacaccgtgatcaacaaaaagagcggcgagatcgtgcccatggaggtgaacttcaacttcgacgaccccaacctgatcatcctgcctctggcctttggcaagagacagggcagagaattcatctggaacgacctgctgtccctggaaaccggcagcctgaagctggccaacggaagagtgatcgagaagacactgtacaacagaagaacccggcaggatgagcctgccctgttcgtggccctgaccttcgagcggcgggaggtcctggactcctccaatatcaaaccaatgaacctgatcggcgtggcaagaggcgaaaacatccccgccgtgatcgccctgaccgaccccgagggctgcccactgagccggtttaaggatagcctgggaaacccaacccacatcctgagaatcggcgagagctataaggagaagcagcggaccatccaggccaagaaggaggtggagcagcggagagccggcggctacagccggaagtacgccagcaaagccaagaatctggcagacgatatggtgagaaacaccgctagagatctgctgtactacgccgtgacccaggatgccatgctgatcttcgccaacctgagccggggcttcggccggcagggcaagcggaccttcatggccgagagacagtacacacggatggaggactggctgaccgccaagctggcctacgagggcctgagcaagacctacctgtccaagacactggcccagtacacctccaagacatgcagcaactgtgggtttaccatcaccagcgccgactacgacagggtgctggagaagctgaagaagacagcaacaggctggatgaccacaattaacggcaaggagctgaaggtggagggccagattacctactacaacagatacaagagacagaacgtagtcaaggacctgtccgtcgagctggatagactgagcgaagaatctgtgaacaacgacatctcctcctggacaaagggcagaagcggagaagctctgagcctcctgaagaaaagattctcccatagacccgtgcaggagaagttcgtgtgcctgaactgcggcttcgagacacacgcagccgagcaagccgccctgaacatcgccagatcctggctgttcctgcggagccaggagtacaagaaataccagacaaacaagacaaccggcaacaccgataagagagccttcgtcgagacctggcagtccttttaccggaagaagcttaaggaggtgtggaaacctgccgtgcggtctggcggatctggcggaggctccatggacagcgtgaccatcgaggacgtggccgtggacttcaccctggaggagtgggccctgctggaccccagccagaggaagctgtacagggacgtgatgcaggagaccctgaggaacctggccgccgtgggcgccaagagggagtaccacgacatcgaggaccagtacaagaaccagggcaggaagctgaggaccttcatggtggagaggttctgcaagagcaaggacatcagcctgtgcggcggcggcccaagcagcggcgcccctcctcccagcggcggcagcccagccggctccccaacctctaccgaggagggcacctctgagtccgccacccccgagagcggccctggcacctccaccgagcccagcgagggcagcgcacccggcagccctgccggcagccccacctccacagaggagggaaccagcaccgagcccagcgaaggcagcgccccaggcaccagcaccgagcctagtgagcaggagattaaacggatcaacaagatcagaagaagacttgtgaaagacagcaacaccaagaaggccggcaagacaggccccatgaaaaccctgctggttagagtgatgacacccgatctgagagagcggctggaaaacctgagaaagaagcctgaaaatatcccccagcccatcagcaatacatctagagccaacctgaataagctgctgaccgattacaccgaaatgaagaaggcgatcctgcatgtgtactgggaagagttccagaaggaccctgtgggcctgatgagccgggtggcccagcctgccagcaagaagatcgatcagaacaagctgaaacctgagatggacgagaagggcaacctgaccaccgccggctttgcctgctctcagtgtggccagcccctgttcgtgtacaagctggagcaggtgtctgagaagggcaaggcttacaccaactacttcggacggtgcaatgtggccgagcacgaaaagctgatcctgctggcccagctgaagcccgagaaggatagcgacgaagccgtgacatatagcctgggaaagtttgggcagagggccctggatttctacagcattcatgtgaccaaggagtccacccaccccgtgaagcccctggcccagatcgccggaaacagatacgcctccggacctgtgggaaaggccctgagcgacgcatgtatgggcacaatcgcctccttcctgtctaagtaccaggacatcatcatcgaacaccagaaggtggtgaagggcaaccagaagagactggagagcctgcgggagctggccggcaaggaaaacctggaataccctagcgtgaccctgccacctcagcctcacaccaaggagggcgttgatgcctacaacgaagtgatcgcccgggtgcgaatgtgggtgaacctgaacctgtggcagaagctgaagctaagcagagatgatgccaagcctctgctgagactgaagggattcccttcctttcctctggtcgagagacaggccaacgaagtggactggtgggacatggtgtgtaacgtgaagaagctgatcaacgagaaaaaggaggatggcaaggtgttttggcagaatctggctggctacaagagacaggaagccctgagaccatacctgagcagcgaggaagatcggaagaagggaaagaaattcgctcggtaccagctgggcgacctgctgctgcacctggaaaagaagcacggcgaggactggggaaaggtgtacgacgaggcctgggagcggattgacaagaaagtggaaggcctgagcaagcacatcaagctggaagaggaacggagaagcgaggacgcccagagcaaggccgccctgaccgactggctgcgggctaaggccagcttcgtgatcgagggcctgaaggaggccgacaaggacgagttctgcagatgcgagctgaagctgcagaagtggtacggggacctgcggggaaagcccttcgccatcgaagccgagaacagcatcctggacatcagcggcttcagcaagcagtacaactgtgccttcatctggcagaaggacggcgtgaagaagctgaacctgtacctgatcatcaactacttcaagggcggcaagctgcggttcaagaagatcaaacctgaagccttcgaagccaacagattctacaccgtgatcaacaaaaagagcggcgagatcgtgcccatggaggtgaacttcaacttcgacgaccccaacctgatcatcctgcctctggcctttggcaagagacagggcagagaattcatctggaacgacctgctgtccctggaaaccggcagcctgaagctggccaacggaagagtgatcgagaagacactgtacaacagaagaacccggcaggatgagcctgccctgttcgtggccctgaccttcgagcggcgggaggtcctggactcctccaatatcaaaccaatgaacctgatcggcgtggcaagaggcgaaaacatccccgccgtgatcgccctgaccgaccccgagggctgcccactgagccggtttaaggatagcctgggaaacccaacccacatcctgagaatcggcgagagctataaggagaagcagcggaccatccaggccaagaaggaggtggagcagcggagagccggcggctacagccggaagtacgccagcaaagccaagaatctggcagacgatatggtgagaaacaccgctagagatctgctgtactacgccgtgacccaggatgccatgctgatcttcgccaacctgagccggggcttcggccggcagggcaagcggaccttcatggccgagagacagtacacacggatggaggactggctgaccgccaagctggcctacgagggcctgagcaagacctacctgtccaagacactggcccagtacacctccaagacatgcagcaactgtgggtttaccatcaccagcgccgactacgacagggtgctggagaagctgaagaagacagcaacaggctggatgaccacaattaacggcaaggagctgaaggtggagggccagattacctactacaacagatacaagagacagaacgtagtcaaggacctgtccgtcgagctggatagactgagcgaagaatctgtgaacaacgacatctcctcctggacaaagggcagaagcggagaagctctgagcctcctgaagaaaagattctcccatagacccgtgcaggagaagttcgtgtgcctgaactgcggcttcgagacacacgcagccgagcaagccgccctgaacatcgccagatcctggctgttcctgcggagccaggagtacaagaaataccagacaaacaagacaaccggcaacaccgataagagagccttcgtcgagacctggcagtccttttaccggaagaagcttaaggaggtgtggaaacctgccgtgcggtctggcggatctggcggaggctcctatggacagcgtgaccatcgaggacgtggccgtggacttcaccctggaggagtgggccctgctggaccccagccagaggaagctgtacagggacgtgatgcaggagaccctgaggaacctggccgccgtgggcgccaagagggagtaccacgacatcgaggaccagtacaagaaccagggcaggaagctgaggaccttcatggtggagaggttctgcaagagcaaggacatcagcctgtgcggcggatctggctccggcagcggccccaagaaaaagagaaaagtctaagctgccttctgcggggcttgccttctggccatgcccttcttctctcccttgcacctgtacctcttggtctttgaataaagcctgagtaggaaggctagcaaaaaaaaaaaaaaaaaaaaaaaaaaaaaaaaaaaaaaaaaaaaaaaaaaaaaaaaaaaaaaaaaaaaaaaaaaaaaaaa

SEQ ID NO: 16391 - RNA, 9485 nt, synthetic construct
  source 1..9485: mol_type = other RNA
aggaaataagagagaaaagaagagtaagaagaaatataagagccaccatggcccctaagaagaagcgtaaagtgagccggatggaacgcctcgtctacgaggtgcggcagaagtgcagaaacatcgaggacatctgcatctcctgcggatctctgaacgtgaccctggagcacccactgttcatcggcggcatgtgccagaactgtaaaaactgttttctggagtgtgcctatcaatacgacgatgacggctaccagagctactgcaccatctgttgcggcggaagagaggtgctgatgtgtggaaataacaactgctgccggtgcttctgcgtggaatgcgtggacctgctggtgggccccggcgccgcccaggccgctattaaggaagatccttggaactgctacatgtgcggccacaagggcacatacggcctgctgagacggagagaggactggcctagcagactgcagatgttcttcgccaataaccacgaccaggagttcgacccccctaaggtgtaccctcccgtccccgccgagaagagaaagcccatccgggtcctgagcctgttcgatggcatcgccaccggtctgctggtgctgaaggacctgggcatccaggtggataggtacattgcctccgaggtgtgcgaggactccatcaccgtgggaatggtgcgtcatcagggcaagatcatgtacgtgggcgacgtgcggagcgtgacacagaagcatatccaggagtggggccctttcgacctggtgatcggcggcagcccttgcaatgacctgagcatcgtgaacccagcccggaagggcctgtacgagggaaccggcagactgttcttcgagttttacagactgctgcacgacgcccggcctaaggaaggcgacgaccggcccttcttttggctgttcgagaatgtggtggccatgggagtcagcgacaagcgggatattagccggttcctggagagcaaccccgtgatgatcgatgccaaggaagtgagcgccgcccaccgggccagatacttctggggcaatctgcctggcatgaacagacccctggccagcaccgtgaacgacaagctggagctgcaggagtgcctggagcacggccggatcgccaagttcagcaaggtgagaaccatcaccacccgaagcaacagcatcaaacaaggcaaggaccagcactttcctgtgttcatgaacgagaaggaggacatcctgtggtgtaccgagatggagagagtgttcgggttcccagtccactacacagatgtcagcaacatgtctagactggccagacagagactgctgggaagaagctggtccgtccctgtgatcagacacctgttcgcccctctgaaggagtacttcgcctgcgtgagcagcggcaacagcaacgccaacagccggggccccagcttctctagcggcctggtgccactgtccctgagagggagccacatgggccccatggagatctacaaaaccgtgagcgcctggaagcggcagcctgtgcgcgtgctgagcctgtttcggaatatcgataaagtcctgaaaagcctgggattcctggagagcggctctggctccggcggtggcaccctgaagtacgtggaggatgtgacaaacgtggtcagacgggatgtggagaagtggggccccttcgatctggtgtacggcagcacccaacccctgggcagctcttgtgaccggtgccctggctggtacatgtttcagttccaccggatcctgcagtacgccctgccgagacaggagtcccagcggccattcttttggattttcatggacaacttgctgctgaccgaggatgaccaggaaactaccactcggttcctgcagaccgaagccgtgaccctgcaggacgtgagaggccgggactaccagaacgccatgcgggtgtggtccaacatccctggactgaaaagcaagcacgcacctctgacccctaaagaagaggagtacctgcaggcccaggtgcggagcagaagcaagctggacgcccctaaggtggatctgctggtgaagaattgcctcctgcccctgagagagtacttcaagtatttcagccagaatagtctgcccctgggaggcagcggcggcggcgccctggtgacatttgaggacgtcgccgtgcggttcacccaggaggaatgggctctgctggatccttctcagaaaatcctgtaccgggacgtgatgagagagacataccggaatctgacctccgtgggcatcaactgggaatgttgggaccttgaagcctgcttcagaagcctgggaagaaacctgagagtgcaggtggtgaagagaaagtgcgagctgaccaacagcggcccctgcgccgagggcggcccaagcagcggcgcccctcctcccagcggcggcagcccagccggctccccaacctctaccgaggagggcacctctgagtccgccacccccgagagcggccctggcacctccaccgagcccagcgagggcagcgcacccggcagccctgccggcagccccacctccacagaggagggaaccagcaccgagcccagcgaaggcagcgccccaggcaccagcaccgagcctagtgagcaggagattaaacggatcaacaagatcagaagaagacttgtgaaagacagcaacaccaagaaggccggcaagacaggccccatgaaaaccctgctggttagagtgatgacacccgatctgagagagcggctggaaaacctgagaaagaagcctgaaaatatcccccagcccatcagcaatacatctagagccaacctgaataagctgctgaccgattacaccgaaatgaagaaggcgatcctgcatgtgtactgggaagagttccagaaggaccctgtgggcctgatgagccgggtggcccagcctgccagcaagaagatcgatcagaacaagctgaaacctgagatggacgagaagggcaacctgaccaccgccggctttgcctgctctcagtgtggccagcccctgttcgtgtacaagctggagcaggtgtctgagaagggcaaggcttacaccaactacttcggacggtgcaatgtggccgagcacgaaaagctgatcctgctggcccagctgaagcccgagaaggatagcgacgaagccgtgacatatagcctgggaaagtttgggcagagggccctggatttctacagcattcatgtgaccaaggagtccacccaccccgtgaagcccctggcccagatcgccggaaacagatacgcctccggacctgtgggaaaggccctgagcgacgcatgtatgggcacaatcgcctccttcctgtctaagtaccaggacatcatcatcgaacaccagaaggtggtgaagggcaaccagaagagactggagagcctgcgggagctggccggcaaggaaaacctggaataccctagcgtgaccctgccacctcagcctcacaccaaggagggcgttgatgcctacaacgaagtgatcgcccgggtgcgaatgtgggtgaacctgaacctgtggcagaagctgaagctaagcagagatgatgccaagcctctgctgagactgaagggattcccttcctttcctctggtcgagagacaggccaacgaagtggactggtgggacatggtgtgtaacgtgaagaagctgatcaacgagaaaaaggaggatggcaaggtgttttggcagaatctggctggctacaagagacaggaagccctgagaccatacctgagcagcgaggaagatcggaagaagggaaagaaattcgctcggtaccagctgggcgacctgctgctgcacctggaaaagaagcacggcgaggactggggaaaggtgtacgacgaggcctgggagcggattgacaagaaagtggaaggcctgagcaagcacatcaagctggaagaggaacggagaagcgaggacgcccagagcaaggccgccctgaccgactggctgcgggctaaggccagcttcgtgatcgagggcctgaaggaggccgacaaggacgagttctgcagatgcgagctgaagctgcagaagtggtacggggacctgcggggaaagcccttcgccatcgaagccgagaacagcatcctggacatcagcggcttcagcaagcagtacaactgtgccttcatctggcagaaggacggcgtgaagaagctgaacctgtacctgatcatcaactacttcaagggcggcaagctgcggttcaagaagatcaaacctgaagccttcgaagccaacagattctacaccgtgatcaacaaaaagagcggcgagatcgtgcccatggaggtgaacttcaacttcgacgaccccaacctgatcatcctgcctctggcctttggcaagagacagggcagagaattcatctggaacgacctgctgtccctggaaaccggcagcctgaagctggccaacggaagagtgatcgagaagacactgtacaacagaagaacccggcaggatgagcctgccctgttcgtggccctgaccttcgagcggcgggaggtcctggactcctccaatatcaaaccaatgaacctgatcggcgtggcaagaggcgaaaacatccccgccgtgatcgccctgaccgaccccgagggctgcccactgagccggtttaaggatagcctgggaaacccaacccacatcctgagaatcggcgagagctataaggagaagcagcggaccatccaggccaagaaggaggtggagcagcggagagccggcggctacagccggaagtacgccagcaaagccaagaatctggcagacgatatggtgagaaacaccgctagagatctgctgtactacgccgtgacccaggatgccatgctgatcttcgccaacctgagccggggcttcggccggcagggcaagcggaccttcatggccgagagacagtacacacggatggaggactggctgaccgccaagctggcctacgagggcctgagcaagacctacctgtccaagacactggcccagtacacctccaagacatgcagcaactgtgggtttaccatcaccagcgccgactacgacagggtgctggagaagctgaagaagacagcaacaggctggatgaccacaattaacggcaaggagctgaaggtggagggccagattacctactacaacagatacaagagacagaacgtagtcaaggacctgtccgtcgagctggatagactgagcgaagaatctgtgaacaacgacatctcctcctggacaaagggcagaagcggagaagctctgagcctcctgaagaaaagattctcccatagacccgtgcaggagaagttcgtgtgcctgaactgcggcttcgagacacacgcagccgagcaagccgccctgaacatcgccagatcctggctgttcctgcggagccaggagtacaagaaataccagacaaacaagacaaccggcaacaccgataagagagccttcgtcgagacctggcagtccttttaccggaagaagcttaaggaggtgtggaaacctgccgtgcggtctggcggatctggcggaggctccatgggccccctgaccttcaccgacgtggccatcgagttcagcctggaggagtggcagtgcctggacaccgcccagcagaacctgtacaggaacgtgatgctggagaactacaggaacctggtgttcctgggcatcgccgtgagcaagcccgacctgatcacctgcctggagaaggagaaggagccctgcaagatgaagaggcacgagatggtggacgagccccccgacggcgtgagcctgctgggcggcccaagcagcggcgcccctcctcccagcggcggcagcccagccggctccccaacctctaccgaggagggcacctctgagtccgccacccccgagagcggccctggcacctccaccgagcccagcgagggcagcgcacccggcagccctgccggcagccccacctccacagaggagggaaccagcaccgagcccagcgaaggcagcgccccaggcaccagcaccgagcctagtgagcaggagattaaacggatcaacaagatcagaagaagacttgtgaaagacagcaacaccaagaaggccggcaagacaggccccatgaaaaccctgctggttagagtgatgacacccgatctgagagagcggctggaaaacctgagaaagaagcctgaaaatatcccccagcccatcagcaatacatctagagccaacctgaataagctgctgaccgattacaccgaaatgaagaaggcgatcctgcatgtgtactgggaagagttccagaaggaccctgtgggcctgatgagccgggtggcccagcctgccagcaagaagatcgatcagaacaagctgaaacctgagatggacgagaagggcaacctgaccaccgccggctttgcctgctctcagtgtggccagcccctgttcgtgtacaagctggagcaggtgtctgagaagggcaaggcttacaccaactacttcggacggtgcaatgtggccgagcacgaaaagctgatcctgctggcccagctgaagcccgagaaggatagcgacgaagccgtgacatatagcctgggaaagtttgggcagagggccctggatttctacagcattcatgtgaccaaggagtccacccaccccgtgaagcccctggcccagatcgccggaaacagatacgcctccggacctgtgggaaaggccctgagcgacgcatgtatgggcacaatcgcctccttcctgtctaagtaccaggacatcatcatcgaacaccagaaggtggtgaagggcaaccagaagagactggagagcctgcgggagctggccggcaaggaaaacctggaataccctagcgtgaccctgccacctcagcctcacaccaaggagggcgttgatgcctacaacgaagtgatcgcccgggtgcgaatgtgggtgaacctgaacctgtggcagaagctgaagctaagcagagatgatgccaagcctctgctgagactgaagggattcccttcctttcctctggtcgagagacaggccaacgaagtggactggtgggacatggtgtgtaacgtgaagaagctgatcaacgagaaaaaggaggatggcaaggtgttttggcagaatctggctggctacaagagacaggaagccctgagaccatacctgagcagcgaggaagatcggaagaagggaaagaaattcgctcggtaccagctgggcgacctgctgctgcacctggaaaagaagcacggcgaggactggggaaaggtgtacgacgaggcctgggagcggattgacaagaaagtggaaggcctgagcaagcacatcaagctggaagaggaacggagaagcgaggacgcccagagcaaggccgccctgaccgactggctgcgggctaaggccagcttcgtgatcgagggcctgaaggaggccgacaaggacgagttctgcagatgcgagctgaagctgcagaagtggtacggggacctgcggggaaagcccttcgccatcgaagccgagaacagcatcctggacatcagcggcttcagcaagcagtacaactgtgccttcatctggcagaaggacggcgtgaagaagctgaacctgtacctgatcatcaactacttcaagggcggcaagctgcggttcaagaagatcaaacctgaagccttcgaagccaacagattctacaccgtgatcaacaaaaagagcggcgagatcgtgcccatggaggtgaacttcaacttcgacgaccccaacctgatcatcctgcctctggcctttggcaagagacagggcagagaattcatctggaacgacctgctgtccctggaaaccggcagcctgaagctggccaacggaagagtgatcgagaagacactgtacaacagaagaacccggcaggatgagcctgccctgttcgtggccctgaccttcgagcggcgggaggtcctggactcctccaatatcaaaccaatgaacctgatcggcgtggcaagaggcgaaaacatccccgccgtgatcgccctgaccgaccccgagggctgcccactgagccggtttaaggatagcctgggaaacccaacccacatcctgagaatcggcgagagctataaggagaagcagcggaccatccaggccaagaaggaggtggagcagcggagagccggcggctacagccggaagtacgccagcaaagccaagaatctggcagacgatatggtgagaaacaccgctagagatctgctgtactacgccgtgacccaggatgccatgctgatcttcgccaacctgagccggggcttcggccggcagggcaagcggaccttcatggccgagagacagtacacacggatggaggactggctgaccgccaagctggcctacgagggcctgagcaagacctacctgtccaagacactggcccagtacacctccaagacatgcagcaactgtgggtttaccatcaccagcgccgactacgacagggtgctggagaagctgaagaagacagcaacaggctggatgaccacaattaacggcaaggagctgaaggtggagggccagattacctactacaacagatacaagagacagaacgtagtcaaggacctgtccgtcgagctggatagactgagcgaagaatctgtgaacaacgacatctcctcctggacaaagggcagaagcggagaagctctgagcctcctgaagaaaagattctcccatagacccgtgcaggagaagttcgtgtgcctgaactgcggcttcgagacacacgcagccgagcaagccgccctgaacatcgccagatcctggctgttcctgcggagccaggagtacaagaaataccagacaaacaagacaaccggcaacaccgataagagagccttcgtcgagacctggcagtccttttaccggaagaagcttaaggaggtgtggaaacctgccgtgcggtctggcggatctggcggaggctcctatgggccccctgaccttcaccgacgtggccatcgagttcagcctggaggagtggcagtgcctggacaccgcccagcagaacctgtacaggaacgtgatgctggagaactacaggaacctggtgttcctgggcatcgccgtgagcaagcccgacctgatcacctgcctggagaaggagaaggagccctgcaagatgaagaggcacgagatggtggacgagccccccgacggcgtgagcctgctgggatctggctccggcagcggccccaagaaaaagagaaaagtctaagctgccttctgcggggcttgccttctggccatgcccttcttctctcccttgcacctgtacctcttggtctttgaataaagcctgagtaggaaggctagcaaaaaaaaaaaaaaaaaaaaaaaaaaaaaaaaaaaaaaaaaaaaaaaaaaaaaaaaaaaaaaaaaaaaaaaaaaaaaaaa

SEQ ID NO: 16392 - RNA, 9485 nt, synthetic construct
  source 1..9485: mol_type = other RNA
aggaaataagagagaaaagaagagtaagaagaaatataagagccaccatggcccctaagaagaagcgtaaagtgagccggatggaacgcctcgtctacgaggtgcggcagaagtgcagaaacatcgaggacatctgcatctcctgcggatctctgaacgtgaccctggagcacccactgttcatcggcggcatgtgccagaactgtaaaaactgttttctggagtgtgcctatcaatacgacgatgacggctaccagagctactgcaccatctgttgcggcggaagagaggtgctgatgtgtggaaataacaactgctgccggtgcttctgcgtggaatgcgtggacctgctggtgggccccggcgccgcccaggccgctattaaggaagatccttggaactgctacatgtgcggccacaagggcacatacggcctgctgagacggagagaggactggcctagcagactgcagatgttcttcgccaataaccacgaccaggagttcgacccccctaaggtgtaccctcccgtccccgccgagaagagaaagcccatccgggtcctgagcctgttcgatggcatcgccaccggtctgctggtgctgaaggacctgggcatccaggtggataggtacattgcctccgaggtgtgcgaggactccatcaccgtgggaatggtgcgtcatcagggcaagatcatgtacgtgggcgacgtgcggagcgtgacacagaagcatatccaggagtggggccctttcgacctggtgatcggcggcagcccttgcaatgacctgagcatcgtgaacccagcccggaagggcctgtacgagggaaccggcagactgttcttcgagttttacagactgctgcacgacgcccggcctaaggaaggcgacgaccggcccttcttttggctgttcgagaatgtggtggccatgggagtcagcgacaagcgggatattagccggttcctggagagcaaccccgtgatgatcgatgccaaggaagtgagcgccgcccaccgggccagatacttctggggcaatctgcctggcatgaacagacccctggccagcaccgtgaacgacaagctggagctgcaggagtgcctggagcacggccggatcgccaagttcagcaaggtgagaaccatcaccacccgaagcaacagcatcaaacaaggcaaggaccagcactttcctgtgttcatgaacgagaaggaggacatcctgtggtgtaccgagatggagagagtgttcgggttcccagtccactacacagatgtcagcaacatgtctagactggccagacagagactgctgggaagaagctggtccgtccctgtgatcagacacctgttcgcccctctgaaggagtacttcgcctgcgtgagcagcggcaacagcaacgccaacagccggggccccagcttctctagcggcctggtgccactgtccctgagagggagccacatgggccccatggagatctacaaaaccgtgagcgcctggaagcggcagcctgtgcgcgtgctgagcctgtttcggaatatcgataaagtcctgaaaagcctgggattcctggagagcggctctggctccggcggtggcaccctgaagtacgtggaggatgtgacaaacgtggtcagacgggatgtggagaagtggggccccttcgatctggtgtacggcagcacccaacccctgggcagctcttgtgaccggtgccctggctggtacatgtttcagttccaccggatcctgcagtacgccctgccgagacaggagtcccagcggccattcttttggattttcatggacaacttgctgctgaccgaggatgaccaggaaactaccactcggttcctgcagaccgaagccgtgaccctgcaggacgtgagaggccgggactaccagaacgccatgcgggtgtggtccaacatccctggactgaaaagcaagcacgcacctctgacccctaaagaagaggagtacctgcaggcccaggtgcggagcagaagcaagctggacgcccctaaggtggatctgctggtgaagaattgcctcctgcccctgagagagtacttcaagtatttcagccagaatagtctgcccctgggaggcagcggcggcggcgccctggtgacatttgaggacgtcgccgtgcggttcacccaggaggaatgggctctgctggatccttctcagaaaatcctgtaccgggacgtgatgagagagacataccggaatctgacctccgtgggcatcaactgggaatgttgggaccttgaagcctgcttcagaagcctgggaagaaacctgagagtgcaggtggtgaagagaaagtgcgagctgaccaacagcggcccctgcgccgagggcggcccaagcagcggcgcccctcctcccagcggcggcagcccagccggctccccaacctctaccgaggagggcacctctgagtccgccacccccgagagcggccctggcacctccaccgagcccagcgagggcagcgcacccggcagccctgccggcagccccacctccacagaggagggaaccagcaccgagcccagcgaaggcagcgccccaggcaccagcaccgagcctagtgagcaggagattaaacggatcaacaagatcagaagaagacttgtgaaagacagcaacaccaagaaggccggcaagacaggccccatgaaaaccctgctggttagagtgatgacacccgatctgagagagcggctggaaaacctgagaaagaagcctgaaaatatcccccagcccatcagcaatacatctagagccaacctgaataagctgctgaccgattacaccgaaatgaagaaggcgatcctgcatgtgtactgggaagagttccagaaggaccctgtgggcctgatgagccgggtggcccagcctgccagcaagaagatcgatcagaacaagctgaaacctgagatggacgagaagggcaacctgaccaccgccggctttgcctgctctcagtgtggccagcccctgttcgtgtacaagctggagcaggtgtctgagaagggcaaggcttacaccaactacttcggacggtgcaatgtggccgagcacgaaaagctgatcctgctggcccagctgaagcccgagaaggatagcgacgaagccgtgacatatagcctgggaaagtttgggcagagggccctggatttctacagcattcatgtgaccaaggagtccacccaccccgtgaagcccctggcccagatcgccggaaacagatacgcctccggacctgtgggaaaggccctgagcgacgcatgtatgggcacaatcgcctccttcctgtctaagtaccaggacatcatcatcgaacaccagaaggtggtgaagggcaaccagaagagactggagagcctgcgggagctggccggcaaggaaaacctggaataccctagcgtgaccctgccacctcagcctcacaccaaggagggcgttgatgcctacaacgaagtgatcgcccgggtgcgaatgtgggtgaacctgaacctgtggcagaagctgaagctaagcagagatgatgccaagcctctgctgagactgaagggattcccttcctttcctctggtcgagagacaggccaacgaagtggactggtgggacatggtgtgtaacgtgaagaagctgatcaacgagaaaaaggaggatggcaaggtgttttggcagaatctggctggctacaagagacaggaagccctgagaccatacctgagcagcgaggaagatcggaagaagggaaagaaattcgctcggtaccagctgggcgacctgctgctgcacctggaaaagaagcacggcgaggactggggaaaggtgtacgacgaggcctgggagcggattgacaagaaagtggaaggcctgagcaagcacatcaagctggaagaggaacggagaagcgaggacgcccagagcaaggccgccctgaccgactggctgcgggctaaggccagcttcgtgatcgagggcctgaaggaggccgacaaggacgagttctgcagatgcgagctgaagctgcagaagtggtacggggacctgcggggaaagcccttcgccatcgaagccgagaacagcatcctggacatcagcggcttcagcaagcagtacaactgtgccttcatctggcagaaggacggcgtgaagaagctgaacctgtacctgatcatcaactacttcaagggcggcaagctgcggttcaagaagatcaaacctgaagccttcgaagccaacagattctacaccgtgatcaacaaaaagagcggcgagatcgtgcccatggaggtgaacttcaacttcgacgaccccaacctgatcatcctgcctctggcctttggcaagagacagggcagagaattcatctggaacgacctgctgtccctggaaaccggcagcctgaagctggccaacggaagagtgatcgagaagacactgtacaacagaagaacccggcaggatgagcctgccctgttcgtggccctgaccttcgagcggcgggaggtcctggactcctccaatatcaaaccaatgaacctgatcggcgtggcaagaggcgaaaacatccccgccgtgatcgccctgaccgaccccgagggctgcccactgagccggtttaaggatagcctgggaaacccaacccacatcctgagaatcggcgagagctataaggagaagcagcggaccatccaggccaagaaggaggtggagcagcggagagccggcggctacagccggaagtacgccagcaaagccaagaatctggcagacgatatggtgagaaacaccgctagagatctgctgtactacgccgtgacccaggatgccatgctgatcttcgccaacctgagccggggcttcggccggcagggcaagcggaccttcatggccgagagacagtacacacggatggaggactggctgaccgccaagctggcctacgagggcctgagcaagacctacctgtccaagacactggcccagtacacctccaagacatgcagcaactgtgggtttaccatcaccagcgccgactacgacagggtgctggagaagctgaagaagacagcaacaggctggatgaccacaattaacggcaaggagctgaaggtggagggccagattacctactacaacagatacaagagacagaacgtagtcaaggacctgtccgtcgagctggatagactgagcgaagaatctgtgaacaacgacatctcctcctggacaaagggcagaagcggagaagctctgagcctcctgaagaaaagattctcccatagacccgtgcaggagaagttcgtgtgcctgaactgcggcttcgagacacacgcagccgagcaagccgccctgaacatcgccagatcctggctgttcctgcggagccaggagtacaagaaataccagacaaacaagacaaccggcaacaccgataagagagccttcgtcgagacctggcagtccttttaccggaagaagcttaaggaggtgtggaaacctgccgtgcggtctggcggatctggcggaggctccttccagggcagcctgagcttcagggacgtggccgtgggcttcaccaggaaggagtggcagcagctggaccccacccagaggaccctgtacagggacgtgatgctggagaactacagccacctggtgagcgtgggctgccaggtgaccaagcccgccgtgatcagcaggctggagcagggccaggagccctggatgaaggaggaggagatcctgaggtggagcttccccgaggtgctgcaggtgggcggcccaagcagcggcgcccctcctcccagcggcggcagcccagccggctccccaacctctaccgaggagggcacctctgagtccgccacccccgagagcggccctggcacctccaccgagcccagcgagggcagcgcacccggcagccctgccggcagccccacctccacagaggagggaaccagcaccgagcccagcgaaggcagcgccccaggcaccagcaccgagcctagtgagcaggagattaaacggatcaacaagatcagaagaagacttgtgaaagacagcaacaccaagaaggccggcaagacaggccccatgaaaaccctgctggttagagtgatgacacccgatctgagagagcggctggaaaacctgagaaagaagcctgaaaatatcccccagcccatcagcaatacatctagagccaacctgaataagctgctgaccgattacaccgaaatgaagaaggcgatcctgcatgtgtactgggaagagttccagaaggaccctgtgggcctgatgagccgggtggcccagcctgccagcaagaagatcgatcagaacaagctgaaacctgagatggacgagaagggcaacctgaccaccgccggctttgcctgctctcagtgtggccagcccctgttcgtgtacaagctggagcaggtgtctgagaagggcaaggcttacaccaactacttcggacggtgcaatgtggccgagcacgaaaagctgatcctgctggcccagctgaagcccgagaaggatagcgacgaagccgtgacatatagcctgggaaagtttgggcagagggccctggatttctacagcattcatgtgaccaaggagtccacccaccccgtgaagcccctggcccagatcgccggaaacagatacgcctccggacctgtgggaaaggccctgagcgacgcatgtatgggcacaatcgcctccttcctgtctaagtaccaggacatcatcatcgaacaccagaaggtggtgaagggcaaccagaagagactggagagcctgcgggagctggccggcaaggaaaacctggaataccctagcgtgaccctgccacctcagcctcacaccaaggagggcgttgatgcctacaacgaagtgatcgcccgggtgcgaatgtgggtgaacctgaacctgtggcagaagctgaagctaagcagagatgatgccaagcctctgctgagactgaagggattcccttcctttcctctggtcgagagacaggccaacgaagtggactggtgggacatggtgtgtaacgtgaagaagctgatcaacgagaaaaaggaggatggcaaggtgttttggcagaatctggctggctacaagagacaggaagccctgagaccatacctgagcagcgaggaagatcggaagaagggaaagaaattcgctcggtaccagctgggcgacctgctgctgcacctggaaaagaagcacggcgaggactggggaaaggtgtacgacgaggcctgggagcggattgacaagaaagtggaaggcctgagcaagcacatcaagctggaagaggaacggagaagcgaggacgcccagagcaaggccgccctgaccgactggctgcgggctaaggccagcttcgtgatcgagggcctgaaggaggccgacaaggacgagttctgcagatgcgagctgaagctgcagaagtggtacggggacctgcggggaaagcccttcgccatcgaagccgagaacagcatcctggacatcagcggcttcagcaagcagtacaactgtgccttcatctggcagaaggacggcgtgaagaagctgaacctgtacctgatcatcaactacttcaagggcggcaagctgcggttcaagaagatcaaacctgaagccttcgaagccaacagattctacaccgtgatcaacaaaaagagcggcgagatcgtgcccatggaggtgaacttcaacttcgacgaccccaacctgatcatcctgcctctggcctttggcaagagacagggcagagaattcatctggaacgacctgctgtccctggaaaccggcagcctgaagctggccaacggaagagtgatcgagaagacactgtacaacagaagaacccggcaggatgagcctgccctgttcgtggccctgaccttcgagcggcgggaggtcctggactcctccaatatcaaaccaatgaacctgatcggcgtggcaagaggcgaaaacatccccgccgtgatcgccctgaccgaccccgagggctgcccactgagccggtttaaggatagcctgggaaacccaacccacatcctgagaatcggcgagagctataaggagaagcagcggaccatccaggccaagaaggaggtggagcagcggagagccggcggctacagccggaagtacgccagcaaagccaagaatctggcagacgatatggtgagaaacaccgctagagatctgctgtactacgccgtgacccaggatgccatgctgatcttcgccaacctgagccggggcttcggccggcagggcaagcggaccttcatggccgagagacagtacacacggatggaggactggctgaccgccaagctggcctacgagggcctgagcaagacctacctgtccaagacactggcccagtacacctccaagacatgcagcaactgtgggtttaccatcaccagcgccgactacgacagggtgctggagaagctgaagaagacagcaacaggctggatgaccacaattaacggcaaggagctgaaggtggagggccagattacctactacaacagatacaagagacagaacgtagtcaaggacctgtccgtcgagctggatagactgagcgaagaatctgtgaacaacgacatctcctcctggacaaagggcagaagcggagaagctctgagcctcctgaagaaaagattctcccatagacccgtgcaggagaagttcgtgtgcctgaactgcggcttcgagacacacgcagccgagcaagccgccctgaacatcgccagatcctggctgttcctgcggagccaggagtacaagaaataccagacaaacaagacaaccggcaacaccgataagagagccttcgtcgagacctggcagtccttttaccggaagaagcttaaggaggtgtggaaacctgccgtgcggtctggcggatctggcggaggctcctttccagggcagcctgagcttcagggacgtggccgtgggcttcaccaggaaggagtggcagcagctggaccccacccagaggaccctgtacagggacgtgatgctggagaactacagccacctggtgagcgtgggctgccaggtgaccaagcccgccgtgatcagcaggctggagcagggccaggagccctggatgaaggaggaggagatcctgaggtggagcttccccgaggtgctgcaggtgggatctggctccggcagcggccccaagaaaaagagaaaagtctaagctgccttctgcggggcttgccttctggccatgcccttcttctctcccttgcacctgtacctcttggtctttgaataaagcctgagtaggaaggctagcaaaaaaaaaaaaaaaaaaaaaaaaaaaaaaaaaaaaaaaaaaaaaaaaaaaaaaaaaaaaaaaaaaaaaaaaaaaaaaaa

SEQ ID NO: 16393 - RNA, 9485 nt, synthetic construct
  source 1..9485: mol_type = other RNA
aggaaataagagagaaaagaagagtaagaagaaatataagagccaccatggcccctaagaagaagcgtaaagtgagccggatggaacgcctcgtctacgaggtgcggcagaagtgcagaaacatcgaggacatctgcatctcctgcggatctctgaacgtgaccctggagcacccactgttcatcggcggcatgtgccagaactgtaaaaactgttttctggagtgtgcctatcaatacgacgatgacggctaccagagctactgcaccatctgttgcggcggaagagaggtgctgatgtgtggaaataacaactgctgccggtgcttctgcgtggaatgcgtggacctgctggtgggccccggcgccgcccaggccgctattaaggaagatccttggaactgctacatgtgcggccacaagggcacatacggcctgctgagacggagagaggactggcctagcagactgcagatgttcttcgccaataaccacgaccaggagttcgacccccctaaggtgtaccctcccgtccccgccgagaagagaaagcccatccgggtcctgagcctgttcgatggcatcgccaccggtctgctggtgctgaaggacctgggcatccaggtggataggtacattgcctccgaggtgtgcgaggactccatcaccgtgggaatggtgcgtcatcagggcaagatcatgtacgtgggcgacgtgcggagcgtgacacagaagcatatccaggagtggggccctttcgacctggtgatcggcggcagcccttgcaatgacctgagcatcgtgaacccagcccggaagggcctgtacgagggaaccggcagactgttcttcgagttttacagactgctgcacgacgcccggcctaaggaaggcgacgaccggcccttcttttggctgttcgagaatgtggtggccatgggagtcagcgacaagcgggatattagccggttcctggagagcaaccccgtgatgatcgatgccaaggaagtgagcgccgcccaccgggccagatacttctggggcaatctgcctggcatgaacagacccctggccagcaccgtgaacgacaagctggagctgcaggagtgcctggagcacggccggatcgccaagttcagcaaggtgagaaccatcaccacccgaagcaacagcatcaaacaaggcaaggaccagcactttcctgtgttcatgaacgagaaggaggacatcctgtggtgtaccgagatggagagagtgttcgggttcccagtccactacacagatgtcagcaacatgtctagactggccagacagagactgctgggaagaagctggtccgtccctgtgatcagacacctgttcgcccctctgaaggagtacttcgcctgcgtgagcagcggcaacagcaacgccaacagccggggccccagcttctctagcggcctggtgccactgtccctgagagggagccacatgggccccatggagatctacaaaaccgtgagcgcctggaagcggcagcctgtgcgcgtgctgagcctgtttcggaatatcgataaagtcctgaaaagcctgggattcctggagagcggctctggctccggcggtggcaccctgaagtacgtggaggatgtgacaaacgtggtcagacgggatgtggagaagtggggccccttcgatctggtgtacggcagcacccaacccctgggcagctcttgtgaccggtgccctggctggtacatgtttcagttccaccggatcctgcagtacgccctgccgagacaggagtcccagcggccattcttttggattttcatggacaacttgctgctgaccgaggatgaccaggaaactaccactcggttcctgcagaccgaagccgtgaccctgcaggacgtgagaggccgggactaccagaacgccatgcgggtgtggtccaacatccctggactgaaaagcaagcacgcacctctgacccctaaagaagaggagtacctgcaggcccaggtgcggagcagaagcaagctggacgcccctaaggtggatctgctggtgaagaattgcctcctgcccctgagagagtacttcaagtatttcagccagaatagtctgcccctgggaggcagcggcggcggcgccctggtgacatttgaggacgtcgccgtgcggttcacccaggaggaatgggctctgctggatccttctcagaaaatcctgtaccgggacgtgatgagagagacataccggaatctgacctccgtgggcatcaactgggaatgttgggaccttgaagcctgcttcagaagcctgggaagaaacctgagagtgcaggtggtgaagagaaagtgcgagctgaccaacagcggcccctgcgccgagggcggcccaagcagcggcgcccctcctcccagcggcggcagcccagccggctccccaacctctaccgaggagggcacctctgagtccgccacccccgagagcggccctggcacctccaccgagcccagcgagggcagcgcacccggcagccctgccggcagccccacctccacagaggagggaaccagcaccgagcccagcgaaggcagcgccccaggcaccagcaccgagcctagtgagcaggagattaaacggatcaacaagatcagaagaagacttgtgaaagacagcaacaccaagaaggccggcaagacaggccccatgaaaaccctgctggttagagtgatgacacccgatctgagagagcggctggaaaacctgagaaagaagcctgaaaatatcccccagcccatcagcaatacatctagagccaacctgaataagctgctgaccgattacaccgaaatgaagaaggcgatcctgcatgtgtactgggaagagttccagaaggaccctgtgggcctgatgagccgggtggcccagcctgccagcaagaagatcgatcagaacaagctgaaacctgagatggacgagaagggcaacctgaccaccgccggctttgcctgctctcagtgtggccagcccctgttcgtgtacaagctggagcaggtgtctgagaagggcaaggcttacaccaactacttcggacggtgcaatgtggccgagcacgaaaagctgatcctgctggcccagctgaagcccgagaaggatagcgacgaagccgtgacatatagcctgggaaagtttgggcagagggccctggatttctacagcattcatgtgaccaaggagtccacccaccccgtgaagcccctggcccagatcgccggaaacagatacgcctccggacctgtgggaaaggccctgagcgacgcatgtatgggcacaatcgcctccttcctgtctaagtaccaggacatcatcatcgaacaccagaaggtggtgaagggcaaccagaagagactggagagcctgcgggagctggccggcaaggaaaacctggaataccctagcgtgaccctgccacctcagcctcacaccaaggagggcgttgatgcctacaacgaagtgatcgcccgggtgcgaatgtgggtgaacctgaacctgtggcagaagctgaagctaagcagagatgatgccaagcctctgctgagactgaagggattcccttcctttcctctggtcgagagacaggccaacgaagtggactggtgggacatggtgtgtaacgtgaagaagctgatcaacgagaaaaaggaggatggcaaggtgttttggcagaatctggctggctacaagagacaggaagccctgagaccatacctgagcagcgaggaagatcggaagaagggaaagaaattcgctcggtaccagctgggcgacctgctgctgcacctggaaaagaagcacggcgaggactggggaaaggtgtacgacgaggcctgggagcggattgacaagaaagtggaaggcctgagcaagcacatcaagctggaagaggaacggagaagcgaggacgcccagagcaaggccgccctgaccgactggctgcgggctaaggccagcttcgtgatcgagggcctgaaggaggccgacaaggacgagttctgcagatgcgagctgaagctgcagaagtggtacggggacctgcggggaaagcccttcgccatcgaagccgagaacagcatcctggacatcagcggcttcagcaagcagtacaactgtgccttcatctggcagaaggacggcgtgaagaagctgaacctgtacctgatcatcaactacttcaagggcggcaagctgcggttcaagaagatcaaacctgaagccttcgaagccaacagattctacaccgtgatcaacaaaaagagcggcgagatcgtgcccatggaggtgaacttcaacttcgacgaccccaacctgatcatcctgcctctggcctttggcaagagacagggcagagaattcatctggaacgacctgctgtccctggaaaccggcagcctgaagctggccaacggaagagtgatcgagaagacactgtacaacagaagaacccggcaggatgagcctgccctgttcgtggccctgaccttcgagcggcgggaggtcctggactcctccaatatcaaaccaatgaacctgatcggcgtggcaagaggcgaaaacatccccgccgtgatcgccctgaccgaccccgagggctgcccactgagccggtttaaggatagcctgggaaacccaacccacatcctgagaatcggcgagagctataaggagaagcagcggaccatccaggccaagaaggaggtggagcagcggagagccggcggctacagccggaagtacgccagcaaagccaagaatctggcagacgatatggtgagaaacaccgctagagatctgctgtactacgccgtgacccaggatgccatgctgatcttcgccaacctgagccggggcttcggccggcagggcaagcggaccttcatggccgagagacagtacacacggatggaggactggctgaccgccaagctggcctacgagggcctgagcaagacctacctgtccaagacactggcccagtacacctccaagacatgcagcaactgtgggtttaccatcaccagcgccgactacgacagggtgctggagaagctgaagaagacagcaacaggctggatgaccacaattaacggcaaggagctgaaggtggagggccagattacctactacaacagatacaagagacagaacgtagtcaaggacctgtccgtcgagctggatagactgagcgaagaatctgtgaacaacgacatctcctcctggacaaagggcagaagcggagaagctctgagcctcctgaagaaaagattctcccatagacccgtgcaggagaagttcgtgtgcctgaactgcggcttcgagacacacgcagccgagcaagccgccctgaacatcgccagatcctggctgttcctgcggagccaggagtacaagaaataccagacaaacaagacaaccggcaacaccgataagagagccttcgtcgagacctggcagtccttttaccggaagaagcttaaggaggtgtggaaacctgccgtgcggtctggcggatctggcggaggctccgagatgagggtgatgttcgaggagatcaccgtgagcttcagccaggaggagtgggagtacctggacgagggccagaaggagctgtaccaggaggtgatgaaggagaaccacgagaccctgatcttcctggagaccaacctgcagttcgtgaaccccgacatgctgagcaagatcaggagggacagcaggatgagcaggaagaggaaggccaccaggagctacgccgccgacgacgaggccaagggcggcccaagcagcggcgcccctcctcccagcggcggcagcccagccggctccccaacctctaccgaggagggcacctctgagtccgccacccccgagagcggccctggcacctccaccgagcccagcgagggcagcgcacccggcagccctgccggcagccccacctccacagaggagggaaccagcaccgagcccagcgaaggcagcgccccaggcaccagcaccgagcctagtgagcaggagattaaacggatcaacaagatcagaagaagacttgtgaaagacagcaacaccaagaaggccggcaagacaggccccatgaaaaccctgctggttagagtgatgacacccgatctgagagagcggctggaaaacctgagaaagaagcctgaaaatatcccccagcccatcagcaatacatctagagccaacctgaataagctgctgaccgattacaccgaaatgaagaaggcgatcctgcatgtgtactgggaagagttccagaaggaccctgtgggcctgatgagccgggtggcccagcctgccagcaagaagatcgatcagaacaagctgaaacctgagatggacgagaagggcaacctgaccaccgccggctttgcctgctctcagtgtggccagcccctgttcgtgtacaagctggagcaggtgtctgagaagggcaaggcttacaccaactacttcggacggtgcaatgtggccgagcacgaaaagctgatcctgctggcccagctgaagcccgagaaggatagcgacgaagccgtgacatatagcctgggaaagtttgggcagagggccctggatttctacagcattcatgtgaccaaggagtccacccaccccgtgaagcccctggcccagatcgccggaaacagatacgcctccggacctgtgggaaaggccctgagcgacgcatgtatgggcacaatcgcctccttcctgtctaagtaccaggacatcatcatcgaacaccagaaggtggtgaagggcaaccagaagagactggagagcctgcgggagctggccggcaaggaaaacctggaataccctagcgtgaccctgccacctcagcctcacaccaaggagggcgttgatgcctacaacgaagtgatcgcccgggtgcgaatgtgggtgaacctgaacctgtggcagaagctgaagctaagcagagatgatgccaagcctctgctgagactgaagggattcccttcctttcctctggtcgagagacaggccaacgaagtggactggtgggacatggtgtgtaacgtgaagaagctgatcaacgagaaaaaggaggatggcaaggtgttttggcagaatctggctggctacaagagacaggaagccctgagaccatacctgagcagcgaggaagatcggaagaagggaaagaaattcgctcggtaccagctgggcgacctgctgctgcacctggaaaagaagcacggcgaggactggggaaaggtgtacgacgaggcctgggagcggattgacaagaaagtggaaggcctgagcaagcacatcaagctggaagaggaacggagaagcgaggacgcccagagcaaggccgccctgaccgactggctgcgggctaaggccagcttcgtgatcgagggcctgaaggaggccgacaaggacgagttctgcagatgcgagctgaagctgcagaagtggtacggggacctgcggggaaagcccttcgccatcgaagccgagaacagcatcctggacatcagcggcttcagcaagcagtacaactgtgccttcatctggcagaaggacggcgtgaagaagctgaacctgtacctgatcatcaactacttcaagggcggcaagctgcggttcaagaagatcaaacctgaagccttcgaagccaacagattctacaccgtgatcaacaaaaagagcggcgagatcgtgcccatggaggtgaacttcaacttcgacgaccccaacctgatcatcctgcctctggcctttggcaagagacagggcagagaattcatctggaacgacctgctgtccctggaaaccggcagcctgaagctggccaacggaagagtgatcgagaagacactgtacaacagaagaacccggcaggatgagcctgccctgttcgtggccctgaccttcgagcggcgggaggtcctggactcctccaatatcaaaccaatgaacctgatcggcgtggcaagaggcgaaaacatccccgccgtgatcgccctgaccgaccccgagggctgcccactgagccggtttaaggatagcctgggaaacccaacccacatcctgagaatcggcgagagctataaggagaagcagcggaccatccaggccaagaaggaggtggagcagcggagagccggcggctacagccggaagtacgccagcaaagccaagaatctggcagacgatatggtgagaaacaccgctagagatctgctgtactacgccgtgacccaggatgccatgctgatcttcgccaacctgagccggggcttcggccggcagggcaagcggaccttcatggccgagagacagtacacacggatggaggactggctgaccgccaagctggcctacgagggcctgagcaagacctacctgtccaagacactggcccagtacacctccaagacatgcagcaactgtgggtttaccatcaccagcgccgactacgacagggtgctggagaagctgaagaagacagcaacaggctggatgaccacaattaacggcaaggagctgaaggtggagggccagattacctactacaacagatacaagagacagaacgtagtcaaggacctgtccgtcgagctggatagactgagcgaagaatctgtgaacaacgacatctcctcctggacaaagggcagaagcggagaagctctgagcctcctgaagaaaagattctcccatagacccgtgcaggagaagttcgtgtgcctgaactgcggcttcgagacacacgcagccgagcaagccgccctgaacatcgccagatcctggctgttcctgcggagccaggagtacaagaaataccagacaaacaagacaaccggcaacaccgataagagagccttcgtcgagacctggcagtccttttaccggaagaagcttaaggaggtgtggaaacctgccgtgcggtctggcggatctggcggaggctcctgagatgagggtgatgttcgaggagatcaccgtgagcttcagccaggaggagtgggagtacctggacgagggccagaaggagctgtaccaggaggtgatgaaggagaaccacgagaccctgatcttcctggagaccaacctgcagttcgtgaaccccgacatgctgagcaagatcaggagggacagcaggatgagcaggaagaggaaggccaccaggagctacgccgccgacgacgaggccaagggatctggctccggcagcggccccaagaaaaagagaaaagtctaagctgccttctgcggggcttgccttctggccatgcccttcttctctcccttgcacctgtacctcttggtctttgaataaagcctgagtaggaaggctagcaaaaaaaaaaaaaaaaaaaaaaaaaaaaaaaaaaaaaaaaaaaaaaaaaaaaaaaaaaaaaaaaaaaaaaaaaaaaaaaa

SEQ ID NO: 16394 - RNA, 9485 nt, synthetic construct
  source 1..9485: mol_type = other RNA
aggaaataagagagaaaagaagagtaagaagaaatataagagccaccatggcccctaagaagaagcgtaaagtgagccggatggaacgcctcgtctacgaggtgcggcagaagtgcagaaacatcgaggacatctgcatctcctgcggatctctgaacgtgaccctggagcacccactgttcatcggcggcatgtgccagaactgtaaaaactgttttctggagtgtgcctatcaatacgacgatgacggctaccagagctactgcaccatctgttgcggcggaagagaggtgctgatgtgtggaaataacaactgctgccggtgcttctgcgtggaatgcgtggacctgctggtgggccccggcgccgcccaggccgctattaaggaagatccttggaactgctacatgtgcggccacaagggcacatacggcctgctgagacggagagaggactggcctagcagactgcagatgttcttcgccaataaccacgaccaggagttcgacccccctaaggtgtaccctcccgtccccgccgagaagagaaagcccatccgggtcctgagcctgttcgatggcatcgccaccggtctgctggtgctgaaggacctgggcatccaggtggataggtacattgcctccgaggtgtgcgaggactccatcaccgtgggaatggtgcgtcatcagggcaagatcatgtacgtgggcgacgtgcggagcgtgacacagaagcatatccaggagtggggccctttcgacctggtgatcggcggcagcccttgcaatgacctgagcatcgtgaacccagcccggaagggcctgtacgagggaaccggcagactgttcttcgagttttacagactgctgcacgacgcccggcctaaggaaggcgacgaccggcccttcttttggctgttcgagaatgtggtggccatgggagtcagcgacaagcgggatattagccggttcctggagagcaaccccgtgatgatcgatgccaaggaagtgagcgccgcccaccgggccagatacttctggggcaatctgcctggcatgaacagacccctggccagcaccgtgaacgacaagctggagctgcaggagtgcctggagcacggccggatcgccaagttcagcaaggtgagaaccatcaccacccgaagcaacagcatcaaacaaggcaaggaccagcactttcctgtgttcatgaacgagaaggaggacatcctgtggtgtaccgagatggagagagtgttcgggttcccagtccactacacagatgtcagcaacatgtctagactggccagacagagactgctgggaagaagctggtccgtccctgtgatcagacacctgttcgcccctctgaaggagtacttcgcctgcgtgagcagcggcaacagcaacgccaacagccggggccccagcttctctagcggcctggtgccactgtccctgagagggagccacatgggccccatggagatctacaaaaccgtgagcgcctggaagcggcagcctgtgcgcgtgctgagcctgtttcggaatatcgataaagtcctgaaaagcctgggattcctggagagcggctctggctccggcggtggcaccctgaagtacgtggaggatgtgacaaacgtggtcagacgggatgtggagaagtggggccccttcgatctggtgtacggcagcacccaacccctgggcagctcttgtgaccggtgccctggctggtacatgtttcagttccaccggatcctgcagtacgccctgccgagacaggagtcccagcggccattcttttggattttcatggacaacttgctgctgaccgaggatgaccaggaaactaccactcggttcctgcagaccgaagccgtgaccctgcaggacgtgagaggccgggactaccagaacgccatgcgggtgtggtccaacatccctggactgaaaagcaagcacgcacctctgacccctaaagaagaggagtacctgcaggcccaggtgcggagcagaagcaagctggacgcccctaaggtggatctgctggtgaagaattgcctcctgcccctgagagagtacttcaagtatttcagccagaatagtctgcccctgggaggcagcggcggcggcgccctggtgacatttgaggacgtcgccgtgcggttcacccaggaggaatgggctctgctggatccttctcagaaaatcctgtaccgggacgtgatgagagagacataccggaatctgacctccgtgggcatcaactgggaatgttgggaccttgaagcctgcttcagaagcctgggaagaaacctgagagtgcaggtggtgaagagaaagtgcgagctgaccaacagcggcccctgcgccgagggcggcccaagcagcggcgcccctcctcccagcggcggcagcccagccggctccccaacctctaccgaggagggcacctctgagtccgccacccccgagagcggccctggcacctccaccgagcccagcgagggcagcgcacccggcagccctgccggcagccccacctccacagaggagggaaccagcaccgagcccagcgaaggcagcgccccaggcaccagcaccgagcctagtgagcaggagattaaacggatcaacaagatcagaagaagacttgtgaaagacagcaacaccaagaaggccggcaagacaggccccatgaaaaccctgctggttagagtgatgacacccgatctgagagagcggctggaaaacctgagaaagaagcctgaaaatatcccccagcccatcagcaatacatctagagccaacctgaataagctgctgaccgattacaccgaaatgaagaaggcgatcctgcatgtgtactgggaagagttccagaaggaccctgtgggcctgatgagccgggtggcccagcctgccagcaagaagatcgatcagaacaagctgaaacctgagatggacgagaagggcaacctgaccaccgccggctttgcctgctctcagtgtggccagcccctgttcgtgtacaagctggagcaggtgtctgagaagggcaaggcttacaccaactacttcggacggtgcaatgtggccgagcacgaaaagctgatcctgctggcccagctgaagcccgagaaggatagcgacgaagccgtgacatatagcctgggaaagtttgggcagagggccctggatttctacagcattcatgtgaccaaggagtccacccaccccgtgaagcccctggcccagatcgccggaaacagatacgcctccggacctgtgggaaaggccctgagcgacgcatgtatgggcacaatcgcctccttcctgtctaagtaccaggacatcatcatcgaacaccagaaggtggtgaagggcaaccagaagagactggagagcctgcgggagctggccggcaaggaaaacctggaataccctagcgtgaccctgccacctcagcctcacaccaaggagggcgttgatgcctacaacgaagtgatcgcccgggtgcgaatgtgggtgaacctgaacctgtggcagaagctgaagctaagcagagatgatgccaagcctctgctgagactgaagggattcccttcctttcctctggtcgagagacaggccaacgaagtggactggtgggacatggtgtgtaacgtgaagaagctgatcaacgagaaaaaggaggatggcaaggtgttttggcagaatctggctggctacaagagacaggaagccctgagaccatacctgagcagcgaggaagatcggaagaagggaaagaaattcgctcggtaccagctgggcgacctgctgctgcacctggaaaagaagcacggcgaggactggggaaaggtgtacgacgaggcctgggagcggattgacaagaaagtggaaggcctgagcaagcacatcaagctggaagaggaacggagaagcgaggacgcccagagcaaggccgccctgaccgactggctgcgggctaaggccagcttcgtgatcgagggcctgaaggaggccgacaaggacgagttctgcagatgcgagctgaagctgcagaagtggtacggggacctgcggggaaagcccttcgccatcgaagccgagaacagcatcctggacatcagcggcttcagcaagcagtacaactgtgccttcatctggcagaaggacggcgtgaagaagctgaacctgtacctgatcatcaactacttcaagggcggcaagctgcggttcaagaagatcaaacctgaagccttcgaagccaacagattctacaccgtgatcaacaaaaagagcggcgagatcgtgcccatggaggtgaacttcaacttcgacgaccccaacctgatcatcctgcctctggcctttggcaagagacagggcagagaattcatctggaacgacctgctgtccctggaaaccggcagcctgaagctggccaacggaagagtgatcgagaagacactgtacaacagaagaacccggcaggatgagcctgccctgttcgtggccctgaccttcgagcggcgggaggtcctggactcctccaatatcaaaccaatgaacctgatcggcgtggcaagaggcgaaaacatccccgccgtgatcgccctgaccgaccccgagggctgcccactgagccggtttaaggatagcctgggaaacccaacccacatcctgagaatcggcgagagctataaggagaagcagcggaccatccaggccaagaaggaggtggagcagcggagagccggcggctacagccggaagtacgccagcaaagccaagaatctggcagacgatatggtgagaaacaccgctagagatctgctgtactacgccgtgacccaggatgccatgctgatcttcgccaacctgagccggggcttcggccggcagggcaagcggaccttcatggccgagagacagtacacacggatggaggactggctgaccgccaagctggcctacgagggcctgagcaagacctacctgtccaagacactggcccagtacacctccaagacatgcagcaactgtgggtttaccatcaccagcgccgactacgacagggtgctggagaagctgaagaagacagcaacaggctggatgaccacaattaacggcaaggagctgaaggtggagggccagattacctactacaacagatacaagagacagaacgtagtcaaggacctgtccgtcgagctggatagactgagcgaagaatctgtgaacaacgacatctcctcctggacaaagggcagaagcggagaagctctgagcctcctgaagaaaagattctcccatagacccgtgcaggagaagttcgtgtgcctgaactgcggcttcgagacacacgcagccgagcaagccgccctgaacatcgccagatcctggctgttcctgcggagccaggagtacaagaaataccagacaaacaagacaaccggcaacaccgataagagagccttcgtcgagacctggcagtccttttaccggaagaagcttaaggaggtgtggaaacctgccgtgcggtctggcggatctggcggaggctccccccaggaggccgtgaccttcaaggacgtggtggtggacttcacccaggaggagtggaagtgcctggacagcagccagaaggagttctacagggacgtgatgctggagaactacagcaacctggtgagcctgggcctggccttccccaagccctacgtgatcgaccagctggagaggagggaggccccctggatccccgagggcgacatccccaggatcagccaccccgagaggaagaagaagggcggcccaagcagcggcgcccctcctcccagcggcggcagcccagccggctccccaacctctaccgaggagggcacctctgagtccgccacccccgagagcggccctggcacctccaccgagcccagcgagggcagcgcacccggcagccctgccggcagccccacctccacagaggagggaaccagcaccgagcccagcgaaggcagcgccccaggcaccagcaccgagcctagtgagcaggagattaaacggatcaacaagatcagaagaagacttgtgaaagacagcaacaccaagaaggccggcaagacaggccccatgaaaaccctgctggttagagtgatgacacccgatctgagagagcggctggaaaacctgagaaagaagcctgaaaatatcccccagcccatcagcaatacatctagagccaacctgaataagctgctgaccgattacaccgaaatgaagaaggcgatcctgcatgtgtactgggaagagttccagaaggaccctgtgggcctgatgagccgggtggcccagcctgccagcaagaagatcgatcagaacaagctgaaacctgagatggacgagaagggcaacctgaccaccgccggctttgcctgctctcagtgtggccagcccctgttcgtgtacaagctggagcaggtgtctgagaagggcaaggcttacaccaactacttcggacggtgcaatgtggccgagcacgaaaagctgatcctgctggcccagctgaagcccgagaaggatagcgacgaagccgtgacatatagcctgggaaagtttgggcagagggccctggatttctacagcattcatgtgaccaaggagtccacccaccccgtgaagcccctggcccagatcgccggaaacagatacgcctccggacctgtgggaaaggccctgagcgacgcatgtatgggcacaatcgcctccttcctgtctaagtaccaggacatcatcatcgaacaccagaaggtggtgaagggcaaccagaagagactggagagcctgcgggagctggccggcaaggaaaacctggaataccctagcgtgaccctgccacctcagcctcacaccaaggagggcgttgatgcctacaacgaagtgatcgcccgggtgcgaatgtgggtgaacctgaacctgtggcagaagctgaagctaagcagagatgatgccaagcctctgctgagactgaagggattcccttcctttcctctggtcgagagacaggccaacgaagtggactggtgggacatggtgtgtaacgtgaagaagctgatcaacgagaaaaaggaggatggcaaggtgttttggcagaatctggctggctacaagagacaggaagccctgagaccatacctgagcagcgaggaagatcggaagaagggaaagaaattcgctcggtaccagctgggcgacctgctgctgcacctggaaaagaagcacggcgaggactggggaaaggtgtacgacgaggcctgggagcggattgacaagaaagtggaaggcctgagcaagcacatcaagctggaagaggaacggagaagcgaggacgcccagagcaaggccgccctgaccgactggctgcgggctaaggccagcttcgtgatcgagggcctgaaggaggccgacaaggacgagttctgcagatgcgagctgaagctgcagaagtggtacggggacctgcggggaaagcccttcgccatcgaagccgagaacagcatcctggacatcagcggcttcagcaagcagtacaactgtgccttcatctggcagaaggacggcgtgaagaagctgaacctgtacctgatcatcaactacttcaagggcggcaagctgcggttcaagaagatcaaacctgaagccttcgaagccaacagattctacaccgtgatcaacaaaaagagcggcgagatcgtgcccatggaggtgaacttcaacttcgacgaccccaacctgatcatcctgcctctggcctttggcaagagacagggcagagaattcatctggaacgacctgctgtccctggaaaccggcagcctgaagctggccaacggaagagtgatcgagaagacactgtacaacagaagaacccggcaggatgagcctgccctgttcgtggccctgaccttcgagcggcgggaggtcctggactcctccaatatcaaaccaatgaacctgatcggcgtggcaagaggcgaaaacatccccgccgtgatcgccctgaccgaccccgagggctgcccactgagccggtttaaggatagcctgggaaacccaacccacatcctgagaatcggcgagagctataaggagaagcagcggaccatccaggccaagaaggaggtggagcagcggagagccggcggctacagccggaagtacgccagcaaagccaagaatctggcagacgatatggtgagaaacaccgctagagatctgctgtactacgccgtgacccaggatgccatgctgatcttcgccaacctgagccggggcttcggccggcagggcaagcggaccttcatggccgagagacagtacacacggatggaggactggctgaccgccaagctggcctacgagggcctgagcaagacctacctgtccaagacactggcccagtacacctccaagacatgcagcaactgtgggtttaccatcaccagcgccgactacgacagggtgctggagaagctgaagaagacagcaacaggctggatgaccacaattaacggcaaggagctgaaggtggagggccagattacctactacaacagatacaagagacagaacgtagtcaaggacctgtccgtcgagctggatagactgagcgaagaatctgtgaacaacgacatctcctcctggacaaagggcagaagcggagaagctctgagcctcctgaagaaaagattctcccatagacccgtgcaggagaagttcgtgtgcctgaactgcggcttcgagacacacgcagccgagcaagccgccctgaacatcgccagatcctggctgttcctgcggagccaggagtacaagaaataccagacaaacaagacaaccggcaacaccgataagagagccttcgtcgagacctggcagtccttttaccggaagaagcttaaggaggtgtggaaacctgccgtgcggtctggcggatctggcggaggctcctccccaggaggccgtgaccttcaaggacgtggtggtggacttcacccaggaggagtggaagtgcctggacagcagccagaaggagttctacagggacgtgatgctggagaactacagcaacctggtgagcctgggcctggccttccccaagccctacgtgatcgaccagctggagaggagggaggccccctggatccccgagggcgacatccccaggatcagccaccccgagaggaagaagaagggatctggctccggcagcggccccaagaaaaagagaaaagtctaagctgccttctgcggggcttgccttctggccatgcccttcttctctcccttgcacctgtacctcttggtctttgaataaagcctgagtaggaaggctagcaaaaaaaaaaaaaaaaaaaaaaaaaaaaaaaaaaaaaaaaaaaaaaaaaaaaaaaaaaaaaaaaaaaaaaaaaaaaaaaa

SEQ ID NO: 16395 - RNA, 9485 nt, synthetic construct
  source 1..9485: mol_type = other RNA
aggaaataagagagaaaagaagagtaagaagaaatataagagccaccatggcccctaagaagaagcgtaaagtgagccggatggaacgcctcgtctacgaggtgcggcagaagtgcagaaacatcgaggacatctgcatctcctgcggatctctgaacgtgaccctggagcacccactgttcatcggcggcatgtgccagaactgtaaaaactgttttctggagtgtgcctatcaatacgacgatgacggctaccagagctactgcaccatctgttgcggcggaagagaggtgctgatgtgtggaaataacaactgctgccggtgcttctgcgtggaatgcgtggacctgctggtgggccccggcgccgcccaggccgctattaaggaagatccttggaactgctacatgtgcggccacaagggcacatacggcctgctgagacggagagaggactggcctagcagactgcagatgttcttcgccaataaccacgaccaggagttcgacccccctaaggtgtaccctcccgtccccgccgagaagagaaagcccatccgggtcctgagcctgttcgatggcatcgccaccggtctgctggtgctgaaggacctgggcatccaggtggataggtacattgcctccgaggtgtgcgaggactccatcaccgtgggaatggtgcgtcatcagggcaagatcatgtacgtgggcgacgtgcggagcgtgacacagaagcatatccaggagtggggccctttcgacctggtgatcggcggcagcccttgcaatgacctgagcatcgtgaacccagcccggaagggcctgtacgagggaaccggcagactgttcttcgagttttacagactgctgcacgacgcccggcctaaggaaggcgacgaccggcccttcttttggctgttcgagaatgtggtggccatgggagtcagcgacaagcgggatattagccggttcctggagagcaaccccgtgatgatcgatgccaaggaagtgagcgccgcccaccgggccagatacttctggggcaatctgcctggcatgaacagacccctggccagcaccgtgaacgacaagctggagctgcaggagtgcctggagcacggccggatcgccaagttcagcaaggtgagaaccatcaccacccgaagcaacagcatcaaacaaggcaaggaccagcactttcctgtgttcatgaacgagaaggaggacatcctgtggtgtaccgagatggagagagtgttcgggttcccagtccactacacagatgtcagcaacatgtctagactggccagacagagactgctgggaagaagctggtccgtccctgtgatcagacacctgttcgcccctctgaaggagtacttcgcctgcgtgagcagcggcaacagcaacgccaacagccggggccccagcttctctagcggcctggtgccactgtccctgagagggagccacatgggccccatggagatctacaaaaccgtgagcgcctggaagcggcagcctgtgcgcgtgctgagcctgtttcggaatatcgataaagtcctgaaaagcctgggattcctggagagcggctctggctccggcggtggcaccctgaagtacgtggaggatgtgacaaacgtggtcagacgggatgtggagaagtggggccccttcgatctggtgtacggcagcacccaacccctgggcagctcttgtgaccggtgccctggctggtacatgtttcagttccaccggatcctgcagtacgccctgccgagacaggagtcccagcggccattcttttggattttcatggacaacttgctgctgaccgaggatgaccaggaaactaccactcggttcctgcagaccgaagccgtgaccctgcaggacgtgagaggccgggactaccagaacgccatgcgggtgtggtccaacatccctggactgaaaagcaagcacgcacctctgacccctaaagaagaggagtacctgcaggcccaggtgcggagcagaagcaagctggacgcccctaaggtggatctgctggtgaagaattgcctcctgcccctgagagagtacttcaagtatttcagccagaatagtctgcccctgggaggcagcggcggcggcgccctggtgacatttgaggacgtcgccgtgcggttcacccaggaggaatgggctctgctggatccttctcagaaaatcctgtaccgggacgtgatgagagagacataccggaatctgacctccgtgggcatcaactgggaatgttgggaccttgaagcctgcttcagaagcctgggaagaaacctgagagtgcaggtggtgaagagaaagtgcgagctgaccaacagcggcccctgcgccgagggcggcccaagcagcggcgcccctcctcccagcggcggcagcccagccggctccccaacctctaccgaggagggcacctctgagtccgccacccccgagagcggccctggcacctccaccgagcccagcgagggcagcgcacccggcagccctgccggcagccccacctccacagaggagggaaccagcaccgagcccagcgaaggcagcgccccaggcaccagcaccgagcctagtgagcaggagattaaacggatcaacaagatcagaagaagacttgtgaaagacagcaacaccaagaaggccggcaagacaggccccatgaaaaccctgctggttagagtgatgacacccgatctgagagagcggctggaaaacctgagaaagaagcctgaaaatatcccccagcccatcagcaatacatctagagccaacctgaataagctgctgaccgattacaccgaaatgaagaaggcgatcctgcatgtgtactgggaagagttccagaaggaccctgtgggcctgatgagccgggtggcccagcctgccagcaagaagatcgatcagaacaagctgaaacctgagatggacgagaagggcaacctgaccaccgccggctttgcctgctctcagtgtggccagcccctgttcgtgtacaagctggagcaggtgtctgagaagggcaaggcttacaccaactacttcggacggtgcaatgtggccgagcacgaaaagctgatcctgctggcccagctgaagcccgagaaggatagcgacgaagccgtgacatatagcctgggaaagtttgggcagagggccctggatttctacagcattcatgtgaccaaggagtccacccaccccgtgaagcccctggcccagatcgccggaaacagatacgcctccggacctgtgggaaaggccctgagcgacgcatgtatgggcacaatcgcctccttcctgtctaagtaccaggacatcatcatcgaacaccagaaggtggtgaagggcaaccagaagagactggagagcctgcgggagctggccggcaaggaaaacctggaataccctagcgtgaccctgccacctcagcctcacaccaaggagggcgttgatgcctacaacgaagtgatcgcccgggtgcgaatgtgggtgaacctgaacctgtggcagaagctgaagctaagcagagatgatgccaagcctctgctgagactgaagggattcccttcctttcctctggtcgagagacaggccaacgaagtggactggtgggacatggtgtgtaacgtgaagaagctgatcaacgagaaaaaggaggatggcaaggtgttttggcagaatctggctggctacaagagacaggaagccctgagaccatacctgagcagcgaggaagatcggaagaagggaaagaaattcgctcggtaccagctgggcgacctgctgctgcacctggaaaagaagcacggcgaggactggggaaaggtgtacgacgaggcctgggagcggattgacaagaaagtggaaggcctgagcaagcacatcaagctggaagaggaacggagaagcgaggacgcccagagcaaggccgccctgaccgactggctgcgggctaaggccagcttcgtgatcgagggcctgaaggaggccgacaaggacgagttctgcagatgcgagctgaagctgcagaagtggtacggggacctgcggggaaagcccttcgccatcgaagccgagaacagcatcctggacatcagcggcttcagcaagcagtacaactgtgccttcatctggcagaaggacggcgtgaagaagctgaacctgtacctgatcatcaactacttcaagggcggcaagctgcggttcaagaagatcaaacctgaagccttcgaagccaacagattctacaccgtgatcaacaaaaagagcggcgagatcgtgcccatggaggtgaacttcaacttcgacgaccccaacctgatcatcctgcctctggcctttggcaagagacagggcagagaattcatctggaacgacctgctgtccctggaaaccggcagcctgaagctggccaacggaagagtgatcgagaagacactgtacaacagaagaacccggcaggatgagcctgccctgttcgtggccctgaccttcgagcggcgggaggtcctggactcctccaatatcaaaccaatgaacctgatcggcgtggcaagaggcgaaaacatccccgccgtgatcgccctgaccgaccccgagggctgcccactgagccggtttaaggatagcctgggaaacccaacccacatcctgagaatcggcgagagctataaggagaagcagcggaccatccaggccaagaaggaggtggagcagcggagagccggcggctacagccggaagtacgccagcaaagccaagaatctggcagacgatatggtgagaaacaccgctagagatctgctgtactacgccgtgacccaggatgccatgctgatcttcgccaacctgagccggggcttcggccggcagggcaagcggaccttcatggccgagagacagtacacacggatggaggactggctgaccgccaagctggcctacgagggcctgagcaagacctacctgtccaagacactggcccagtacacctccaagacatgcagcaactgtgggtttaccatcaccagcgccgactacgacagggtgctggagaagctgaagaagacagcaacaggctggatgaccacaattaacggcaaggagctgaaggtggagggccagattacctactacaacagatacaagagacagaacgtagtcaaggacctgtccgtcgagctggatagactgagcgaagaatctgtgaacaacgacatctcctcctggacaaagggcagaagcggagaagctctgagcctcctgaagaaaagattctcccatagacccgtgcaggagaagttcgtgtgcctgaactgcggcttcgagacacacgcagccgagcaagccgccctgaacatcgccagatcctggctgttcctgcggagccaggagtacaagaaataccagacaaacaagacaaccggcaacaccgataagagagccttcgtcgagacctggcagtccttttaccggaagaagcttaaggaggtgtggaaacctgccgtgcggtctggcggatctggcggaggctccccccagggccccgtgaccttccaggacgtggccgtggtgttcacccaggaggagtggaggtacctggaccccagccagaaggagctgtacagggacgtgatgctggagaactacaggaacctgctgtacctgggcctggtggtgagcaagcccaacgtgatctacaggttcgagcagggcgaggccagctggaggcccgaccagagggacagcggcagcacctgcagcgacgaggagaccggcggcggcccaagcagcggcgcccctcctcccagcggcggcagcccagccggctccccaacctctaccgaggagggcacctctgagtccgccacccccgagagcggccctggcacctccaccgagcccagcgagggcagcgcacccggcagccctgccggcagccccacctccacagaggagggaaccagcaccgagcccagcgaaggcagcgccccaggcaccagcaccgagcctagtgagcaggagattaaacggatcaacaagatcagaagaagacttgtgaaagacagcaacaccaagaaggccggcaagacaggccccatgaaaaccctgctggttagagtgatgacacccgatctgagagagcggctggaaaacctgagaaagaagcctgaaaatatcccccagcccatcagcaatacatctagagccaacctgaataagctgctgaccgattacaccgaaatgaagaaggcgatcctgcatgtgtactgggaagagttccagaaggaccctgtgggcctgatgagccgggtggcccagcctgccagcaagaagatcgatcagaacaagctgaaacctgagatggacgagaagggcaacctgaccaccgccggctttgcctgctctcagtgtggccagcccctgttcgtgtacaagctggagcaggtgtctgagaagggcaaggcttacaccaactacttcggacggtgcaatgtggccgagcacgaaaagctgatcctgctggcccagctgaagcccgagaaggatagcgacgaagccgtgacatatagcctgggaaagtttgggcagagggccctggatttctacagcattcatgtgaccaaggagtccacccaccccgtgaagcccctggcccagatcgccggaaacagatacgcctccggacctgtgggaaaggccctgagcgacgcatgtatgggcacaatcgcctccttcctgtctaagtaccaggacatcatcatcgaacaccagaaggtggtgaagggcaaccagaagagactggagagcctgcgggagctggccggcaaggaaaacctggaataccctagcgtgaccctgccacctcagcctcacaccaaggagggcgttgatgcctacaacgaagtgatcgcccgggtgcgaatgtgggtgaacctgaacctgtggcagaagctgaagctaagcagagatgatgccaagcctctgctgagactgaagggattcccttcctttcctctggtcgagagacaggccaacgaagtggactggtgggacatggtgtgtaacgtgaagaagctgatcaacgagaaaaaggaggatggcaaggtgttttggcagaatctggctggctacaagagacaggaagccctgagaccatacctgagcagcgaggaagatcggaagaagggaaagaaattcgctcggtaccagctgggcgacctgctgctgcacctggaaaagaagcacggcgaggactggggaaaggtgtacgacgaggcctgggagcggattgacaagaaagtggaaggcctgagcaagcacatcaagctggaagaggaacggagaagcgaggacgcccagagcaaggccgccctgaccgactggctgcgggctaaggccagcttcgtgatcgagggcctgaaggaggccgacaaggacgagttctgcagatgcgagctgaagctgcagaagtggtacggggacctgcggggaaagcccttcgccatcgaagccgagaacagcatcctggacatcagcggcttcagcaagcagtacaactgtgccttcatctggcagaaggacggcgtgaagaagctgaacctgtacctgatcatcaactacttcaagggcggcaagctgcggttcaagaagatcaaacctgaagccttcgaagccaacagattctacaccgtgatcaacaaaaagagcggcgagatcgtgcccatggaggtgaacttcaacttcgacgaccccaacctgatcatcctgcctctggcctttggcaagagacagggcagagaattcatctggaacgacctgctgtccctggaaaccggcagcctgaagctggccaacggaagagtgatcgagaagacactgtacaacagaagaacccggcaggatgagcctgccctgttcgtggccctgaccttcgagcggcgggaggtcctggactcctccaatatcaaaccaatgaacctgatcggcgtggcaagaggcgaaaacatccccgccgtgatcgccctgaccgaccccgagggctgcccactgagccggtttaaggatagcctgggaaacccaacccacatcctgagaatcggcgagagctataaggagaagcagcggaccatccaggccaagaaggaggtggagcagcggagagccggcggctacagccggaagtacgccagcaaagccaagaatctggcagacgatatggtgagaaacaccgctagagatctgctgtactacgccgtgacccaggatgccatgctgatcttcgccaacctgagccggggcttcggccggcagggcaagcggaccttcatggccgagagacagtacacacggatggaggactggctgaccgccaagctggcctacgagggcctgagcaagacctacctgtccaagacactggcccagtacacctccaagacatgcagcaactgtgggtttaccatcaccagcgccgactacgacagggtgctggagaagctgaagaagacagcaacaggctggatgaccacaattaacggcaaggagctgaaggtggagggccagattacctactacaacagatacaagagacagaacgtagtcaaggacctgtccgtcgagctggatagactgagcgaagaatctgtgaacaacgacatctcctcctggacaaagggcagaagcggagaagctctgagcctcctgaagaaaagattctcccatagacccgtgcaggagaagttcgtgtgcctgaactgcggcttcgagacacacgcagccgagcaagccgccctgaacatcgccagatcctggctgttcctgcggagccaggagtacaagaaataccagacaaacaagacaaccggcaacaccgataagagagccttcgtcgagacctggcagtccttttaccggaagaagcttaaggaggtgtggaaacctgccgtgcggtctggcggatctggcggaggctcctccccagggccccgtgaccttccaggacgtggccgtggtgttcacccaggaggagtggaggtacctggaccccagccagaaggagctgtacagggacgtgatgctggagaactacaggaacctgctgtacctgggcctggtggtgagcaagcccaacgtgatctacaggttcgagcagggcgaggccagctggaggcccgaccagagggacagcggcagcacctgcagcgacgaggagaccggcggatctggctccggcagcggccccaagaaaaagagaaaagtctaagctgccttctgcggggcttgccttctggccatgcccttcttctctcccttgcacctgtacctcttggtctttgaataaagcctgagtaggaaggctagcaaaaaaaaaaaaaaaaaaaaaaaaaaaaaaaaaaaaaaaaaaaaaaaaaaaaaaaaaaaaaaaaaaaaaaaaaaaaaaaa

SEQ ID NO: 16396 - RNA, 9485 nt, synthetic construct
  source 1..9485: mol_type = other RNA
aggaaataagagagaaaagaagagtaagaagaaatataagagccaccatggcccctaagaagaagcgtaaagtgagccggatggaacgcctcgtctacgaggtgcggcagaagtgcagaaacatcgaggacatctgcatctcctgcggatctctgaacgtgaccctggagcacccactgttcatcggcggcatgtgccagaactgtaaaaactgttttctggagtgtgcctatcaatacgacgatgacggctaccagagctactgcaccatctgttgcggcggaagagaggtgctgatgtgtggaaataacaactgctgccggtgcttctgcgtggaatgcgtggacctgctggtgggccccggcgccgcccaggccgctattaaggaagatccttggaactgctacatgtgcggccacaagggcacatacggcctgctgagacggagagaggactggcctagcagactgcagatgttcttcgccaataaccacgaccaggagttcgacccccctaaggtgtaccctcccgtccccgccgagaagagaaagcccatccgggtcctgagcctgttcgatggcatcgccaccggtctgctggtgctgaaggacctgggcatccaggtggataggtacattgcctccgaggtgtgcgaggactccatcaccgtgggaatggtgcgtcatcagggcaagatcatgtacgtgggcgacgtgcggagcgtgacacagaagcatatccaggagtggggccctttcgacctggtgatcggcggcagcccttgcaatgacctgagcatcgtgaacccagcccggaagggcctgtacgagggaaccggcagactgttcttcgagttttacagactgctgcacgacgcccggcctaaggaaggcgacgaccggcccttcttttggctgttcgagaatgtggtggccatgggagtcagcgacaagcgggatattagccggttcctggagagcaaccccgtgatgatcgatgccaaggaagtgagcgccgcccaccgggccagatacttctggggcaatctgcctggcatgaacagacccctggccagcaccgtgaacgacaagctggagctgcaggagtgcctggagcacggccggatcgccaagttcagcaaggtgagaaccatcaccacccgaagcaacagcatcaaacaaggcaaggaccagcactttcctgtgttcatgaacgagaaggaggacatcctgtggtgtaccgagatggagagagtgttcgggttcccagtccactacacagatgtcagcaacatgtctagactggccagacagagactgctgggaagaagctggtccgtccctgtgatcagacacctgttcgcccctctgaaggagtacttcgcctgcgtgagcagcggcaacagcaacgccaacagccggggccccagcttctctagcggcctggtgccactgtccctgagagggagccacatgggccccatggagatctacaaaaccgtgagcgcctggaagcggcagcctgtgcgcgtgctgagcctgtttcggaatatcgataaagtcctgaaaagcctgggattcctggagagcggctctggctccggcggtggcaccctgaagtacgtggaggatgtgacaaacgtggtcagacgggatgtggagaagtggggccccttcgatctggtgtacggcagcacccaacccctgggcagctcttgtgaccggtgccctggctggtacatgtttcagttccaccggatcctgcagtacgccctgccgagacaggagtcccagcggccattcttttggattttcatggacaacttgctgctgaccgaggatgaccaggaaactaccactcggttcctgcagaccgaagccgtgaccctgcaggacgtgagaggccgggactaccagaacgccatgcgggtgtggtccaacatccctggactgaaaagcaagcacgcacctctgacccctaaagaagaggagtacctgcaggcccaggtgcggagcagaagcaagctggacgcccctaaggtggatctgctggtgaagaattgcctcctgcccctgagagagtacttcaagtatttcagccagaatagtctgcccctgggaggcagcggcggcggcgccctggtgacatttgaggacgtcgccgtgcggttcacccaggaggaatgggctctgctggatccttctcagaaaatcctgtaccgggacgtgatgagagagacataccggaatctgacctccgtgggcatcaactgggaatgttgggaccttgaagcctgcttcagaagcctgggaagaaacctgagagtgcaggtggtgaagagaaagtgcgagctgaccaacagcggcccctgcgccgagggcggcccaagcagcggcgcccctcctcccagcggcggcagcccagccggctccccaacctctaccgaggagggcacctctgagtccgccacccccgagagcggccctggcacctccaccgagcccagcgagggcagcgcacccggcagccctgccggcagccccacctccacagaggagggaaccagcaccgagcccagcgaaggcagcgccccaggcaccagcaccgagcctagtgagcaggagattaaacggatcaacaagatcagaagaagacttgtgaaagacagcaacaccaagaaggccggcaagacaggccccatgaaaaccctgctggttagagtgatgacacccgatctgagagagcggctggaaaacctgagaaagaagcctgaaaatatcccccagcccatcagcaatacatctagagccaacctgaataagctgctgaccgattacaccgaaatgaagaaggcgatcctgcatgtgtactgggaagagttccagaaggaccctgtgggcctgatgagccgggtggcccagcctgccagcaagaagatcgatcagaacaagctgaaacctgagatggacgagaagggcaacctgaccaccgccggctttgcctgctctcagtgtggccagcccctgttcgtgtacaagctggagcaggtgtctgagaagggcaaggcttacaccaactacttcggacggtgcaatgtggccgagcacgaaaagctgatcctgctggcccagctgaagcccgagaaggatagcgacgaagccgtgacatatagcctgggaaagtttgggcagagggccctggatttctacagcattcatgtgaccaaggagtccacccaccccgtgaagcccctggcccagatcgccggaaacagatacgcctccggacctgtgggaaaggccctgagcgacgcatgtatgggcacaatcgcctccttcctgtctaagtaccaggacatcatcatcgaacaccagaaggtggtgaagggcaaccagaagagactggagagcctgcgggagctggccggcaaggaaaacctggaataccctagcgtgaccctgccacctcagcctcacaccaaggagggcgttgatgcctacaacgaagtgatcgcccgggtgcgaatgtgggtgaacctgaacctgtggcagaagctgaagctaagcagagatgatgccaagcctctgctgagactgaagggattcccttcctttcctctggtcgagagacaggccaacgaagtggactggtgggacatggtgtgtaacgtgaagaagctgatcaacgagaaaaaggaggatggcaaggtgttttggcagaatctggctggctacaagagacaggaagccctgagaccatacctgagcagcgaggaagatcggaagaagggaaagaaattcgctcggtaccagctgggcgacctgctgctgcacctggaaaagaagcacggcgaggactggggaaaggtgtacgacgaggcctgggagcggattgacaagaaagtggaaggcctgagcaagcacatcaagctggaagaggaacggagaagcgaggacgcccagagcaaggccgccctgaccgactggctgcgggctaaggccagcttcgtgatcgagggcctgaaggaggccgacaaggacgagttctgcagatgcgagctgaagctgcagaagtggtacggggacctgcggggaaagcccttcgccatcgaagccgagaacagcatcctggacatcagcggcttcagcaagcagtacaactgtgccttcatctggcagaaggacggcgtgaagaagctgaacctgtacctgatcatcaactacttcaagggcggcaagctgcggttcaagaagatcaaacctgaagccttcgaagccaacagattctacaccgtgatcaacaaaaagagcggcgagatcgtgcccatggaggtgaacttcaacttcgacgaccccaacctgatcatcctgcctctggcctttggcaagagacagggcagagaattcatctggaacgacctgctgtccctggaaaccggcagcctgaagctggccaacggaagagtgatcgagaagacactgtacaacagaagaacccggcaggatgagcctgccctgttcgtggccctgaccttcgagcggcgggaggtcctggactcctccaatatcaaaccaatgaacctgatcggcgtggcaagaggcgaaaacatccccgccgtgatcgccctgaccgaccccgagggctgcccactgagccggtttaaggatagcctgggaaacccaacccacatcctgagaatcggcgagagctataaggagaagcagcggaccatccaggccaagaaggaggtggagcagcggagagccggcggctacagccggaagtacgccagcaaagccaagaatctggcagacgatatggtgagaaacaccgctagagatctgctgtactacgccgtgacccaggatgccatgctgatcttcgccaacctgagccggggcttcggccggcagggcaagcggaccttcatggccgagagacagtacacacggatggaggactggctgaccgccaagctggcctacgagggcctgagcaagacctacctgtccaagacactggcccagtacacctccaagacatgcagcaactgtgggtttaccatcaccagcgccgactacgacagggtgctggagaagctgaagaagacagcaacaggctggatgaccacaattaacggcaaggagctgaaggtggagggccagattacctactacaacagatacaagagacagaacgtagtcaaggacctgtccgtcgagctggatagactgagcgaagaatctgtgaacaacgacatctcctcctggacaaagggcagaagcggagaagctctgagcctcctgaagaaaagattctcccatagacccgtgcaggagaagttcgtgtgcctgaactgcggcttcgagacacacgcagccgagcaagccgccctgaacatcgccagatcctggctgttcctgcggagccaggagtacaagaaataccagacaaacaagacaaccggcaacaccgataagagagccttcgtcgagacctggcagtccttttaccggaagaagcttaaggaggtgtggaaacctgccgtgcggtctggcggatctggcggaggctccctgcaggtgagcgtgagcttcgaggacgtgaccgtggacttcagcagggaggagtggcagcacctggacagcgcccagaggaggctgtaccaggacgtgatgctggagaactacagccacctgctgagcctgggctacgaggtgcccaagcccgaggtgatcttcaagctggagcagggcgaggagccctgggccctgaaggagaagaccctgcaccacagctgcagcgacgacaccaccctgggcggcccaagcagcggcgcccctcctcccagcggcggcagcccagccggctccccaacctctaccgaggagggcacctctgagtccgccacccccgagagcggccctggcacctccaccgagcccagcgagggcagcgcacccggcagccctgccggcagccccacctccacagaggagggaaccagcaccgagcccagcgaaggcagcgccccaggcaccagcaccgagcctagtgagcaggagattaaacggatcaacaagatcagaagaagacttgtgaaagacagcaacaccaagaaggccggcaagacaggccccatgaaaaccctgctggttagagtgatgacacccgatctgagagagcggctggaaaacctgagaaagaagcctgaaaatatcccccagcccatcagcaatacatctagagccaacctgaataagctgctgaccgattacaccgaaatgaagaaggcgatcctgcatgtgtactgggaagagttccagaaggaccctgtgggcctgatgagccgggtggcccagcctgccagcaagaagatcgatcagaacaagctgaaacctgagatggacgagaagggcaacctgaccaccgccggctttgcctgctctcagtgtggccagcccctgttcgtgtacaagctggagcaggtgtctgagaagggcaaggcttacaccaactacttcggacggtgcaatgtggccgagcacgaaaagctgatcctgctggcccagctgaagcccgagaaggatagcgacgaagccgtgacatatagcctgggaaagtttgggcagagggccctggatttctacagcattcatgtgaccaaggagtccacccaccccgtgaagcccctggcccagatcgccggaaacagatacgcctccggacctgtgggaaaggccctgagcgacgcatgtatgggcacaatcgcctccttcctgtctaagtaccaggacatcatcatcgaacaccagaaggtggtgaagggcaaccagaagagactggagagcctgcgggagctggccggcaaggaaaacctggaataccctagcgtgaccctgccacctcagcctcacaccaaggagggcgttgatgcctacaacgaagtgatcgcccgggtgcgaatgtgggtgaacctgaacctgtggcagaagctgaagctaagcagagatgatgccaagcctctgctgagactgaagggattcccttcctttcctctggtcgagagacaggccaacgaagtggactggtgggacatggtgtgtaacgtgaagaagctgatcaacgagaaaaaggaggatggcaaggtgttttggcagaatctggctggctacaagagacaggaagccctgagaccatacctgagcagcgaggaagatcggaagaagggaaagaaattcgctcggtaccagctgggcgacctgctgctgcacctggaaaagaagcacggcgaggactggggaaaggtgtacgacgaggcctgggagcggattgacaagaaagtggaaggcctgagcaagcacatcaagctggaagaggaacggagaagcgaggacgcccagagcaaggccgccctgaccgactggctgcgggctaaggccagcttcgtgatcgagggcctgaaggaggccgacaaggacgagttctgcagatgcgagctgaagctgcagaagtggtacggggacctgcggggaaagcccttcgccatcgaagccgagaacagcatcctggacatcagcggcttcagcaagcagtacaactgtgccttcatctggcagaaggacggcgtgaagaagctgaacctgtacctgatcatcaactacttcaagggcggcaagctgcggttcaagaagatcaaacctgaagccttcgaagccaacagattctacaccgtgatcaacaaaaagagcggcgagatcgtgcccatggaggtgaacttcaacttcgacgaccccaacctgatcatcctgcctctggcctttggcaagagacagggcagagaattcatctggaacgacctgctgtccctggaaaccggcagcctgaagctggccaacggaagagtgatcgagaagacactgtacaacagaagaacccggcaggatgagcctgccctgttcgtggccctgaccttcgagcggcgggaggtcctggactcctccaatatcaaaccaatgaacctgatcggcgtggcaagaggcgaaaacatccccgccgtgatcgccctgaccgaccccgagggctgcccactgagccggtttaaggatagcctgggaaacccaacccacatcctgagaatcggcgagagctataaggagaagcagcggaccatccaggccaagaaggaggtggagcagcggagagccggcggctacagccggaagtacgccagcaaagccaagaatctggcagacgatatggtgagaaacaccgctagagatctgctgtactacgccgtgacccaggatgccatgctgatcttcgccaacctgagccggggcttcggccggcagggcaagcggaccttcatggccgagagacagtacacacggatggaggactggctgaccgccaagctggcctacgagggcctgagcaagacctacctgtccaagacactggcccagtacacctccaagacatgcagcaactgtgggtttaccatcaccagcgccgactacgacagggtgctggagaagctgaagaagacagcaacaggctggatgaccacaattaacggcaaggagctgaaggtggagggccagattacctactacaacagatacaagagacagaacgtagtcaaggacctgtccgtcgagctggatagactgagcgaagaatctgtgaacaacgacatctcctcctggacaaagggcagaagcggagaagctctgagcctcctgaagaaaagattctcccatagacccgtgcaggagaagttcgtgtgcctgaactgcggcttcgagacacacgcagccgagcaagccgccctgaacatcgccagatcctggctgttcctgcggagccaggagtacaagaaataccagacaaacaagacaaccggcaacaccgataagagagccttcgtcgagacctggcagtccttttaccggaagaagcttaaggaggtgtggaaacctgccgtgcggtctggcggatctggcggaggctcctctgcaggtgagcgtgagcttcgaggacgtgaccgtggacttcagcagggaggagtggcagcacctggacagcgcccagaggaggctgtaccaggacgtgatgctggagaactacagccacctgctgagcctgggctacgaggtgcccaagcccgaggtgatcttcaagctggagcagggcgaggagccctgggccctgaaggagaagaccctgcaccacagctgcagcgacgacaccaccctgggatctggctccggcagcggccccaagaaaaagagaaaagtctaagctgccttctgcggggcttgccttctggccatgcccttcttctctcccttgcacctgtacctcttggtctttgaataaagcctgagtaggaaggctagcaaaaaaaaaaaaaaaaaaaaaaaaaaaaaaaaaaaaaaaaaaaaaaaaaaaaaaaaaaaaaaaaaaaaaaaaaaaaaaaa

SEQ ID NO: 16397 - RNA, 9485 nt, synthetic construct
  source 1..9485: mol_type = other RNA
aggaaataagagagaaaagaagagtaagaagaaatataagagccaccatggcccctaagaagaagcgtaaagtgagccggatggaacgcctcgtctacgaggtgcggcagaagtgcagaaacatcgaggacatctgcatctcctgcggatctctgaacgtgaccctggagcacccactgttcatcggcggcatgtgccagaactgtaaaaactgttttctggagtgtgcctatcaatacgacgatgacggctaccagagctactgcaccatctgttgcggcggaagagaggtgctgatgtgtggaaataacaactgctgccggtgcttctgcgtggaatgcgtggacctgctggtgggccccggcgccgcccaggccgctattaaggaagatccttggaactgctacatgtgcggccacaagggcacatacggcctgctgagacggagagaggactggcctagcagactgcagatgttcttcgccaataaccacgaccaggagttcgacccccctaaggtgtaccctcccgtccccgccgagaagagaaagcccatccgggtcctgagcctgttcgatggcatcgccaccggtctgctggtgctgaaggacctgggcatccaggtggataggtacattgcctccgaggtgtgcgaggactccatcaccgtgggaatggtgcgtcatcagggcaagatcatgtacgtgggcgacgtgcggagcgtgacacagaagcatatccaggagtggggccctttcgacctggtgatcggcggcagcccttgcaatgacctgagcatcgtgaacccagcccggaagggcctgtacgagggaaccggcagactgttcttcgagttttacagactgctgcacgacgcccggcctaaggaaggcgacgaccggcccttcttttggctgttcgagaatgtggtggccatgggagtcagcgacaagcgggatattagccggttcctggagagcaaccccgtgatgatcgatgccaaggaagtgagcgccgcccaccgggccagatacttctggggcaatctgcctggcatgaacagacccctggccagcaccgtgaacgacaagctggagctgcaggagtgcctggagcacggccggatcgccaagttcagcaaggtgagaaccatcaccacccgaagcaacagcatcaaacaaggcaaggaccagcactttcctgtgttcatgaacgagaaggaggacatcctgtggtgtaccgagatggagagagtgttcgggttcccagtccactacacagatgtcagcaacatgtctagactggccagacagagactgctgggaagaagctggtccgtccctgtgatcagacacctgttcgcccctctgaaggagtacttcgcctgcgtgagcagcggcaacagcaacgccaacagccggggccccagcttctctagcggcctggtgccactgtccctgagagggagccacatgggccccatggagatctacaaaaccgtgagcgcctggaagcggcagcctgtgcgcgtgctgagcctgtttcggaatatcgataaagtcctgaaaagcctgggattcctggagagcggctctggctccggcggtggcaccctgaagtacgtggaggatgtgacaaacgtggtcagacgggatgtggagaagtggggccccttcgatctggtgtacggcagcacccaacccctgggcagctcttgtgaccggtgccctggctggtacatgtttcagttccaccggatcctgcagtacgccctgccgagacaggagtcccagcggccattcttttggattttcatggacaacttgctgctgaccgaggatgaccaggaaactaccactcggttcctgcagaccgaagccgtgaccctgcaggacgtgagaggccgggactaccagaacgccatgcgggtgtggtccaacatccctggactgaaaagcaagcacgcacctctgacccctaaagaagaggagtacctgcaggcccaggtgcggagcagaagcaagctggacgcccctaaggtggatctgctggtgaagaattgcctcctgcccctgagagagtacttcaagtatttcagccagaatagtctgcccctgggaggcagcggcggcggcgccctggtgacatttgaggacgtcgccgtgcggttcacccaggaggaatgggctctgctggatccttctcagaaaatcctgtaccgggacgtgatgagagagacataccggaatctgacctccgtgggcatcaactgggaatgttgggaccttgaagcctgcttcagaagcctgggaagaaacctgagagtgcaggtggtgaagagaaagtgcgagctgaccaacagcggcccctgcgccgagggcggcccaagcagcggcgcccctcctcccagcggcggcagcccagccggctccccaacctctaccgaggagggcacctctgagtccgccacccccgagagcggccctggcacctccaccgagcccagcgagggcagcgcacccggcagccctgccggcagccccacctccacagaggagggaaccagcaccgagcccagcgaaggcagcgccccaggcaccagcaccgagcctagtgagcaggagattaaacggatcaacaagatcagaagaagacttgtgaaagacagcaacaccaagaaggccggcaagacaggccccatgaaaaccctgctggttagagtgatgacacccgatctgagagagcggctggaaaacctgagaaagaagcctgaaaatatcccccagcccatcagcaatacatctagagccaacctgaataagctgctgaccgattacaccgaaatgaagaaggcgatcctgcatgtgtactgggaagagttccagaaggaccctgtgggcctgatgagccgggtggcccagcctgccagcaagaagatcgatcagaacaagctgaaacctgagatggacgagaagggcaacctgaccaccgccggctttgcctgctctcagtgtggccagcccctgttcgtgtacaagctggagcaggtgtctgagaagggcaaggcttacaccaactacttcggacggtgcaatgtggccgagcacgaaaagctgatcctgctggcccagctgaagcccgagaaggatagcgacgaagccgtgacatatagcctgggaaagtttgggcagagggccctggatttctacagcattcatgtgaccaaggagtccacccaccccgtgaagcccctggcccagatcgccggaaacagatacgcctccggacctgtgggaaaggccctgagcgacgcatgtatgggcacaatcgcctccttcctgtctaagtaccaggacatcatcatcgaacaccagaaggtggtgaagggcaaccagaagagactggagagcctgcgggagctggccggcaaggaaaacctggaataccctagcgtgaccctgccacctcagcctcacaccaaggagggcgttgatgcctacaacgaagtgatcgcccgggtgcgaatgtgggtgaacctgaacctgtggcagaagctgaagctaagcagagatgatgccaagcctctgctgagactgaagggattcccttcctttcctctggtcgagagacaggccaacgaagtggactggtgggacatggtgtgtaacgtgaagaagctgatcaacgagaaaaaggaggatggcaaggtgttttggcagaatctggctggctacaagagacaggaagccctgagaccatacctgagcagcgaggaagatcggaagaagggaaagaaattcgctcggtaccagctgggcgacctgctgctgcacctggaaaagaagcacggcgaggactggggaaaggtgtacgacgaggcctgggagcggattgacaagaaagtggaaggcctgagcaagcacatcaagctggaagaggaacggagaagcgaggacgcccagagcaaggccgccctgaccgactggctgcgggctaaggccagcttcgtgatcgagggcctgaaggaggccgacaaggacgagttctgcagatgcgagctgaagctgcagaagtggtacggggacctgcggggaaagcccttcgccatcgaagccgagaacagcatcctggacatcagcggcttcagcaagcagtacaactgtgccttcatctggcagaaggacggcgtgaagaagctgaacctgtacctgatcatcaactacttcaagggcggcaagctgcggttcaagaagatcaaacctgaagccttcgaagccaacagattctacaccgtgatcaacaaaaagagcggcgagatcgtgcccatggaggtgaacttcaacttcgacgaccccaacctgatcatcctgcctctggcctttggcaagagacagggcagagaattcatctggaacgacctgctgtccctggaaaccggcagcctgaagctggccaacggaagagtgatcgagaagacactgtacaacagaagaacccggcaggatgagcctgccctgttcgtggccctgaccttcgagcggcgggaggtcctggactcctccaatatcaaaccaatgaacctgatcggcgtggcaagaggcgaaaacatccccgccgtgatcgccctgaccgaccccgagggctgcccactgagccggtttaaggatagcctgggaaacccaacccacatcctgagaatcggcgagagctataaggagaagcagcggaccatccaggccaagaaggaggtggagcagcggagagccggcggctacagccggaagtacgccagcaaagccaagaatctggcagacgatatggtgagaaacaccgctagagatctgctgtactacgccgtgacccaggatgccatgctgatcttcgccaacctgagccggggcttcggccggcagggcaagcggaccttcatggccgagagacagtacacacggatggaggactggctgaccgccaagctggcctacgagggcctgagcaagacctacctgtccaagacactggcccagtacacctccaagacatgcagcaactgtgggtttaccatcaccagcgccgactacgacagggtgctggagaagctgaagaagacagcaacaggctggatgaccacaattaacggcaaggagctgaaggtggagggccagattacctactacaacagatacaagagacagaacgtagtcaaggacctgtccgtcgagctggatagactgagcgaagaatctgtgaacaacgacatctcctcctggacaaagggcagaagcggagaagctctgagcctcctgaagaaaagattctcccatagacccgtgcaggagaagttcgtgtgcctgaactgcggcttcgagacacacgcagccgagcaagccgccctgaacatcgccagatcctggctgttcctgcggagccaggagtacaagaaataccagacaaacaagacaaccggcaacaccgataagagagccttcgtcgagacctggcagtccttttaccggaagaagcttaaggaggtgtggaaacctgccgtgcggtctggcggatctggcggaggctccgcccagggcctggtgcccttcgaggaggtggccgtgtacttcaccaggaccgagtgggccctgctggaccccgcccagagggccctgtacagggccgtgatgcaggagaactacgagaacgtgaccagcctgggcttcgccgtgagcaagcccgacgtgatcagccagctggagaggggcgaggagccctgggtgcccgagctgcagggcagcgagcacagggagatcctgggcggcaccggcggcggcccaagcagcggcgcccctcctcccagcggcggcagcccagccggctccccaacctctaccgaggagggcacctctgagtccgccacccccgagagcggccctggcacctccaccgagcccagcgagggcagcgcacccggcagccctgccggcagccccacctccacagaggagggaaccagcaccgagcccagcgaaggcagcgccccaggcaccagcaccgagcctagtgagcaggagattaaacggatcaacaagatcagaagaagacttgtgaaagacagcaacaccaagaaggccggcaagacaggccccatgaaaaccctgctggttagagtgatgacacccgatctgagagagcggctggaaaacctgagaaagaagcctgaaaatatcccccagcccatcagcaatacatctagagccaacctgaataagctgctgaccgattacaccgaaatgaagaaggcgatcctgcatgtgtactgggaagagttccagaaggaccctgtgggcctgatgagccgggtggcccagcctgccagcaagaagatcgatcagaacaagctgaaacctgagatggacgagaagggcaacctgaccaccgccggctttgcctgctctcagtgtggccagcccctgttcgtgtacaagctggagcaggtgtctgagaagggcaaggcttacaccaactacttcggacggtgcaatgtggccgagcacgaaaagctgatcctgctggcccagctgaagcccgagaaggatagcgacgaagccgtgacatatagcctgggaaagtttgggcagagggccctggatttctacagcattcatgtgaccaaggagtccacccaccccgtgaagcccctggcccagatcgccggaaacagatacgcctccggacctgtgggaaaggccctgagcgacgcatgtatgggcacaatcgcctccttcctgtctaagtaccaggacatcatcatcgaacaccagaaggtggtgaagggcaaccagaagagactggagagcctgcgggagctggccggcaaggaaaacctggaataccctagcgtgaccctgccacctcagcctcacaccaaggagggcgttgatgcctacaacgaagtgatcgcccgggtgcgaatgtgggtgaacctgaacctgtggcagaagctgaagctaagcagagatgatgccaagcctctgctgagactgaagggattcccttcctttcctctggtcgagagacaggccaacgaagtggactggtgggacatggtgtgtaacgtgaagaagctgatcaacgagaaaaaggaggatggcaaggtgttttggcagaatctggctggctacaagagacaggaagccctgagaccatacctgagcagcgaggaagatcggaagaagggaaagaaattcgctcggtaccagctgggcgacctgctgctgcacctggaaaagaagcacggcgaggactggggaaaggtgtacgacgaggcctgggagcggattgacaagaaagtggaaggcctgagcaagcacatcaagctggaagaggaacggagaagcgaggacgcccagagcaaggccgccctgaccgactggctgcgggctaaggccagcttcgtgatcgagggcctgaaggaggccgacaaggacgagttctgcagatgcgagctgaagctgcagaagtggtacggggacctgcggggaaagcccttcgccatcgaagccgagaacagcatcctggacatcagcggcttcagcaagcagtacaactgtgccttcatctggcagaaggacggcgtgaagaagctgaacctgtacctgatcatcaactacttcaagggcggcaagctgcggttcaagaagatcaaacctgaagccttcgaagccaacagattctacaccgtgatcaacaaaaagagcggcgagatcgtgcccatggaggtgaacttcaacttcgacgaccccaacctgatcatcctgcctctggcctttggcaagagacagggcagagaattcatctggaacgacctgctgtccctggaaaccggcagcctgaagctggccaacggaagagtgatcgagaagacactgtacaacagaagaacccggcaggatgagcctgccctgttcgtggccctgaccttcgagcggcgggaggtcctggactcctccaatatcaaaccaatgaacctgatcggcgtggcaagaggcgaaaacatccccgccgtgatcgccctgaccgaccccgagggctgcccactgagccggtttaaggatagcctgggaaacccaacccacatcctgagaatcggcgagagctataaggagaagcagcggaccatccaggccaagaaggaggtggagcagcggagagccggcggctacagccggaagtacgccagcaaagccaagaatctggcagacgatatggtgagaaacaccgctagagatctgctgtactacgccgtgacccaggatgccatgctgatcttcgccaacctgagccggggcttcggccggcagggcaagcggaccttcatggccgagagacagtacacacggatggaggactggctgaccgccaagctggcctacgagggcctgagcaagacctacctgtccaagacactggcccagtacacctccaagacatgcagcaactgtgggtttaccatcaccagcgccgactacgacagggtgctggagaagctgaagaagacagcaacaggctggatgaccacaattaacggcaaggagctgaaggtggagggccagattacctactacaacagatacaagagacagaacgtagtcaaggacctgtccgtcgagctggatagactgagcgaagaatctgtgaacaacgacatctcctcctggacaaagggcagaagcggagaagctctgagcctcctgaagaaaagattctcccatagacccgtgcaggagaagttcgtgtgcctgaactgcggcttcgagacacacgcagccgagcaagccgccctgaacatcgccagatcctggctgttcctgcggagccaggagtacaagaaataccagacaaacaagacaaccggcaacaccgataagagagccttcgtcgagacctggcagtccttttaccggaagaagcttaaggaggtgtggaaacctgccgtgcggtctggcggatctggcggaggctcctgcccagggcctggtgcccttcgaggaggtggccgtgtacttcaccaggaccgagtgggccctgctggaccccgcccagagggccctgtacagggccgtgatgcaggagaactacgagaacgtgaccagcctgggcttcgccgtgagcaagcccgacgtgatcagccagctggagaggggcgaggagccctgggtgcccgagctgcagggcagcgagcacagggagatcctgggcggcaccggcggatctggctccggcagcggccccaagaaaaagagaaaagtctaagctgccttctgcggggcttgccttctggccatgcccttcttctctcccttgcacctgtacctcttggtctttgaataaagcctgagtaggaaggctagcaaaaaaaaaaaaaaaaaaaaaaaaaaaaaaaaaaaaaaaaaaaaaaaaaaaaaaaaaaaaaaaaaaaaaaaaaaaaaaaa

SEQ ID NO: 16398 - RNA, 9485 nt, synthetic construct
  source 1..9485: mol_type = other RNA
aggaaataagagagaaaagaagagtaagaagaaatataagagccaccatggcccctaagaagaagcgtaaagtgagccggatggaacgcctcgtctacgaggtgcggcagaagtgcagaaacatcgaggacatctgcatctcctgcggatctctgaacgtgaccctggagcacccactgttcatcggcggcatgtgccagaactgtaaaaactgttttctggagtgtgcctatcaatacgacgatgacggctaccagagctactgcaccatctgttgcggcggaagagaggtgctgatgtgtggaaataacaactgctgccggtgcttctgcgtggaatgcgtggacctgctggtgggccccggcgccgcccaggccgctattaaggaagatccttggaactgctacatgtgcggccacaagggcacatacggcctgctgagacggagagaggactggcctagcagactgcagatgttcttcgccaataaccacgaccaggagttcgacccccctaaggtgtaccctcccgtccccgccgagaagagaaagcccatccgggtcctgagcctgttcgatggcatcgccaccggtctgctggtgctgaaggacctgggcatccaggtggataggtacattgcctccgaggtgtgcgaggactccatcaccgtgggaatggtgcgtcatcagggcaagatcatgtacgtgggcgacgtgcggagcgtgacacagaagcatatccaggagtggggccctttcgacctggtgatcggcggcagcccttgcaatgacctgagcatcgtgaacccagcccggaagggcctgtacgagggaaccggcagactgttcttcgagttttacagactgctgcacgacgcccggcctaaggaaggcgacgaccggcccttcttttggctgttcgagaatgtggtggccatgggagtcagcgacaagcgggatattagccggttcctggagagcaaccccgtgatgatcgatgccaaggaagtgagcgccgcccaccgggccagatacttctggggcaatctgcctggcatgaacagacccctggccagcaccgtgaacgacaagctggagctgcaggagtgcctggagcacggccggatcgccaagttcagcaaggtgagaaccatcaccacccgaagcaacagcatcaaacaaggcaaggaccagcactttcctgtgttcatgaacgagaaggaggacatcctgtggtgtaccgagatggagagagtgttcgggttcccagtccactacacagatgtcagcaacatgtctagactggccagacagagactgctgggaagaagctggtccgtccctgtgatcagacacctgttcgcccctctgaaggagtacttcgcctgcgtgagcagcggcaacagcaacgccaacagccggggccccagcttctctagcggcctggtgccactgtccctgagagggagccacatgggccccatggagatctacaaaaccgtgagcgcctggaagcggcagcctgtgcgcgtgctgagcctgtttcggaatatcgataaagtcctgaaaagcctgggattcctggagagcggctctggctccggcggtggcaccctgaagtacgtggaggatgtgacaaacgtggtcagacgggatgtggagaagtggggccccttcgatctggtgtacggcagcacccaacccctgggcagctcttgtgaccggtgccctggctggtacatgtttcagttccaccggatcctgcagtacgccctgccgagacaggagtcccagcggccattcttttggattttcatggacaacttgctgctgaccgaggatgaccaggaaactaccactcggttcctgcagaccgaagccgtgaccctgcaggacgtgagaggccgggactaccagaacgccatgcgggtgtggtccaacatccctggactgaaaagcaagcacgcacctctgacccctaaagaagaggagtacctgcaggcccaggtgcggagcagaagcaagctggacgcccctaaggtggatctgctggtgaagaattgcctcctgcccctgagagagtacttcaagtatttcagccagaatagtctgcccctgggaggcagcggcggcggcgccctggtgacatttgaggacgtcgccgtgcggttcacccaggaggaatgggctctgctggatccttctcagaaaatcctgtaccgggacgtgatgagagagacataccggaatctgacctccgtgggcatcaactgggaatgttgggaccttgaagcctgcttcagaagcctgggaagaaacctgagagtgcaggtggtgaagagaaagtgcgagctgaccaacagcggcccctgcgccgagggcggcccaagcagcggcgcccctcctcccagcggcggcagcccagccggctccccaacctctaccgaggagggcacctctgagtccgccacccccgagagcggccctggcacctccaccgagcccagcgagggcagcgcacccggcagccctgccggcagccccacctccacagaggagggaaccagcaccgagcccagcgaaggcagcgccccaggcaccagcaccgagcctagtgagcaggagattaaacggatcaacaagatcagaagaagacttgtgaaagacagcaacaccaagaaggccggcaagacaggccccatgaaaaccctgctggttagagtgatgacacccgatctgagagagcggctggaaaacctgagaaagaagcctgaaaatatcccccagcccatcagcaatacatctagagccaacctgaataagctgctgaccgattacaccgaaatgaagaaggcgatcctgcatgtgtactgggaagagttccagaaggaccctgtgggcctgatgagccgggtggcccagcctgccagcaagaagatcgatcagaacaagctgaaacctgagatggacgagaagggcaacctgaccaccgccggctttgcctgctctcagtgtggccagcccctgttcgtgtacaagctggagcaggtgtctgagaagggcaaggcttacaccaactacttcggacggtgcaatgtggccgagcacgaaaagctgatcctgctggcccagctgaagcccgagaaggatagcgacgaagccgtgacatatagcctgggaaagtttgggcagagggccctggatttctacagcattcatgtgaccaaggagtccacccaccccgtgaagcccctggcccagatcgccggaaacagatacgcctccggacctgtgggaaaggccctgagcgacgcatgtatgggcacaatcgcctccttcctgtctaagtaccaggacatcatcatcgaacaccagaaggtggtgaagggcaaccagaagagactggagagcctgcgggagctggccggcaaggaaaacctggaataccctagcgtgaccctgccacctcagcctcacaccaaggagggcgttgatgcctacaacgaagtgatcgcccgggtgcgaatgtgggtgaacctgaacctgtggcagaagctgaagctaagcagagatgatgccaagcctctgctgagactgaagggattcccttcctttcctctggtcgagagacaggccaacgaagtggactggtgggacatggtgtgtaacgtgaagaagctgatcaacgagaaaaaggaggatggcaaggtgttttggcagaatctggctggctacaagagacaggaagccctgagaccatacctgagcagcgaggaagatcggaagaagggaaagaaattcgctcggtaccagctgggcgacctgctgctgcacctggaaaagaagcacggcgaggactggggaaaggtgtacgacgaggcctgggagcggattgacaagaaagtggaaggcctgagcaagcacatcaagctggaagaggaacggagaagcgaggacgcccagagcaaggccgccctgaccgactggctgcgggctaaggccagcttcgtgatcgagggcctgaaggaggccgacaaggacgagttctgcagatgcgagctgaagctgcagaagtggtacggggacctgcggggaaagcccttcgccatcgaagccgagaacagcatcctggacatcagcggcttcagcaagcagtacaactgtgccttcatctggcagaaggacggcgtgaagaagctgaacctgtacctgatcatcaactacttcaagggcggcaagctgcggttcaagaagatcaaacctgaagccttcgaagccaacagattctacaccgtgatcaacaaaaagagcggcgagatcgtgcccatggaggtgaacttcaacttcgacgaccccaacctgatcatcctgcctctggcctttggcaagagacagggcagagaattcatctggaacgacctgctgtccctggaaaccggcagcctgaagctggccaacggaagagtgatcgagaagacactgtacaacagaagaacccggcaggatgagcctgccctgttcgtggccctgaccttcgagcggcgggaggtcctggactcctccaatatcaaaccaatgaacctgatcggcgtggcaagaggcgaaaacatccccgccgtgatcgccctgaccgaccccgagggctgcccactgagccggtttaaggatagcctgggaaacccaacccacatcctgagaatcggcgagagctataaggagaagcagcggaccatccaggccaagaaggaggtggagcagcggagagccggcggctacagccggaagtacgccagcaaagccaagaatctggcagacgatatggtgagaaacaccgctagagatctgctgtactacgccgtgacccaggatgccatgctgatcttcgccaacctgagccggggcttcggccggcagggcaagcggaccttcatggccgagagacagtacacacggatggaggactggctgaccgccaagctggcctacgagggcctgagcaagacctacctgtccaagacactggcccagtacacctccaagacatgcagcaactgtgggtttaccatcaccagcgccgactacgacagggtgctggagaagctgaagaagacagcaacaggctggatgaccacaattaacggcaaggagctgaaggtggagggccagattacctactacaacagatacaagagacagaacgtagtcaaggacctgtccgtcgagctggatagactgagcgaagaatctgtgaacaacgacatctcctcctggacaaagggcagaagcggagaagctctgagcctcctgaagaaaagattctcccatagacccgtgcaggagaagttcgtgtgcctgaactgcggcttcgagacacacgcagccgagcaagccgccctgaacatcgccagatcctggctgttcctgcggagccaggagtacaagaaataccagacaaacaagacaaccggcaacaccgataagagagccttcgtcgagacctggcagtccttttaccggaagaagcttaaggaggtgtggaaacctgccgtgcggtctggcggatctggcggaggctccagccagggcagcgtgagcttcaaggacgtgaccgtggacttcacccaggaggagtggcagcagctggaccccgcccagaaggccctgtacagggacgtgatgctggagaactactgccacttcgtgagcgtgggcttccacatgaccaagcccgacatgatcaggaagctggagcagggcgaggagctgtggacccagaggatcttccccagctacagctacctggccgaggacggcaagaccggcggcccaagcagcggcgcccctcctcccagcggcggcagcccagccggctccccaacctctaccgaggagggcacctctgagtccgccacccccgagagcggccctggcacctccaccgagcccagcgagggcagcgcacccggcagccctgccggcagccccacctccacagaggagggaaccagcaccgagcccagcgaaggcagcgccccaggcaccagcaccgagcctagtgagcaggagattaaacggatcaacaagatcagaagaagacttgtgaaagacagcaacaccaagaaggccggcaagacaggccccatgaaaaccctgctggttagagtgatgacacccgatctgagagagcggctggaaaacctgagaaagaagcctgaaaatatcccccagcccatcagcaatacatctagagccaacctgaataagctgctgaccgattacaccgaaatgaagaaggcgatcctgcatgtgtactgggaagagttccagaaggaccctgtgggcctgatgagccgggtggcccagcctgccagcaagaagatcgatcagaacaagctgaaacctgagatggacgagaagggcaacctgaccaccgccggctttgcctgctctcagtgtggccagcccctgttcgtgtacaagctggagcaggtgtctgagaagggcaaggcttacaccaactacttcggacggtgcaatgtggccgagcacgaaaagctgatcctgctggcccagctgaagcccgagaaggatagcgacgaagccgtgacatatagcctgggaaagtttgggcagagggccctggatttctacagcattcatgtgaccaaggagtccacccaccccgtgaagcccctggcccagatcgccggaaacagatacgcctccggacctgtgggaaaggccctgagcgacgcatgtatgggcacaatcgcctccttcctgtctaagtaccaggacatcatcatcgaacaccagaaggtggtgaagggcaaccagaagagactggagagcctgcgggagctggccggcaaggaaaacctggaataccctagcgtgaccctgccacctcagcctcacaccaaggagggcgttgatgcctacaacgaagtgatcgcccgggtgcgaatgtgggtgaacctgaacctgtggcagaagctgaagctaagcagagatgatgccaagcctctgctgagactgaagggattcccttcctttcctctggtcgagagacaggccaacgaagtggactggtgggacatggtgtgtaacgtgaagaagctgatcaacgagaaaaaggaggatggcaaggtgttttggcagaatctggctggctacaagagacaggaagccctgagaccatacctgagcagcgaggaagatcggaagaagggaaagaaattcgctcggtaccagctgggcgacctgctgctgcacctggaaaagaagcacggcgaggactggggaaaggtgtacgacgaggcctgggagcggattgacaagaaagtggaaggcctgagcaagcacatcaagctggaagaggaacggagaagcgaggacgcccagagcaaggccgccctgaccgactggctgcgggctaaggccagcttcgtgatcgagggcctgaaggaggccgacaaggacgagttctgcagatgcgagctgaagctgcagaagtggtacggggacctgcggggaaagcccttcgccatcgaagccgagaacagcatcctggacatcagcggcttcagcaagcagtacaactgtgccttcatctggcagaaggacggcgtgaagaagctgaacctgtacctgatcatcaactacttcaagggcggcaagctgcggttcaagaagatcaaacctgaagccttcgaagccaacagattctacaccgtgatcaacaaaaagagcggcgagatcgtgcccatggaggtgaacttcaacttcgacgaccccaacctgatcatcctgcctctggcctttggcaagagacagggcagagaattcatctggaacgacctgctgtccctggaaaccggcagcctgaagctggccaacggaagagtgatcgagaagacactgtacaacagaagaacccggcaggatgagcctgccctgttcgtggccctgaccttcgagcggcgggaggtcctggactcctccaatatcaaaccaatgaacctgatcggcgtggcaagaggcgaaaacatccccgccgtgatcgccctgaccgaccccgagggctgcccactgagccggtttaaggatagcctgggaaacccaacccacatcctgagaatcggcgagagctataaggagaagcagcggaccatccaggccaagaaggaggtggagcagcggagagccggcggctacagccggaagtacgccagcaaagccaagaatctggcagacgatatggtgagaaacaccgctagagatctgctgtactacgccgtgacccaggatgccatgctgatcttcgccaacctgagccggggcttcggccggcagggcaagcggaccttcatggccgagagacagtacacacggatggaggactggctgaccgccaagctggcctacgagggcctgagcaagacctacctgtccaagacactggcccagtacacctccaagacatgcagcaactgtgggtttaccatcaccagcgccgactacgacagggtgctggagaagctgaagaagacagcaacaggctggatgaccacaattaacggcaaggagctgaaggtggagggccagattacctactacaacagatacaagagacagaacgtagtcaaggacctgtccgtcgagctggatagactgagcgaagaatctgtgaacaacgacatctcctcctggacaaagggcagaagcggagaagctctgagcctcctgaagaaaagattctcccatagacccgtgcaggagaagttcgtgtgcctgaactgcggcttcgagacacacgcagccgagcaagccgccctgaacatcgccagatcctggctgttcctgcggagccaggagtacaagaaataccagacaaacaagacaaccggcaacaccgataagagagccttcgtcgagacctggcagtccttttaccggaagaagcttaaggaggtgtggaaacctgccgtgcggtctggcggatctggcggaggctcctagccagggcagcgtgagcttcaaggacgtgaccgtggacttcacccaggaggagtggcagcagctggaccccgcccagaaggccctgtacagggacgtgatgctggagaactactgccacttcgtgagcgtgggcttccacatgaccaagcccgacatgatcaggaagctggagcagggcgaggagctgtggacccagaggatcttccccagctacagctacctggccgaggacggcaagaccggatctggctccggcagcggccccaagaaaaagagaaaagtctaagctgccttctgcggggcttgccttctggccatgcccttcttctctcccttgcacctgtacctcttggtctttgaataaagcctgagtaggaaggctagcaaaaaaaaaaaaaaaaaaaaaaaaaaaaaaaaaaaaaaaaaaaaaaaaaaaaaaaaaaaaaaaaaaaaaaaaaaaaaaaa

SEQ ID NO: 16399 - RNA, 9485 nt, synthetic construct
  source 1..9485: mol_type = other RNA
aggaaataagagagaaaagaagagtaagaagaaatataagagccaccatggcccctaagaagaagcgtaaagtgagccggatggaacgcctcgtctacgaggtgcggcagaagtgcagaaacatcgaggacatctgcatctcctgcggatctctgaacgtgaccctggagcacccactgttcatcggcggcatgtgccagaactgtaaaaactgttttctggagtgtgcctatcaatacgacgatgacggctaccagagctactgcaccatctgttgcggcggaagagaggtgctgatgtgtggaaataacaactgctgccggtgcttctgcgtggaatgcgtggacctgctggtgggccccggcgccgcccaggccgctattaaggaagatccttggaactgctacatgtgcggccacaagggcacatacggcctgctgagacggagagaggactggcctagcagactgcagatgttcttcgccaataaccacgaccaggagttcgacccccctaaggtgtaccctcccgtccccgccgagaagagaaagcccatccgggtcctgagcctgttcgatggcatcgccaccggtctgctggtgctgaaggacctgggcatccaggtggataggtacattgcctccgaggtgtgcgaggactccatcaccgtgggaatggtgcgtcatcagggcaagatcatgtacgtgggcgacgtgcggagcgtgacacagaagcatatccaggagtggggccctttcgacctggtgatcggcggcagcccttgcaatgacctgagcatcgtgaacccagcccggaagggcctgtacgagggaaccggcagactgttcttcgagttttacagactgctgcacgacgcccggcctaaggaaggcgacgaccggcccttcttttggctgttcgagaatgtggtggccatgggagtcagcgacaagcgggatattagccggttcctggagagcaaccccgtgatgatcgatgccaaggaagtgagcgccgcccaccgggccagatacttctggggcaatctgcctggcatgaacagacccctggccagcaccgtgaacgacaagctggagctgcaggagtgcctggagcacggccggatcgccaagttcagcaaggtgagaaccatcaccacccgaagcaacagcatcaaacaaggcaaggaccagcactttcctgtgttcatgaacgagaaggaggacatcctgtggtgtaccgagatggagagagtgttcgggttcccagtccactacacagatgtcagcaacatgtctagactggccagacagagactgctgggaagaagctggtccgtccctgtgatcagacacctgttcgcccctctgaaggagtacttcgcctgcgtgagcagcggcaacagcaacgccaacagccggggccccagcttctctagcggcctggtgccactgtccctgagagggagccacatgggccccatggagatctacaaaaccgtgagcgcctggaagcggcagcctgtgcgcgtgctgagcctgtttcggaatatcgataaagtcctgaaaagcctgggattcctggagagcggctctggctccggcggtggcaccctgaagtacgtggaggatgtgacaaacgtggtcagacgggatgtggagaagtggggccccttcgatctggtgtacggcagcacccaacccctgggcagctcttgtgaccggtgccctggctggtacatgtttcagttccaccggatcctgcagtacgccctgccgagacaggagtcccagcggccattcttttggattttcatggacaacttgctgctgaccgaggatgaccaggaaactaccactcggttcctgcagaccgaagccgtgaccctgcaggacgtgagaggccgggactaccagaacgccatgcgggtgtggtccaacatccctggactgaaaagcaagcacgcacctctgacccctaaagaagaggagtacctgcaggcccaggtgcggagcagaagcaagctggacgcccctaaggtggatctgctggtgaagaattgcctcctgcccctgagagagtacttcaagtatttcagccagaatagtctgcccctgggaggcagcggcggcggcgccctggtgacatttgaggacgtcgccgtgcggttcacccaggaggaatgggctctgctggatccttctcagaaaatcctgtaccgggacgtgatgagagagacataccggaatctgacctccgtgggcatcaactgggaatgttgggaccttgaagcctgcttcagaagcctgggaagaaacctgagagtgcaggtggtgaagagaaagtgcgagctgaccaacagcggcccctgcgccgagggcggcccaagcagcggcgcccctcctcccagcggcggcagcccagccggctccccaacctctaccgaggagggcacctctgagtccgccacccccgagagcggccctggcacctccaccgagcccagcgagggcagcgcacccggcagccctgccggcagccccacctccacagaggagggaaccagcaccgagcccagcgaaggcagcgccccaggcaccagcaccgagcctagtgagcaggagattaaacggatcaacaagatcagaagaagacttgtgaaagacagcaacaccaagaaggccggcaagacaggccccatgaaaaccctgctggttagagtgatgacacccgatctgagagagcggctggaaaacctgagaaagaagcctgaaaatatcccccagcccatcagcaatacatctagagccaacctgaataagctgctgaccgattacaccgaaatgaagaaggcgatcctgcatgtgtactgggaagagttccagaaggaccctgtgggcctgatgagccgggtggcccagcctgccagcaagaagatcgatcagaacaagctgaaacctgagatggacgagaagggcaacctgaccaccgccggctttgcctgctctcagtgtggccagcccctgttcgtgtacaagctggagcaggtgtctgagaagggcaaggcttacaccaactacttcggacggtgcaatgtggccgagcacgaaaagctgatcctgctggcccagctgaagcccgagaaggatagcgacgaagccgtgacatatagcctgggaaagtttgggcagagggccctggatttctacagcattcatgtgaccaaggagtccacccaccccgtgaagcccctggcccagatcgccggaaacagatacgcctccggacctgtgggaaaggccctgagcgacgcatgtatgggcacaatcgcctccttcctgtctaagtaccaggacatcatcatcgaacaccagaaggtggtgaagggcaaccagaagagactggagagcctgcgggagctggccggcaaggaaaacctggaataccctagcgtgaccctgccacctcagcctcacaccaaggagggcgttgatgcctacaacgaagtgatcgcccgggtgcgaatgtgggtgaacctgaacctgtggcagaagctgaagctaagcagagatgatgccaagcctctgctgagactgaagggattcccttcctttcctctggtcgagagacaggccaacgaagtggactggtgggacatggtgtgtaacgtgaagaagctgatcaacgagaaaaaggaggatggcaaggtgttttggcagaatctggctggctacaagagacaggaagccctgagaccatacctgagcagcgaggaagatcggaagaagggaaagaaattcgctcggtaccagctgggcgacctgctgctgcacctggaaaagaagcacggcgaggactggggaaaggtgtacgacgaggcctgggagcggattgacaagaaagtggaaggcctgagcaagcacatcaagctggaagaggaacggagaagcgaggacgcccagagcaaggccgccctgaccgactggctgcgggctaaggccagcttcgtgatcgagggcctgaaggaggccgacaaggacgagttctgcagatgcgagctgaagctgcagaagtggtacggggacctgcggggaaagcccttcgccatcgaagccgagaacagcatcctggacatcagcggcttcagcaagcagtacaactgtgccttcatctggcagaaggacggcgtgaagaagctgaacctgtacctgatcatcaactacttcaagggcggcaagctgcggttcaagaagatcaaacctgaagccttcgaagccaacagattctacaccgtgatcaacaaaaagagcggcgagatcgtgcccatggaggtgaacttcaacttcgacgaccccaacctgatcatcctgcctctggcctttggcaagagacagggcagagaattcatctggaacgacctgctgtccctggaaaccggcagcctgaagctggccaacggaagagtgatcgagaagacactgtacaacagaagaacccggcaggatgagcctgccctgttcgtggccctgaccttcgagcggcgggaggtcctggactcctccaatatcaaaccaatgaacctgatcggcgtggcaagaggcgaaaacatccccgccgtgatcgccctgaccgaccccgagggctgcccactgagccggtttaaggatagcctgggaaacccaacccacatcctgagaatcggcgagagctataaggagaagcagcggaccatccaggccaagaaggaggtggagcagcggagagccggcggctacagccggaagtacgccagcaaagccaagaatctggcagacgatatggtgagaaacaccgctagagatctgctgtactacgccgtgacccaggatgccatgctgatcttcgccaacctgagccggggcttcggccggcagggcaagcggaccttcatggccgagagacagtacacacggatggaggactggctgaccgccaagctggcctacgagggcctgagcaagacctacctgtccaagacactggcccagtacacctccaagacatgcagcaactgtgggtttaccatcaccagcgccgactacgacagggtgctggagaagctgaagaagacagcaacaggctggatgaccacaattaacggcaaggagctgaaggtggagggccagattacctactacaacagatacaagagacagaacgtagtcaaggacctgtccgtcgagctggatagactgagcgaagaatctgtgaacaacgacatctcctcctggacaaagggcagaagcggagaagctctgagcctcctgaagaaaagattctcccatagacccgtgcaggagaagttcgtgtgcctgaactgcggcttcgagacacacgcagccgagcaagccgccctgaacatcgccagatcctggctgttcctgcggagccaggagtacaagaaataccagacaaacaagacaaccggcaacaccgataagagagccttcgtcgagacctggcagtccttttaccggaagaagcttaaggaggtgtggaaacctgccgtgcggtctggcggatctggcggaggctccaccctgctgaccttcagggacgtggccatcgagttcagcctggaggagtggaagtgcctggaccccgcccagcagaacctgtacagggacgtgatgctggagaactacaggaacctgttcagcatcggcctgaccgtgagcaagcccggcctgatcacctgcctggagcagaggaaggagccctggaacgtgaagaggcaggaggccgtggacggccaccccgccatgagcagccacgtgaccggcggcccaagcagcggcgcccctcctcccagcggcggcagcccagccggctccccaacctctaccgaggagggcacctctgagtccgccacccccgagagcggccctggcacctccaccgagcccagcgagggcagcgcacccggcagccctgccggcagccccacctccacagaggagggaaccagcaccgagcccagcgaaggcagcgccccaggcaccagcaccgagcctagtgagcaggagattaaacggatcaacaagatcagaagaagacttgtgaaagacagcaacaccaagaaggccggcaagacaggccccatgaaaaccctgctggttagagtgatgacacccgatctgagagagcggctggaaaacctgagaaagaagcctgaaaatatcccccagcccatcagcaatacatctagagccaacctgaataagctgctgaccgattacaccgaaatgaagaaggcgatcctgcatgtgtactgggaagagttccagaaggaccctgtgggcctgatgagccgggtggcccagcctgccagcaagaagatcgatcagaacaagctgaaacctgagatggacgagaagggcaacctgaccaccgccggctttgcctgctctcagtgtggccagcccctgttcgtgtacaagctggagcaggtgtctgagaagggcaaggcttacaccaactacttcggacggtgcaatgtggccgagcacgaaaagctgatcctgctggcccagctgaagcccgagaaggatagcgacgaagccgtgacatatagcctgggaaagtttgggcagagggccctggatttctacagcattcatgtgaccaaggagtccacccaccccgtgaagcccctggcccagatcgccggaaacagatacgcctccggacctgtgggaaaggccctgagcgacgcatgtatgggcacaatcgcctccttcctgtctaagtaccaggacatcatcatcgaacaccagaaggtggtgaagggcaaccagaagagactggagagcctgcgggagctggccggcaaggaaaacctggaataccctagcgtgaccctgccacctcagcctcacaccaaggagggcgttgatgcctacaacgaagtgatcgcccgggtgcgaatgtgggtgaacctgaacctgtggcagaagctgaagctaagcagagatgatgccaagcctctgctgagactgaagggattcccttcctttcctctggtcgagagacaggccaacgaagtggactggtgggacatggtgtgtaacgtgaagaagctgatcaacgagaaaaaggaggatggcaaggtgttttggcagaatctggctggctacaagagacaggaagccctgagaccatacctgagcagcgaggaagatcggaagaagggaaagaaattcgctcggtaccagctgggcgacctgctgctgcacctggaaaagaagcacggcgaggactggggaaaggtgtacgacgaggcctgggagcggattgacaagaaagtggaaggcctgagcaagcacatcaagctggaagaggaacggagaagcgaggacgcccagagcaaggccgccctgaccgactggctgcgggctaaggccagcttcgtgatcgagggcctgaaggaggccgacaaggacgagttctgcagatgcgagctgaagctgcagaagtggtacggggacctgcggggaaagcccttcgccatcgaagccgagaacagcatcctggacatcagcggcttcagcaagcagtacaactgtgccttcatctggcagaaggacggcgtgaagaagctgaacctgtacctgatcatcaactacttcaagggcggcaagctgcggttcaagaagatcaaacctgaagccttcgaagccaacagattctacaccgtgatcaacaaaaagagcggcgagatcgtgcccatggaggtgaacttcaacttcgacgaccccaacctgatcatcctgcctctggcctttggcaagagacagggcagagaattcatctggaacgacctgctgtccctggaaaccggcagcctgaagctggccaacggaagagtgatcgagaagacactgtacaacagaagaacccggcaggatgagcctgccctgttcgtggccctgaccttcgagcggcgggaggtcctggactcctccaatatcaaaccaatgaacctgatcggcgtggcaagaggcgaaaacatccccgccgtgatcgccctgaccgaccccgagggctgcccactgagccggtttaaggatagcctgggaaacccaacccacatcctgagaatcggcgagagctataaggagaagcagcggaccatccaggccaagaaggaggtggagcagcggagagccggcggctacagccggaagtacgccagcaaagccaagaatctggcagacgatatggtgagaaacaccgctagagatctgctgtactacgccgtgacccaggatgccatgctgatcttcgccaacctgagccggggcttcggccggcagggcaagcggaccttcatggccgagagacagtacacacggatggaggactggctgaccgccaagctggcctacgagggcctgagcaagacctacctgtccaagacactggcccagtacacctccaagacatgcagcaactgtgggtttaccatcaccagcgccgactacgacagggtgctggagaagctgaagaagacagcaacaggctggatgaccacaattaacggcaaggagctgaaggtggagggccagattacctactacaacagatacaagagacagaacgtagtcaaggacctgtccgtcgagctggatagactgagcgaagaatctgtgaacaacgacatctcctcctggacaaagggcagaagcggagaagctctgagcctcctgaagaaaagattctcccatagacccgtgcaggagaagttcgtgtgcctgaactgcggcttcgagacacacgcagccgagcaagccgccctgaacatcgccagatcctggctgttcctgcggagccaggagtacaagaaataccagacaaacaagacaaccggcaacaccgataagagagccttcgtcgagacctggcagtccttttaccggaagaagcttaaggaggtgtggaaacctgccgtgcggtctggcggatctggcggaggctcctaccctgctgaccttcagggacgtggccatcgagttcagcctggaggagtggaagtgcctggaccccgcccagcagaacctgtacagggacgtgatgctggagaactacaggaacctgttcagcatcggcctgaccgtgagcaagcccggcctgatcacctgcctggagcagaggaaggagccctggaacgtgaagaggcaggaggccgtggacggccaccccgccatgagcagccacgtgaccggatctggctccggcagcggccccaagaaaaagagaaaagtctaagctgccttctgcggggcttgccttctggccatgcccttcttctctcccttgcacctgtacctcttggtctttgaataaagcctgagtaggaaggctagcaaaaaaaaaaaaaaaaaaaaaaaaaaaaaaaaaaaaaaaaaaaaaaaaaaaaaaaaaaaaaaaaaaaaaaaaaaaaaaaa

SEQ ID NO: 16400 - RNA, 9485 nt, synthetic construct
  source 1..9485: mol_type = other RNA
aggaaataagagagaaaagaagagtaagaagaaatataagagccaccatggcccctaagaagaagcgtaaagtgagccggatggaacgcctcgtctacgaggtgcggcagaagtgcagaaacatcgaggacatctgcatctcctgcggatctctgaacgtgaccctggagcacccactgttcatcggcggcatgtgccagaactgtaaaaactgttttctggagtgtgcctatcaatacgacgatgacggctaccagagctactgcaccatctgttgcggcggaagagaggtgctgatgtgtggaaataacaactgctgccggtgcttctgcgtggaatgcgtggacctgctggtgggccccggcgccgcccaggccgctattaaggaagatccttggaactgctacatgtgcggccacaagggcacatacggcctgctgagacggagagaggactggcctagcagactgcagatgttcttcgccaataaccacgaccaggagttcgacccccctaaggtgtaccctcccgtccccgccgagaagagaaagcccatccgggtcctgagcctgttcgatggcatcgccaccggtctgctggtgctgaaggacctgggcatccaggtggataggtacattgcctccgaggtgtgcgaggactccatcaccgtgggaatggtgcgtcatcagggcaagatcatgtacgtgggcgacgtgcggagcgtgacacagaagcatatccaggagtggggccctttcgacctggtgatcggcggcagcccttgcaatgacctgagcatcgtgaacccagcccggaagggcctgtacgagggaaccggcagactgttcttcgagttttacagactgctgcacgacgcccggcctaaggaaggcgacgaccggcccttcttttggctgttcgagaatgtggtggccatgggagtcagcgacaagcgggatattagccggttcctggagagcaaccccgtgatgatcgatgccaaggaagtgagcgccgcccaccgggccagatacttctggggcaatctgcctggcatgaacagacccctggccagcaccgtgaacgacaagctggagctgcaggagtgcctggagcacggccggatcgccaagttcagcaaggtgagaaccatcaccacccgaagcaacagcatcaaacaaggcaaggaccagcactttcctgtgttcatgaacgagaaggaggacatcctgtggtgtaccgagatggagagagtgttcgggttcccagtccactacacagatgtcagcaacatgtctagactggccagacagagactgctgggaagaagctggtccgtccctgtgatcagacacctgttcgcccctctgaaggagtacttcgcctgcgtgagcagcggcaacagcaacgccaacagccggggccccagcttctctagcggcctggtgccactgtccctgagagggagccacatgggccccatggagatctacaaaaccgtgagcgcctggaagcggcagcctgtgcgcgtgctgagcctgtttcggaatatcgataaagtcctgaaaagcctgggattcctggagagcggctctggctccggcggtggcaccctgaagtacgtggaggatgtgacaaacgtggtcagacgggatgtggagaagtggggccccttcgatctggtgtacggcagcacccaacccctgggcagctcttgtgaccggtgccctggctggtacatgtttcagttccaccggatcctgcagtacgccctgccgagacaggagtcccagcggccattcttttggattttcatggacaacttgctgctgaccgaggatgaccaggaaactaccactcggttcctgcagaccgaagccgtgaccctgcaggacgtgagaggccgggactaccagaacgccatgcgggtgtggtccaacatccctggactgaaaagcaagcacgcacctctgacccctaaagaagaggagtacctgcaggcccaggtgcggagcagaagcaagctggacgcccctaaggtggatctgctggtgaagaattgcctcctgcccctgagagagtacttcaagtatttcagccagaatagtctgcccctgggaggcagcggcggcggcgccctggtgacatttgaggacgtcgccgtgcggttcacccaggaggaatgggctctgctggatccttctcagaaaatcctgtaccgggacgtgatgagagagacataccggaatctgacctccgtgggcatcaactgggaatgttgggaccttgaagcctgcttcagaagcctgggaagaaacctgagagtgcaggtggtgaagagaaagtgcgagctgaccaacagcggcccctgcgccgagggcggcccaagcagcggcgcccctcctcccagcggcggcagcccagccggctccccaacctctaccgaggagggcacctctgagtccgccacccccgagagcggccctggcacctccaccgagcccagcgagggcagcgcacccggcagccctgccggcagccccacctccacagaggagggaaccagcaccgagcccagcgaaggcagcgccccaggcaccagcaccgagcctagtgagcaggagattaaacggatcaacaagatcagaagaagacttgtgaaagacagcaacaccaagaaggccggcaagacaggccccatgaaaaccctgctggttagagtgatgacacccgatctgagagagcggctggaaaacctgagaaagaagcctgaaaatatcccccagcccatcagcaatacatctagagccaacctgaataagctgctgaccgattacaccgaaatgaagaaggcgatcctgcatgtgtactgggaagagttccagaaggaccctgtgggcctgatgagccgggtggcccagcctgccagcaagaagatcgatcagaacaagctgaaacctgagatggacgagaagggcaacctgaccaccgccggctttgcctgctctcagtgtggccagcccctgttcgtgtacaagctggagcaggtgtctgagaagggcaaggcttacaccaactacttcggacggtgcaatgtggccgagcacgaaaagctgatcctgctggcccagctgaagcccgagaaggatagcgacgaagccgtgacatatagcctgggaaagtttgggcagagggccctggatttctacagcattcatgtgaccaaggagtccacccaccccgtgaagcccctggcccagatcgccggaaacagatacgcctccggacctgtgggaaaggccctgagcgacgcatgtatgggcacaatcgcctccttcctgtctaagtaccaggacatcatcatcgaacaccagaaggtggtgaagggcaaccagaagagactggagagcctgcgggagctggccggcaaggaaaacctggaataccctagcgtgaccctgccacctcagcctcacaccaaggagggcgttgatgcctacaacgaagtgatcgcccgggtgcgaatgtgggtgaacctgaacctgtggcagaagctgaagctaagcagagatgatgccaagcctctgctgagactgaagggattcccttcctttcctctggtcgagagacaggccaacgaagtggactggtgggacatggtgtgtaacgtgaagaagctgatcaacgagaaaaaggaggatggcaaggtgttttggcagaatctggctggctacaagagacaggaagccctgagaccatacctgagcagcgaggaagatcggaagaagggaaagaaattcgctcggtaccagctgggcgacctgctgctgcacctggaaaagaagcacggcgaggactggggaaaggtgtacgacgaggcctgggagcggattgacaagaaagtggaaggcctgagcaagcacatcaagctggaagaggaacggagaagcgaggacgcccagagcaaggccgccctgaccgactggctgcgggctaaggccagcttcgtgatcgagggcctgaaggaggccgacaaggacgagttctgcagatgcgagctgaagctgcagaagtggtacggggacctgcggggaaagcccttcgccatcgaagccgagaacagcatcctggacatcagcggcttcagcaagcagtacaactgtgccttcatctggcagaaggacggcgtgaagaagctgaacctgtacctgatcatcaactacttcaagggcggcaagctgcggttcaagaagatcaaacctgaagccttcgaagccaacagattctacaccgtgatcaacaaaaagagcggcgagatcgtgcccatggaggtgaacttcaacttcgacgaccccaacctgatcatcctgcctctggcctttggcaagagacagggcagagaattcatctggaacgacctgctgtccctggaaaccggcagcctgaagctggccaacggaagagtgatcgagaagacactgtacaacagaagaacccggcaggatgagcctgccctgttcgtggccctgaccttcgagcggcgggaggtcctggactcctccaatatcaaaccaatgaacctgatcggcgtggcaagaggcgaaaacatccccgccgtgatcgccctgaccgaccccgagggctgcccactgagccggtttaaggatagcctgggaaacccaacccacatcctgagaatcggcgagagctataaggagaagcagcggaccatccaggccaagaaggaggtggagcagcggagagccggcggctacagccggaagtacgccagcaaagccaagaatctggcagacgatatggtgagaaacaccgctagagatctgctgtactacgccgtgacccaggatgccatgctgatcttcgccaacctgagccggggcttcggccggcagggcaagcggaccttcatggccgagagacagtacacacggatggaggactggctgaccgccaagctggcctacgagggcctgagcaagacctacctgtccaagacactggcccagtacacctccaagacatgcagcaactgtgggtttaccatcaccagcgccgactacgacagggtgctggagaagctgaagaagacagcaacaggctggatgaccacaattaacggcaaggagctgaaggtggagggccagattacctactacaacagatacaagagacagaacgtagtcaaggacctgtccgtcgagctggatagactgagcgaagaatctgtgaacaacgacatctcctcctggacaaagggcagaagcggagaagctctgagcctcctgaagaaaagattctcccatagacccgtgcaggagaagttcgtgtgcctgaactgcggcttcgagacacacgcagccgagcaagccgccctgaacatcgccagatcctggctgttcctgcggagccaggagtacaagaaataccagacaaacaagacaaccggcaacaccgataagagagccttcgtcgagacctggcagtccttttaccggaagaagcttaaggaggtgtggaaacctgccgtgcggtctggcggatctggcggaggctccctgcagggcagcctgagcttcgaggacgtgaccgtgggcttcagccaggaggagtggcagaggctggaccccgcccagaggaccctgtacagggacgtgatgctggagaactacagccacctggtggccgtgggctgctgcgtgcccaagcccgacgtgatcttcaggctggagcagggccagcagccctggctggtggaggaggagagcctggaccagagctgccccgaggtgtgcagggtgggcggcccaagcagcggcgcccctcctcccagcggcggcagcccagccggctccccaacctctaccgaggagggcacctctgagtccgccacccccgagagcggccctggcacctccaccgagcccagcgagggcagcgcacccggcagccctgccggcagccccacctccacagaggagggaaccagcaccgagcccagcgaaggcagcgccccaggcaccagcaccgagcctagtgagcaggagattaaacggatcaacaagatcagaagaagacttgtgaaagacagcaacaccaagaaggccggcaagacaggccccatgaaaaccctgctggttagagtgatgacacccgatctgagagagcggctggaaaacctgagaaagaagcctgaaaatatcccccagcccatcagcaatacatctagagccaacctgaataagctgctgaccgattacaccgaaatgaagaaggcgatcctgcatgtgtactgggaagagttccagaaggaccctgtgggcctgatgagccgggtggcccagcctgccagcaagaagatcgatcagaacaagctgaaacctgagatggacgagaagggcaacctgaccaccgccggctttgcctgctctcagtgtggccagcccctgttcgtgtacaagctggagcaggtgtctgagaagggcaaggcttacaccaactacttcggacggtgcaatgtggccgagcacgaaaagctgatcctgctggcccagctgaagcccgagaaggatagcgacgaagccgtgacatatagcctgggaaagtttgggcagagggccctggatttctacagcattcatgtgaccaaggagtccacccaccccgtgaagcccctggcccagatcgccggaaacagatacgcctccggacctgtgggaaaggccctgagcgacgcatgtatgggcacaatcgcctccttcctgtctaagtaccaggacatcatcatcgaacaccagaaggtggtgaagggcaaccagaagagactggagagcctgcgggagctggccggcaaggaaaacctggaataccctagcgtgaccctgccacctcagcctcacaccaaggagggcgttgatgcctacaacgaagtgatcgcccgggtgcgaatgtgggtgaacctgaacctgtggcagaagctgaagctaagcagagatgatgccaagcctctgctgagactgaagggattcccttcctttcctctggtcgagagacaggccaacgaagtggactggtgggacatggtgtgtaacgtgaagaagctgatcaacgagaaaaaggaggatggcaaggtgttttggcagaatctggctggctacaagagacaggaagccctgagaccatacctgagcagcgaggaagatcggaagaagggaaagaaattcgctcggtaccagctgggcgacctgctgctgcacctggaaaagaagcacggcgaggactggggaaaggtgtacgacgaggcctgggagcggattgacaagaaagtggaaggcctgagcaagcacatcaagctggaagaggaacggagaagcgaggacgcccagagcaaggccgccctgaccgactggctgcgggctaaggccagcttcgtgatcgagggcctgaaggaggccgacaaggacgagttctgcagatgcgagctgaagctgcagaagtggtacggggacctgcggggaaagcccttcgccatcgaagccgagaacagcatcctggacatcagcggcttcagcaagcagtacaactgtgccttcatctggcagaaggacggcgtgaagaagctgaacctgtacctgatcatcaactacttcaagggcggcaagctgcggttcaagaagatcaaacctgaagccttcgaagccaacagattctacaccgtgatcaacaaaaagagcggcgagatcgtgcccatggaggtgaacttcaacttcgacgaccccaacctgatcatcctgcctctggcctttggcaagagacagggcagagaattcatctggaacgacctgctgtccctggaaaccggcagcctgaagctggccaacggaagagtgatcgagaagacactgtacaacagaagaacccggcaggatgagcctgccctgttcgtggccctgaccttcgagcggcgggaggtcctggactcctccaatatcaaaccaatgaacctgatcggcgtggcaagaggcgaaaacatccccgccgtgatcgccctgaccgaccccgagggctgcccactgagccggtttaaggatagcctgggaaacccaacccacatcctgagaatcggcgagagctataaggagaagcagcggaccatccaggccaagaaggaggtggagcagcggagagccggcggctacagccggaagtacgccagcaaagccaagaatctggcagacgatatggtgagaaacaccgctagagatctgctgtactacgccgtgacccaggatgccatgctgatcttcgccaacctgagccggggcttcggccggcagggcaagcggaccttcatggccgagagacagtacacacggatggaggactggctgaccgccaagctggcctacgagggcctgagcaagacctacctgtccaagacactggcccagtacacctccaagacatgcagcaactgtgggtttaccatcaccagcgccgactacgacagggtgctggagaagctgaagaagacagcaacaggctggatgaccacaattaacggcaaggagctgaaggtggagggccagattacctactacaacagatacaagagacagaacgtagtcaaggacctgtccgtcgagctggatagactgagcgaagaatctgtgaacaacgacatctcctcctggacaaagggcagaagcggagaagctctgagcctcctgaagaaaagattctcccatagacccgtgcaggagaagttcgtgtgcctgaactgcggcttcgagacacacgcagccgagcaagccgccctgaacatcgccagatcctggctgttcctgcggagccaggagtacaagaaataccagacaaacaagacaaccggcaacaccgataagagagccttcgtcgagacctggcagtccttttaccggaagaagcttaaggaggtgtggaaacctgccgtgcggtctggcggatctggcggaggctcctctgcagggcagcctgagcttcgaggacgtgaccgtgggcttcagccaggaggagtggcagaggctggaccccgcccagaggaccctgtacagggacgtgatgctggagaactacagccacctggtggccgtgggctgctgcgtgcccaagcccgacgtgatcttcaggctggagcagggccagcagccctggctggtggaggaggagagcctggaccagagctgccccgaggtgtgcagggtgggatctggctccggcagcggccccaagaaaaagagaaaagtctaagctgccttctgcggggcttgccttctggccatgcccttcttctctcccttgcacctgtacctcttggtctttgaataaagcctgagtaggaaggctagcaaaaaaaaaaaaaaaaaaaaaaaaaaaaaaaaaaaaaaaaaaaaaaaaaaaaaaaaaaaaaaaaaaaaaaaaaaaaaaaa

SEQ ID NO: 16401 - RNA, 9485 nt, synthetic construct
  source 1..9485: mol_type = other RNA
aggaaataagagagaaaagaagagtaagaagaaatataagagccaccatggcccctaagaagaagcgtaaagtgagccggatggaacgcctcgtctacgaggtgcggcagaagtgcagaaacatcgaggacatctgcatctcctgcggatctctgaacgtgaccctggagcacccactgttcatcggcggcatgtgccagaactgtaaaaactgttttctggagtgtgcctatcaatacgacgatgacggctaccagagctactgcaccatctgttgcggcggaagagaggtgctgatgtgtggaaataacaactgctgccggtgcttctgcgtggaatgcgtggacctgctggtgggccccggcgccgcccaggccgctattaaggaagatccttggaactgctacatgtgcggccacaagggcacatacggcctgctgagacggagagaggactggcctagcagactgcagatgttcttcgccaataaccacgaccaggagttcgacccccctaaggtgtaccctcccgtccccgccgagaagagaaagcccatccgggtcctgagcctgttcgatggcatcgccaccggtctgctggtgctgaaggacctgggcatccaggtggataggtacattgcctccgaggtgtgcgaggactccatcaccgtgggaatggtgcgtcatcagggcaagatcatgtacgtgggcgacgtgcggagcgtgacacagaagcatatccaggagtggggccctttcgacctggtgatcggcggcagcccttgcaatgacctgagcatcgtgaacccagcccggaagggcctgtacgagggaaccggcagactgttcttcgagttttacagactgctgcacgacgcccggcctaaggaaggcgacgaccggcccttcttttggctgttcgagaatgtggtggccatgggagtcagcgacaagcgggatattagccggttcctggagagcaaccccgtgatgatcgatgccaaggaagtgagcgccgcccaccgggccagatacttctggggcaatctgcctggcatgaacagacccctggccagcaccgtgaacgacaagctggagctgcaggagtgcctggagcacggccggatcgccaagttcagcaaggtgagaaccatcaccacccgaagcaacagcatcaaacaaggcaaggaccagcactttcctgtgttcatgaacgagaaggaggacatcctgtggtgtaccgagatggagagagtgttcgggttcccagtccactacacagatgtcagcaacatgtctagactggccagacagagactgctgggaagaagctggtccgtccctgtgatcagacacctgttcgcccctctgaaggagtacttcgcctgcgtgagcagcggcaacagcaacgccaacagccggggccccagcttctctagcggcctggtgccactgtccctgagagggagccacatgggccccatggagatctacaaaaccgtgagcgcctggaagcggcagcctgtgcgcgtgctgagcctgtttcggaatatcgataaagtcctgaaaagcctgggattcctggagagcggctctggctccggcggtggcaccctgaagtacgtggaggatgtgacaaacgtggtcagacgggatgtggagaagtggggccccttcgatctggtgtacggcagcacccaacccctgggcagctcttgtgaccggtgccctggctggtacatgtttcagttccaccggatcctgcagtacgccctgccgagacaggagtcccagcggccattcttttggattttcatggacaacttgctgctgaccgaggatgaccaggaaactaccactcggttcctgcagaccgaagccgtgaccctgcaggacgtgagaggccgggactaccagaacgccatgcgggtgtggtccaacatccctggactgaaaagcaagcacgcacctctgacccctaaagaagaggagtacctgcaggcccaggtgcggagcagaagcaagctggacgcccctaaggtggatctgctggtgaagaattgcctcctgcccctgagagagtacttcaagtatttcagccagaatagtctgcccctgggaggcagcggcggcggcgccctggtgacatttgaggacgtcgccgtgcggttcacccaggaggaatgggctctgctggatccttctcagaaaatcctgtaccgggacgtgatgagagagacataccggaatctgacctccgtgggcatcaactgggaatgttgggaccttgaagcctgcttcagaagcctgggaagaaacctgagagtgcaggtggtgaagagaaagtgcgagctgaccaacagcggcccctgcgccgagggcggcccaagcagcggcgcccctcctcccagcggcggcagcccagccggctccccaacctctaccgaggagggcacctctgagtccgccacccccgagagcggccctggcacctccaccgagcccagcgagggcagcgcacccggcagccctgccggcagccccacctccacagaggagggaaccagcaccgagcccagcgaaggcagcgccccaggcaccagcaccgagcctagtgagcaggagattaaacggatcaacaagatcagaagaagacttgtgaaagacagcaacaccaagaaggccggcaagacaggccccatgaaaaccctgctggttagagtgatgacacccgatctgagagagcggctggaaaacctgagaaagaagcctgaaaatatcccccagcccatcagcaatacatctagagccaacctgaataagctgctgaccgattacaccgaaatgaagaaggcgatcctgcatgtgtactgggaagagttccagaaggaccctgtgggcctgatgagccgggtggcccagcctgccagcaagaagatcgatcagaacaagctgaaacctgagatggacgagaagggcaacctgaccaccgccggctttgcctgctctcagtgtggccagcccctgttcgtgtacaagctggagcaggtgtctgagaagggcaaggcttacaccaactacttcggacggtgcaatgtggccgagcacgaaaagctgatcctgctggcccagctgaagcccgagaaggatagcgacgaagccgtgacatatagcctgggaaagtttgggcagagggccctggatttctacagcattcatgtgaccaaggagtccacccaccccgtgaagcccctggcccagatcgccggaaacagatacgcctccggacctgtgggaaaggccctgagcgacgcatgtatgggcacaatcgcctccttcctgtctaagtaccaggacatcatcatcgaacaccagaaggtggtgaagggcaaccagaagagactggagagcctgcgggagctggccggcaaggaaaacctggaataccctagcgtgaccctgccacctcagcctcacaccaaggagggcgttgatgcctacaacgaagtgatcgcccgggtgcgaatgtgggtgaacctgaacctgtggcagaagctgaagctaagcagagatgatgccaagcctctgctgagactgaagggattcccttcctttcctctggtcgagagacaggccaacgaagtggactggtgggacatggtgtgtaacgtgaagaagctgatcaacgagaaaaaggaggatggcaaggtgttttggcagaatctggctggctacaagagacaggaagccctgagaccatacctgagcagcgaggaagatcggaagaagggaaagaaattcgctcggtaccagctgggcgacctgctgctgcacctggaaaagaagcacggcgaggactggggaaaggtgtacgacgaggcctgggagcggattgacaagaaagtggaaggcctgagcaagcacatcaagctggaagaggaacggagaagcgaggacgcccagagcaaggccgccctgaccgactggctgcgggctaaggccagcttcgtgatcgagggcctgaaggaggccgacaaggacgagttctgcagatgcgagctgaagctgcagaagtggtacggggacctgcggggaaagcccttcgccatcgaagccgagaacagcatcctggacatcagcggcttcagcaagcagtacaactgtgccttcatctggcagaaggacggcgtgaagaagctgaacctgtacctgatcatcaactacttcaagggcggcaagctgcggttcaagaagatcaaacctgaagccttcgaagccaacagattctacaccgtgatcaacaaaaagagcggcgagatcgtgcccatggaggtgaacttcaacttcgacgaccccaacctgatcatcctgcctctggcctttggcaagagacagggcagagaattcatctggaacgacctgctgtccctggaaaccggcagcctgaagctggccaacggaagagtgatcgagaagacactgtacaacagaagaacccggcaggatgagcctgccctgttcgtggccctgaccttcgagcggcgggaggtcctggactcctccaatatcaaaccaatgaacctgatcggcgtggcaagaggcgaaaacatccccgccgtgatcgccctgaccgaccccgagggctgcccactgagccggtttaaggatagcctgggaaacccaacccacatcctgagaatcggcgagagctataaggagaagcagcggaccatccaggccaagaaggaggtggagcagcggagagccggcggctacagccggaagtacgccagcaaagccaagaatctggcagacgatatggtgagaaacaccgctagagatctgctgtactacgccgtgacccaggatgccatgctgatcttcgccaacctgagccggggcttcggccggcagggcaagcggaccttcatggccgagagacagtacacacggatggaggactggctgaccgccaagctggcctacgagggcctgagcaagacctacctgtccaagacactggcccagtacacctccaagacatgcagcaactgtgggtttaccatcaccagcgccgactacgacagggtgctggagaagctgaagaagacagcaacaggctggatgaccacaattaacggcaaggagctgaaggtggagggccagattacctactacaacagatacaagagacagaacgtagtcaaggacctgtccgtcgagctggatagactgagcgaagaatctgtgaacaacgacatctcctcctggacaaagggcagaagcggagaagctctgagcctcctgaagaaaagattctcccatagacccgtgcaggagaagttcgtgtgcctgaactgcggcttcgagacacacgcagccgagcaagccgccctgaacatcgccagatcctggctgttcctgcggagccaggagtacaagaaataccagacaaacaagacaaccggcaacaccgataagagagccttcgtcgagacctggcagtccttttaccggaagaagcttaaggaggtgtggaaacctgccgtgcggtctggcggatctggcggaggctccatggacatggcccaggagcccgtgaccttcagggacgtggccatctacttcagcagggaggagtgggcctgcctggagcccagccagaggaccctgtacagggacgtgatgctggacaacttcagcagcgtggccgccctgggcttctgcagccccaggcccgacctggtgagcaggctggagcagtgggaggagccctgggtggaggacagggagaggcccgagctgcaggccgtgaggaggggcggcccaagcagcggcgcccctcctcccagcggcggcagcccagccggctccccaacctctaccgaggagggcacctctgagtccgccacccccgagagcggccctggcacctccaccgagcccagcgagggcagcgcacccggcagccctgccggcagccccacctccacagaggagggaaccagcaccgagcccagcgaaggcagcgccccaggcaccagcaccgagcctagtgagcaggagattaaacggatcaacaagatcagaagaagacttgtgaaagacagcaacaccaagaaggccggcaagacaggccccatgaaaaccctgctggttagagtgatgacacccgatctgagagagcggctggaaaacctgagaaagaagcctgaaaatatcccccagcccatcagcaatacatctagagccaacctgaataagctgctgaccgattacaccgaaatgaagaaggcgatcctgcatgtgtactgggaagagttccagaaggaccctgtgggcctgatgagccgggtggcccagcctgccagcaagaagatcgatcagaacaagctgaaacctgagatggacgagaagggcaacctgaccaccgccggctttgcctgctctcagtgtggccagcccctgttcgtgtacaagctggagcaggtgtctgagaagggcaaggcttacaccaactacttcggacggtgcaatgtggccgagcacgaaaagctgatcctgctggcccagctgaagcccgagaaggatagcgacgaagccgtgacatatagcctgggaaagtttgggcagagggccctggatttctacagcattcatgtgaccaaggagtccacccaccccgtgaagcccctggcccagatcgccggaaacagatacgcctccggacctgtgggaaaggccctgagcgacgcatgtatgggcacaatcgcctccttcctgtctaagtaccaggacatcatcatcgaacaccagaaggtggtgaagggcaaccagaagagactggagagcctgcgggagctggccggcaaggaaaacctggaataccctagcgtgaccctgccacctcagcctcacaccaaggagggcgttgatgcctacaacgaagtgatcgcccgggtgcgaatgtgggtgaacctgaacctgtggcagaagctgaagctaagcagagatgatgccaagcctctgctgagactgaagggattcccttcctttcctctggtcgagagacaggccaacgaagtggactggtgggacatggtgtgtaacgtgaagaagctgatcaacgagaaaaaggaggatggcaaggtgttttggcagaatctggctggctacaagagacaggaagccctgagaccatacctgagcagcgaggaagatcggaagaagggaaagaaattcgctcggtaccagctgggcgacctgctgctgcacctggaaaagaagcacggcgaggactggggaaaggtgtacgacgaggcctgggagcggattgacaagaaagtggaaggcctgagcaagcacatcaagctggaagaggaacggagaagcgaggacgcccagagcaaggccgccctgaccgactggctgcgggctaaggccagcttcgtgatcgagggcctgaaggaggccgacaaggacgagttctgcagatgcgagctgaagctgcagaagtggtacggggacctgcggggaaagcccttcgccatcgaagccgagaacagcatcctggacatcagcggcttcagcaagcagtacaactgtgccttcatctggcagaaggacggcgtgaagaagctgaacctgtacctgatcatcaactacttcaagggcggcaagctgcggttcaagaagatcaaacctgaagccttcgaagccaacagattctacaccgtgatcaacaaaaagagcggcgagatcgtgcccatggaggtgaacttcaacttcgacgaccccaacctgatcatcctgcctctggcctttggcaagagacagggcagagaattcatctggaacgacctgctgtccctggaaaccggcagcctgaagctggccaacggaagagtgatcgagaagacactgtacaacagaagaacccggcaggatgagcctgccctgttcgtggccctgaccttcgagcggcgggaggtcctggactcctccaatatcaaaccaatgaacctgatcggcgtggcaagaggcgaaaacatccccgccgtgatcgccctgaccgaccccgagggctgcccactgagccggtttaaggatagcctgggaaacccaacccacatcctgagaatcggcgagagctataaggagaagcagcggaccatccaggccaagaaggaggtggagcagcggagagccggcggctacagccggaagtacgccagcaaagccaagaatctggcagacgatatggtgagaaacaccgctagagatctgctgtactacgccgtgacccaggatgccatgctgatcttcgccaacctgagccggggcttcggccggcagggcaagcggaccttcatggccgagagacagtacacacggatggaggactggctgaccgccaagctggcctacgagggcctgagcaagacctacctgtccaagacactggcccagtacacctccaagacatgcagcaactgtgggtttaccatcaccagcgccgactacgacagggtgctggagaagctgaagaagacagcaacaggctggatgaccacaattaacggcaaggagctgaaggtggagggccagattacctactacaacagatacaagagacagaacgtagtcaaggacctgtccgtcgagctggatagactgagcgaagaatctgtgaacaacgacatctcctcctggacaaagggcagaagcggagaagctctgagcctcctgaagaaaagattctcccatagacccgtgcaggagaagttcgtgtgcctgaactgcggcttcgagacacacgcagccgagcaagccgccctgaacatcgccagatcctggctgttcctgcggagccaggagtacaagaaataccagacaaacaagacaaccggcaacaccgataagagagccttcgtcgagacctggcagtccttttaccggaagaagcttaaggaggtgtggaaacctgccgtgcggtctggcggatctggcggaggctcctatggacatggcccaggagcccgtgaccttcagggacgtggccatctacttcagcagggaggagtgggcctgcctggagcccagccagaggaccctgtacagggacgtgatgctggacaacttcagcagcgtggccgccctgggcttctgcagccccaggcccgacctggtgagcaggctggagcagtgggaggagccctgggtggaggacagggagaggcccgagctgcaggccgtgaggaggggatctggctccggcagcggccccaagaaaaagagaaaagtctaagctgccttctgcggggcttgccttctggccatgcccttcttctctcccttgcacctgtacctcttggtctttgaataaagcctgagtaggaaggctagcaaaaaaaaaaaaaaaaaaaaaaaaaaaaaaaaaaaaaaaaaaaaaaaaaaaaaaaaaaaaaaaaaaaaaaaaaaaaaaaa

SEQ ID NO: 16402 - RNA, 9485 nt, synthetic construct
  source 1..9485: mol_type = other RNA
aggaaataagagagaaaagaagagtaagaagaaatataagagccaccatggcccctaagaagaagcgtaaagtgagccggatggaacgcctcgtctacgaggtgcggcagaagtgcagaaacatcgaggacatctgcatctcctgcggatctctgaacgtgaccctggagcacccactgttcatcggcggcatgtgccagaactgtaaaaactgttttctggagtgtgcctatcaatacgacgatgacggctaccagagctactgcaccatctgttgcggcggaagagaggtgctgatgtgtggaaataacaactgctgccggtgcttctgcgtggaatgcgtggacctgctggtgggccccggcgccgcccaggccgctattaaggaagatccttggaactgctacatgtgcggccacaagggcacatacggcctgctgagacggagagaggactggcctagcagactgcagatgttcttcgccaataaccacgaccaggagttcgacccccctaaggtgtaccctcccgtccccgccgagaagagaaagcccatccgggtcctgagcctgttcgatggcatcgccaccggtctgctggtgctgaaggacctgggcatccaggtggataggtacattgcctccgaggtgtgcgaggactccatcaccgtgggaatggtgcgtcatcagggcaagatcatgtacgtgggcgacgtgcggagcgtgacacagaagcatatccaggagtggggccctttcgacctggtgatcggcggcagcccttgcaatgacctgagcatcgtgaacccagcccggaagggcctgtacgagggaaccggcagactgttcttcgagttttacagactgctgcacgacgcccggcctaaggaaggcgacgaccggcccttcttttggctgttcgagaatgtggtggccatgggagtcagcgacaagcgggatattagccggttcctggagagcaaccccgtgatgatcgatgccaaggaagtgagcgccgcccaccgggccagatacttctggggcaatctgcctggcatgaacagacccctggccagcaccgtgaacgacaagctggagctgcaggagtgcctggagcacggccggatcgccaagttcagcaaggtgagaaccatcaccacccgaagcaacagcatcaaacaaggcaaggaccagcactttcctgtgttcatgaacgagaaggaggacatcctgtggtgtaccgagatggagagagtgttcgggttcccagtccactacacagatgtcagcaacatgtctagactggccagacagagactgctgggaagaagctggtccgtccctgtgatcagacacctgttcgcccctctgaaggagtacttcgcctgcgtgagcagcggcaacagcaacgccaacagccggggccccagcttctctagcggcctggtgccactgtccctgagagggagccacatgggccccatggagatctacaaaaccgtgagcgcctggaagcggcagcctgtgcgcgtgctgagcctgtttcggaatatcgataaagtcctgaaaagcctgggattcctggagagcggctctggctccggcggtggcaccctgaagtacgtggaggatgtgacaaacgtggtcagacgggatgtggagaagtggggccccttcgatctggtgtacggcagcacccaacccctgggcagctcttgtgaccggtgccctggctggtacatgtttcagttccaccggatcctgcagtacgccctgccgagacaggagtcccagcggccattcttttggattttcatggacaacttgctgctgaccgaggatgaccaggaaactaccactcggttcctgcagaccgaagccgtgaccctgcaggacgtgagaggccgggactaccagaacgccatgcgggtgtggtccaacatccctggactgaaaagcaagcacgcacctctgacccctaaagaagaggagtacctgcaggcccaggtgcggagcagaagcaagctggacgcccctaaggtggatctgctggtgaagaattgcctcctgcccctgagagagtacttcaagtatttcagccagaatagtctgcccctgggaggcagcggcggcggcgccctggtgacatttgaggacgtcgccgtgcggttcacccaggaggaatgggctctgctggatccttctcagaaaatcctgtaccgggacgtgatgagagagacataccggaatctgacctccgtgggcatcaactgggaatgttgggaccttgaagcctgcttcagaagcctgggaagaaacctgagagtgcaggtggtgaagagaaagtgcgagctgaccaacagcggcccctgcgccgagggcggcccaagcagcggcgcccctcctcccagcggcggcagcccagccggctccccaacctctaccgaggagggcacctctgagtccgccacccccgagagcggccctggcacctccaccgagcccagcgagggcagcgcacccggcagccctgccggcagccccacctccacagaggagggaaccagcaccgagcccagcgaaggcagcgccccaggcaccagcaccgagcctagtgagcaggagattaaacggatcaacaagatcagaagaagacttgtgaaagacagcaacaccaagaaggccggcaagacaggccccatgaaaaccctgctggttagagtgatgacacccgatctgagagagcggctggaaaacctgagaaagaagcctgaaaatatcccccagcccatcagcaatacatctagagccaacctgaataagctgctgaccgattacaccgaaatgaagaaggcgatcctgcatgtgtactgggaagagttccagaaggaccctgtgggcctgatgagccgggtggcccagcctgccagcaagaagatcgatcagaacaagctgaaacctgagatggacgagaagggcaacctgaccaccgccggctttgcctgctctcagtgtggccagcccctgttcgtgtacaagctggagcaggtgtctgagaagggcaaggcttacaccaactacttcggacggtgcaatgtggccgagcacgaaaagctgatcctgctggcccagctgaagcccgagaaggatagcgacgaagccgtgacatatagcctgggaaagtttgggcagagggccctggatttctacagcattcatgtgaccaaggagtccacccaccccgtgaagcccctggcccagatcgccggaaacagatacgcctccggacctgtgggaaaggccctgagcgacgcatgtatgggcacaatcgcctccttcctgtctaagtaccaggacatcatcatcgaacaccagaaggtggtgaagggcaaccagaagagactggagagcctgcgggagctggccggcaaggaaaacctggaataccctagcgtgaccctgccacctcagcctcacaccaaggagggcgttgatgcctacaacgaagtgatcgcccgggtgcgaatgtgggtgaacctgaacctgtggcagaagctgaagctaagcagagatgatgccaagcctctgctgagactgaagggattcccttcctttcctctggtcgagagacaggccaacgaagtggactggtgggacatggtgtgtaacgtgaagaagctgatcaacgagaaaaaggaggatggcaaggtgttttggcagaatctggctggctacaagagacaggaagccctgagaccatacctgagcagcgaggaagatcggaagaagggaaagaaattcgctcggtaccagctgggcgacctgctgctgcacctggaaaagaagcacggcgaggactggggaaaggtgtacgacgaggcctgggagcggattgacaagaaagtggaaggcctgagcaagcacatcaagctggaagaggaacggagaagcgaggacgcccagagcaaggccgccctgaccgactggctgcgggctaaggccagcttcgtgatcgagggcctgaaggaggccgacaaggacgagttctgcagatgcgagctgaagctgcagaagtggtacggggacctgcggggaaagcccttcgccatcgaagccgagaacagcatcctggacatcagcggcttcagcaagcagtacaactgtgccttcatctggcagaaggacggcgtgaagaagctgaacctgtacctgatcatcaactacttcaagggcggcaagctgcggttcaagaagatcaaacctgaagccttcgaagccaacagattctacaccgtgatcaacaaaaagagcggcgagatcgtgcccatggaggtgaacttcaacttcgacgaccccaacctgatcatcctgcctctggcctttggcaagagacagggcagagaattcatctggaacgacctgctgtccctggaaaccggcagcctgaagctggccaacggaagagtgatcgagaagacactgtacaacagaagaacccggcaggatgagcctgccctgttcgtggccctgaccttcgagcggcgggaggtcctggactcctccaatatcaaaccaatgaacctgatcggcgtggcaagaggcgaaaacatccccgccgtgatcgccctgaccgaccccgagggctgcccactgagccggtttaaggatagcctgggaaacccaacccacatcctgagaatcggcgagagctataaggagaagcagcggaccatccaggccaagaaggaggtggagcagcggagagccggcggctacagccggaagtacgccagcaaagccaagaatctggcagacgatatggtgagaaacaccgctagagatctgctgtactacgccgtgacccaggatgccatgctgatcttcgccaacctgagccggggcttcggccggcagggcaagcggaccttcatggccgagagacagtacacacggatggaggactggctgaccgccaagctggcctacgagggcctgagcaagacctacctgtccaagacactggcccagtacacctccaagacatgcagcaactgtgggtttaccatcaccagcgccgactacgacagggtgctggagaagctgaagaagacagcaacaggctggatgaccacaattaacggcaaggagctgaaggtggagggccagattacctactacaacagatacaagagacagaacgtagtcaaggacctgtccgtcgagctggatagactgagcgaagaatctgtgaacaacgacatctcctcctggacaaagggcagaagcggagaagctctgagcctcctgaagaaaagattctcccatagacccgtgcaggagaagttcgtgtgcctgaactgcggcttcgagacacacgcagccgagcaagccgccctgaacatcgccagatcctggctgttcctgcggagccaggagtacaagaaataccagacaaacaagacaaccggcaacaccgataagagagccttcgtcgagacctggcagtccttttaccggaagaagcttaaggaggtgtggaaacctgccgtgcggtctggcggatctggcggaggctccagccacggccccctgagcttcgaggacgtggccgtggccttcaccaaggaggagtggcagcagctggaccccgcccagaggaccctgtacagggacgtgatgctggagaacttcagccacctggtgagcctgggccaccccgtgagcaagcccgacgtgatcagcaagctggagcagggcgaggagccctggatcatcaagagggacatccccaactggatctaccccgagagggagaacaggggcggcccaagcagcggcgcccctcctcccagcggcggcagcccagccggctccccaacctctaccgaggagggcacctctgagtccgccacccccgagagcggccctggcacctccaccgagcccagcgagggcagcgcacccggcagccctgccggcagccccacctccacagaggagggaaccagcaccgagcccagcgaaggcagcgccccaggcaccagcaccgagcctagtgagcaggagattaaacggatcaacaagatcagaagaagacttgtgaaagacagcaacaccaagaaggccggcaagacaggccccatgaaaaccctgctggttagagtgatgacacccgatctgagagagcggctggaaaacctgagaaagaagcctgaaaatatcccccagcccatcagcaatacatctagagccaacctgaataagctgctgaccgattacaccgaaatgaagaaggcgatcctgcatgtgtactgggaagagttccagaaggaccctgtgggcctgatgagccgggtggcccagcctgccagcaagaagatcgatcagaacaagctgaaacctgagatggacgagaagggcaacctgaccaccgccggctttgcctgctctcagtgtggccagcccctgttcgtgtacaagctggagcaggtgtctgagaagggcaaggcttacaccaactacttcggacggtgcaatgtggccgagcacgaaaagctgatcctgctggcccagctgaagcccgagaaggatagcgacgaagccgtgacatatagcctgggaaagtttgggcagagggccctggatttctacagcattcatgtgaccaaggagtccacccaccccgtgaagcccctggcccagatcgccggaaacagatacgcctccggacctgtgggaaaggccctgagcgacgcatgtatgggcacaatcgcctccttcctgtctaagtaccaggacatcatcatcgaacaccagaaggtggtgaagggcaaccagaagagactggagagcctgcgggagctggccggcaaggaaaacctggaataccctagcgtgaccctgccacctcagcctcacaccaaggagggcgttgatgcctacaacgaagtgatcgcccgggtgcgaatgtgggtgaacctgaacctgtggcagaagctgaagctaagcagagatgatgccaagcctctgctgagactgaagggattcccttcctttcctctggtcgagagacaggccaacgaagtggactggtgggacatggtgtgtaacgtgaagaagctgatcaacgagaaaaaggaggatggcaaggtgttttggcagaatctggctggctacaagagacaggaagccctgagaccatacctgagcagcgaggaagatcggaagaagggaaagaaattcgctcggtaccagctgggcgacctgctgctgcacctggaaaagaagcacggcgaggactggggaaaggtgtacgacgaggcctgggagcggattgacaagaaagtggaaggcctgagcaagcacatcaagctggaagaggaacggagaagcgaggacgcccagagcaaggccgccctgaccgactggctgcgggctaaggccagcttcgtgatcgagggcctgaaggaggccgacaaggacgagttctgcagatgcgagctgaagctgcagaagtggtacggggacctgcggggaaagcccttcgccatcgaagccgagaacagcatcctggacatcagcggcttcagcaagcagtacaactgtgccttcatctggcagaaggacggcgtgaagaagctgaacctgtacctgatcatcaactacttcaagggcggcaagctgcggttcaagaagatcaaacctgaagccttcgaagccaacagattctacaccgtgatcaacaaaaagagcggcgagatcgtgcccatggaggtgaacttcaacttcgacgaccccaacctgatcatcctgcctctggcctttggcaagagacagggcagagaattcatctggaacgacctgctgtccctggaaaccggcagcctgaagctggccaacggaagagtgatcgagaagacactgtacaacagaagaacccggcaggatgagcctgccctgttcgtggccctgaccttcgagcggcgggaggtcctggactcctccaatatcaaaccaatgaacctgatcggcgtggcaagaggcgaaaacatccccgccgtgatcgccctgaccgaccccgagggctgcccactgagccggtttaaggatagcctgggaaacccaacccacatcctgagaatcggcgagagctataaggagaagcagcggaccatccaggccaagaaggaggtggagcagcggagagccggcggctacagccggaagtacgccagcaaagccaagaatctggcagacgatatggtgagaaacaccgctagagatctgctgtactacgccgtgacccaggatgccatgctgatcttcgccaacctgagccggggcttcggccggcagggcaagcggaccttcatggccgagagacagtacacacggatggaggactggctgaccgccaagctggcctacgagggcctgagcaagacctacctgtccaagacactggcccagtacacctccaagacatgcagcaactgtgggtttaccatcaccagcgccgactacgacagggtgctggagaagctgaagaagacagcaacaggctggatgaccacaattaacggcaaggagctgaaggtggagggccagattacctactacaacagatacaagagacagaacgtagtcaaggacctgtccgtcgagctggatagactgagcgaagaatctgtgaacaacgacatctcctcctggacaaagggcagaagcggagaagctctgagcctcctgaagaaaagattctcccatagacccgtgcaggagaagttcgtgtgcctgaactgcggcttcgagacacacgcagccgagcaagccgccctgaacatcgccagatcctggctgttcctgcggagccaggagtacaagaaataccagacaaacaagacaaccggcaacaccgataagagagccttcgtcgagacctggcagtccttttaccggaagaagcttaaggaggtgtggaaacctgccgtgcggtctggcggatctggcggaggctcctagccacggccccctgagcttcgaggacgtggccgtggccttcaccaaggaggagtggcagcagctggaccccgcccagaggaccctgtacagggacgtgatgctggagaacttcagccacctggtgagcctgggccaccccgtgagcaagcccgacgtgatcagcaagctggagcagggcgaggagccctggatcatcaagagggacatccccaactggatctaccccgagagggagaacaggggatctggctccggcagcggccccaagaaaaagagaaaagtctaagctgccttctgcggggcttgccttctggccatgcccttcttctctcccttgcacctgtacctcttggtctttgaataaagcctgagtaggaaggctagcaaaaaaaaaaaaaaaaaaaaaaaaaaaaaaaaaaaaaaaaaaaaaaaaaaaaaaaaaaaaaaaaaaaaaaaaaaaaaaaa

SEQ ID NO: 16403 - RNA, 9485 nt, synthetic construct
  source 1..9485: mol_type = other RNA
aggaaataagagagaaaagaagagtaagaagaaatataagagccaccatggcccctaagaagaagcgtaaagtgagccggatggaacgcctcgtctacgaggtgcggcagaagtgcagaaacatcgaggacatctgcatctcctgcggatctctgaacgtgaccctggagcacccactgttcatcggcggcatgtgccagaactgtaaaaactgttttctggagtgtgcctatcaatacgacgatgacggctaccagagctactgcaccatctgttgcggcggaagagaggtgctgatgtgtggaaataacaactgctgccggtgcttctgcgtggaatgcgtggacctgctggtgggccccggcgccgcccaggccgctattaaggaagatccttggaactgctacatgtgcggccacaagggcacatacggcctgctgagacggagagaggactggcctagcagactgcagatgttcttcgccaataaccacgaccaggagttcgacccccctaaggtgtaccctcccgtccccgccgagaagagaaagcccatccgggtcctgagcctgttcgatggcatcgccaccggtctgctggtgctgaaggacctgggcatccaggtggataggtacattgcctccgaggtgtgcgaggactccatcaccgtgggaatggtgcgtcatcagggcaagatcatgtacgtgggcgacgtgcggagcgtgacacagaagcatatccaggagtggggccctttcgacctggtgatcggcggcagcccttgcaatgacctgagcatcgtgaacccagcccggaagggcctgtacgagggaaccggcagactgttcttcgagttttacagactgctgcacgacgcccggcctaaggaaggcgacgaccggcccttcttttggctgttcgagaatgtggtggccatgggagtcagcgacaagcgggatattagccggttcctggagagcaaccccgtgatgatcgatgccaaggaagtgagcgccgcccaccgggccagatacttctggggcaatctgcctggcatgaacagacccctggccagcaccgtgaacgacaagctggagctgcaggagtgcctggagcacggccggatcgccaagttcagcaaggtgagaaccatcaccacccgaagcaacagcatcaaacaaggcaaggaccagcactttcctgtgttcatgaacgagaaggaggacatcctgtggtgtaccgagatggagagagtgttcgggttcccagtccactacacagatgtcagcaacatgtctagactggccagacagagactgctgggaagaagctggtccgtccctgtgatcagacacctgttcgcccctctgaaggagtacttcgcctgcgtgagcagcggcaacagcaacgccaacagccggggccccagcttctctagcggcctggtgccactgtccctgagagggagccacatgggccccatggagatctacaaaaccgtgagcgcctggaagcggcagcctgtgcgcgtgctgagcctgtttcggaatatcgataaagtcctgaaaagcctgggattcctggagagcggctctggctccggcggtggcaccctgaagtacgtggaggatgtgacaaacgtggtcagacgggatgtggagaagtggggccccttcgatctggtgtacggcagcacccaacccctgggcagctcttgtgaccggtgccctggctggtacatgtttcagttccaccggatcctgcagtacgccctgccgagacaggagtcccagcggccattcttttggattttcatggacaacttgctgctgaccgaggatgaccaggaaactaccactcggttcctgcagaccgaagccgtgaccctgcaggacgtgagaggccgggactaccagaacgccatgcgggtgtggtccaacatccctggactgaaaagcaagcacgcacctctgacccctaaagaagaggagtacctgcaggcccaggtgcggagcagaagcaagctggacgcccctaaggtggatctgctggtgaagaattgcctcctgcccctgagagagtacttcaagtatttcagccagaatagtctgcccctgggaggcagcggcggcggcgccctggtgacatttgaggacgtcgccgtgcggttcacccaggaggaatgggctctgctggatccttctcagaaaatcctgtaccgggacgtgatgagagagacataccggaatctgacctccgtgggcatcaactgggaatgttgggaccttgaagcctgcttcagaagcctgggaagaaacctgagagtgcaggtggtgaagagaaagtgcgagctgaccaacagcggcccctgcgccgagggcggcccaagcagcggcgcccctcctcccagcggcggcagcccagccggctccccaacctctaccgaggagggcacctctgagtccgccacccccgagagcggccctggcacctccaccgagcccagcgagggcagcgcacccggcagccctgccggcagccccacctccacagaggagggaaccagcaccgagcccagcgaaggcagcgccccaggcaccagcaccgagcctagtgagcaggagattaaacggatcaacaagatcagaagaagacttgtgaaagacagcaacaccaagaaggccggcaagacaggccccatgaaaaccctgctggttagagtgatgacacccgatctgagagagcggctggaaaacctgagaaagaagcctgaaaatatcccccagcccatcagcaatacatctagagccaacctgaataagctgctgaccgattacaccgaaatgaagaaggcgatcctgcatgtgtactgggaagagttccagaaggaccctgtgggcctgatgagccgggtggcccagcctgccagcaagaagatcgatcagaacaagctgaaacctgagatggacgagaagggcaacctgaccaccgccggctttgcctgctctcagtgtggccagcccctgttcgtgtacaagctggagcaggtgtctgagaagggcaaggcttacaccaactacttcggacggtgcaatgtggccgagcacgaaaagctgatcctgctggcccagctgaagcccgagaaggatagcgacgaagccgtgacatatagcctgggaaagtttgggcagagggccctggatttctacagcattcatgtgaccaaggagtccacccaccccgtgaagcccctggcccagatcgccggaaacagatacgcctccggacctgtgggaaaggccctgagcgacgcatgtatgggcacaatcgcctccttcctgtctaagtaccaggacatcatcatcgaacaccagaaggtggtgaagggcaaccagaagagactggagagcctgcgggagctggccggcaaggaaaacctggaataccctagcgtgaccctgccacctcagcctcacaccaaggagggcgttgatgcctacaacgaagtgatcgcccgggtgcgaatgtgggtgaacctgaacctgtggcagaagctgaagctaagcagagatgatgccaagcctctgctgagactgaagggattcccttcctttcctctggtcgagagacaggccaacgaagtggactggtgggacatggtgtgtaacgtgaagaagctgatcaacgagaaaaaggaggatggcaaggtgttttggcagaatctggctggctacaagagacaggaagccctgagaccatacctgagcagcgaggaagatcggaagaagggaaagaaattcgctcggtaccagctgggcgacctgctgctgcacctggaaaagaagcacggcgaggactggggaaaggtgtacgacgaggcctgggagcggattgacaagaaagtggaaggcctgagcaagcacatcaagctggaagaggaacggagaagcgaggacgcccagagcaaggccgccctgaccgactggctgcgggctaaggccagcttcgtgatcgagggcctgaaggaggccgacaaggacgagttctgcagatgcgagctgaagctgcagaagtggtacggggacctgcggggaaagcccttcgccatcgaagccgagaacagcatcctggacatcagcggcttcagcaagcagtacaactgtgccttcatctggcagaaggacggcgtgaagaagctgaacctgtacctgatcatcaactacttcaagggcggcaagctgcggttcaagaagatcaaacctgaagccttcgaagccaacagattctacaccgtgatcaacaaaaagagcggcgagatcgtgcccatggaggtgaacttcaacttcgacgaccccaacctgatcatcctgcctctggcctttggcaagagacagggcagagaattcatctggaacgacctgctgtccctggaaaccggcagcctgaagctggccaacggaagagtgatcgagaagacactgtacaacagaagaacccggcaggatgagcctgccctgttcgtggccctgaccttcgagcggcgggaggtcctggactcctccaatatcaaaccaatgaacctgatcggcgtggcaagaggcgaaaacatccccgccgtgatcgccctgaccgaccccgagggctgcccactgagccggtttaaggatagcctgggaaacccaacccacatcctgagaatcggcgagagctataaggagaagcagcggaccatccaggccaagaaggaggtggagcagcggagagccggcggctacagccggaagtacgccagcaaagccaagaatctggcagacgatatggtgagaaacaccgctagagatctgctgtactacgccgtgacccaggatgccatgctgatcttcgccaacctgagccggggcttcggccggcagggcaagcggaccttcatggccgagagacagtacacacggatggaggactggctgaccgccaagctggcctacgagggcctgagcaagacctacctgtccaagacactggcccagtacacctccaagacatgcagcaactgtgggtttaccatcaccagcgccgactacgacagggtgctggagaagctgaagaagacagcaacaggctggatgaccacaattaacggcaaggagctgaaggtggagggccagattacctactacaacagatacaagagacagaacgtagtcaaggacctgtccgtcgagctggatagactgagcgaagaatctgtgaacaacgacatctcctcctggacaaagggcagaagcggagaagctctgagcctcctgaagaaaagattctcccatagacccgtgcaggagaagttcgtgtgcctgaactgcggcttcgagacacacgcagccgagcaagccgccctgaacatcgccagatcctggctgttcctgcggagccaggagtacaagaaataccagacaaacaagacaaccggcaacaccgataagagagccttcgtcgagacctggcagtccttttaccggaagaagcttaaggaggtgtggaaacctgccgtgcggtctggcggatctggcggaggctccgacctggtgacctacgacgacgtgcacgtgaacttcacccaggaggagtgggccctgctggaccccagccagaagaacctgtacaaggacgtgatgctggagacctacaggaacctgagcgccatcggctacatctgggaggtgcacaccagcgaggaccacttccagaccagcaggagccacggcaggcacgagaggagctgcaccgccgtgcagcccagcgagttcatccagtgcggcaagggcggcccaagcagcggcgcccctcctcccagcggcggcagcccagccggctccccaacctctaccgaggagggcacctctgagtccgccacccccgagagcggccctggcacctccaccgagcccagcgagggcagcgcacccggcagccctgccggcagccccacctccacagaggagggaaccagcaccgagcccagcgaaggcagcgccccaggcaccagcaccgagcctagtgagcaggagattaaacggatcaacaagatcagaagaagacttgtgaaagacagcaacaccaagaaggccggcaagacaggccccatgaaaaccctgctggttagagtgatgacacccgatctgagagagcggctggaaaacctgagaaagaagcctgaaaatatcccccagcccatcagcaatacatctagagccaacctgaataagctgctgaccgattacaccgaaatgaagaaggcgatcctgcatgtgtactgggaagagttccagaaggaccctgtgggcctgatgagccgggtggcccagcctgccagcaagaagatcgatcagaacaagctgaaacctgagatggacgagaagggcaacctgaccaccgccggctttgcctgctctcagtgtggccagcccctgttcgtgtacaagctggagcaggtgtctgagaagggcaaggcttacaccaactacttcggacggtgcaatgtggccgagcacgaaaagctgatcctgctggcccagctgaagcccgagaaggatagcgacgaagccgtgacatatagcctgggaaagtttgggcagagggccctggatttctacagcattcatgtgaccaaggagtccacccaccccgtgaagcccctggcccagatcgccggaaacagatacgcctccggacctgtgggaaaggccctgagcgacgcatgtatgggcacaatcgcctccttcctgtctaagtaccaggacatcatcatcgaacaccagaaggtggtgaagggcaaccagaagagactggagagcctgcgggagctggccggcaaggaaaacctggaataccctagcgtgaccctgccacctcagcctcacaccaaggagggcgttgatgcctacaacgaagtgatcgcccgggtgcgaatgtgggtgaacctgaacctgtggcagaagctgaagctaagcagagatgatgccaagcctctgctgagactgaagggattcccttcctttcctctggtcgagagacaggccaacgaagtggactggtgggacatggtgtgtaacgtgaagaagctgatcaacgagaaaaaggaggatggcaaggtgttttggcagaatctggctggctacaagagacaggaagccctgagaccatacctgagcagcgaggaagatcggaagaagggaaagaaattcgctcggtaccagctgggcgacctgctgctgcacctggaaaagaagcacggcgaggactggggaaaggtgtacgacgaggcctgggagcggattgacaagaaagtggaaggcctgagcaagcacatcaagctggaagaggaacggagaagcgaggacgcccagagcaaggccgccctgaccgactggctgcgggctaaggccagcttcgtgatcgagggcctgaaggaggccgacaaggacgagttctgcagatgcgagctgaagctgcagaagtggtacggggacctgcggggaaagcccttcgccatcgaagccgagaacagcatcctggacatcagcggcttcagcaagcagtacaactgtgccttcatctggcagaaggacggcgtgaagaagctgaacctgtacctgatcatcaactacttcaagggcggcaagctgcggttcaagaagatcaaacctgaagccttcgaagccaacagattctacaccgtgatcaacaaaaagagcggcgagatcgtgcccatggaggtgaacttcaacttcgacgaccccaacctgatcatcctgcctctggcctttggcaagagacagggcagagaattcatctggaacgacctgctgtccctggaaaccggcagcctgaagctggccaacggaagagtgatcgagaagacactgtacaacagaagaacccggcaggatgagcctgccctgttcgtggccctgaccttcgagcggcgggaggtcctggactcctccaatatcaaaccaatgaacctgatcggcgtggcaagaggcgaaaacatccccgccgtgatcgccctgaccgaccccgagggctgcccactgagccggtttaaggatagcctgggaaacccaacccacatcctgagaatcggcgagagctataaggagaagcagcggaccatccaggccaagaaggaggtggagcagcggagagccggcggctacagccggaagtacgccagcaaagccaagaatctggcagacgatatggtgagaaacaccgctagagatctgctgtactacgccgtgacccaggatgccatgctgatcttcgccaacctgagccggggcttcggccggcagggcaagcggaccttcatggccgagagacagtacacacggatggaggactggctgaccgccaagctggcctacgagggcctgagcaagacctacctgtccaagacactggcccagtacacctccaagacatgcagcaactgtgggtttaccatcaccagcgccgactacgacagggtgctggagaagctgaagaagacagcaacaggctggatgaccacaattaacggcaaggagctgaaggtggagggccagattacctactacaacagatacaagagacagaacgtagtcaaggacctgtccgtcgagctggatagactgagcgaagaatctgtgaacaacgacatctcctcctggacaaagggcagaagcggagaagctctgagcctcctgaagaaaagattctcccatagacccgtgcaggagaagttcgtgtgcctgaactgcggcttcgagacacacgcagccgagcaagccgccctgaacatcgccagatcctggctgttcctgcggagccaggagtacaagaaataccagacaaacaagacaaccggcaacaccgataagagagccttcgtcgagacctggcagtccttttaccggaagaagcttaaggaggtgtggaaacctgccgtgcggtctggcggatctggcggaggctcctgacctggtgacctacgacgacgtgcacgtgaacttcacccaggaggagtgggccctgctggaccccagccagaagaacctgtacaaggacgtgatgctggagacctacaggaacctgagcgccatcggctacatctgggaggtgcacaccagcgaggaccacttccagaccagcaggagccacggcaggcacgagaggagctgcaccgccgtgcagcccagcgagttcatccagtgcggcaagggatctggctccggcagcggccccaagaaaaagagaaaagtctaagctgccttctgcggggcttgccttctggccatgcccttcttctctcccttgcacctgtacctcttggtctttgaataaagcctgagtaggaaggctagcaaaaaaaaaaaaaaaaaaaaaaaaaaaaaaaaaaaaaaaaaaaaaaaaaaaaaaaaaaaaaaaaaaaaaaaaaaaaaaaa

SEQ ID NO: 16404 - RNA, 9485 nt, synthetic construct
  source 1..9485: mol_type = other RNA
aggaaataagagagaaaagaagagtaagaagaaatataagagccaccatggcccctaagaagaagcgtaaagtgagccggatggaacgcctcgtctacgaggtgcggcagaagtgcagaaacatcgaggacatctgcatctcctgcggatctctgaacgtgaccctggagcacccactgttcatcggcggcatgtgccagaactgtaaaaactgttttctggagtgtgcctatcaatacgacgatgacggctaccagagctactgcaccatctgttgcggcggaagagaggtgctgatgtgtggaaataacaactgctgccggtgcttctgcgtggaatgcgtggacctgctggtgggccccggcgccgcccaggccgctattaaggaagatccttggaactgctacatgtgcggccacaagggcacatacggcctgctgagacggagagaggactggcctagcagactgcagatgttcttcgccaataaccacgaccaggagttcgacccccctaaggtgtaccctcccgtccccgccgagaagagaaagcccatccgggtcctgagcctgttcgatggcatcgccaccggtctgctggtgctgaaggacctgggcatccaggtggataggtacattgcctccgaggtgtgcgaggactccatcaccgtgggaatggtgcgtcatcagggcaagatcatgtacgtgggcgacgtgcggagcgtgacacagaagcatatccaggagtggggccctttcgacctggtgatcggcggcagcccttgcaatgacctgagcatcgtgaacccagcccggaagggcctgtacgagggaaccggcagactgttcttcgagttttacagactgctgcacgacgcccggcctaaggaaggcgacgaccggcccttcttttggctgttcgagaatgtggtggccatgggagtcagcgacaagcgggatattagccggttcctggagagcaaccccgtgatgatcgatgccaaggaagtgagcgccgcccaccgggccagatacttctggggcaatctgcctggcatgaacagacccctggccagcaccgtgaacgacaagctggagctgcaggagtgcctggagcacggccggatcgccaagttcagcaaggtgagaaccatcaccacccgaagcaacagcatcaaacaaggcaaggaccagcactttcctgtgttcatgaacgagaaggaggacatcctgtggtgtaccgagatggagagagtgttcgggttcccagtccactacacagatgtcagcaacatgtctagactggccagacagagactgctgggaagaagctggtccgtccctgtgatcagacacctgttcgcccctctgaaggagtacttcgcctgcgtgagcagcggcaacagcaacgccaacagccggggccccagcttctctagcggcctggtgccactgtccctgagagggagccacatgggccccatggagatctacaaaaccgtgagcgcctggaagcggcagcctgtgcgcgtgctgagcctgtttcggaatatcgataaagtcctgaaaagcctgggattcctggagagcggctctggctccggcggtggcaccctgaagtacgtggaggatgtgacaaacgtggtcagacgggatgtggagaagtggggccccttcgatctggtgtacggcagcacccaacccctgggcagctcttgtgaccggtgccctggctggtacatgtttcagttccaccggatcctgcagtacgccctgccgagacaggagtcccagcggccattcttttggattttcatggacaacttgctgctgaccgaggatgaccaggaaactaccactcggttcctgcagaccgaagccgtgaccctgcaggacgtgagaggccgggactaccagaacgccatgcgggtgtggtccaacatccctggactgaaaagcaagcacgcacctctgacccctaaagaagaggagtacctgcaggcccaggtgcggagcagaagcaagctggacgcccctaaggtggatctgctggtgaagaattgcctcctgcccctgagagagtacttcaagtatttcagccagaatagtctgcccctgggaggcagcggcggcggcgccctggtgacatttgaggacgtcgccgtgcggttcacccaggaggaatgggctctgctggatccttctcagaaaatcctgtaccgggacgtgatgagagagacataccggaatctgacctccgtgggcatcaactgggaatgttgggaccttgaagcctgcttcagaagcctgggaagaaacctgagagtgcaggtggtgaagagaaagtgcgagctgaccaacagcggcccctgcgccgagggcggcccaagcagcggcgcccctcctcccagcggcggcagcccagccggctccccaacctctaccgaggagggcacctctgagtccgccacccccgagagcggccctggcacctccaccgagcccagcgagggcagcgcacccggcagccctgccggcagccccacctccacagaggagggaaccagcaccgagcccagcgaaggcagcgccccaggcaccagcaccgagcctagtgagcaggagattaaacggatcaacaagatcagaagaagacttgtgaaagacagcaacaccaagaaggccggcaagacaggccccatgaaaaccctgctggttagagtgatgacacccgatctgagagagcggctggaaaacctgagaaagaagcctgaaaatatcccccagcccatcagcaatacatctagagccaacctgaataagctgctgaccgattacaccgaaatgaagaaggcgatcctgcatgtgtactgggaagagttccagaaggaccctgtgggcctgatgagccgggtggcccagcctgccagcaagaagatcgatcagaacaagctgaaacctgagatggacgagaagggcaacctgaccaccgccggctttgcctgctctcagtgtggccagcccctgttcgtgtacaagctggagcaggtgtctgagaagggcaaggcttacaccaactacttcggacggtgcaatgtggccgagcacgaaaagctgatcctgctggcccagctgaagcccgagaaggatagcgacgaagccgtgacatatagcctgggaaagtttgggcagagggccctggatttctacagcattcatgtgaccaaggagtccacccaccccgtgaagcccctggcccagatcgccggaaacagatacgcctccggacctgtgggaaaggccctgagcgacgcatgtatgggcacaatcgcctccttcctgtctaagtaccaggacatcatcatcgaacaccagaaggtggtgaagggcaaccagaagagactggagagcctgcgggagctggccggcaaggaaaacctggaataccctagcgtgaccctgccacctcagcctcacaccaaggagggcgttgatgcctacaacgaagtgatcgcccgggtgcgaatgtgggtgaacctgaacctgtggcagaagctgaagctaagcagagatgatgccaagcctctgctgagactgaagggattcccttcctttcctctggtcgagagacaggccaacgaagtggactggtgggacatggtgtgtaacgtgaagaagctgatcaacgagaaaaaggaggatggcaaggtgttttggcagaatctggctggctacaagagacaggaagccctgagaccatacctgagcagcgaggaagatcggaagaagggaaagaaattcgctcggtaccagctgggcgacctgctgctgcacctggaaaagaagcacggcgaggactggggaaaggtgtacgacgaggcctgggagcggattgacaagaaagtggaaggcctgagcaagcacatcaagctggaagaggaacggagaagcgaggacgcccagagcaaggccgccctgaccgactggctgcgggctaaggccagcttcgtgatcgagggcctgaaggaggccgacaaggacgagttctgcagatgcgagctgaagctgcagaagtggtacggggacctgcggggaaagcccttcgccatcgaagccgagaacagcatcctggacatcagcggcttcagcaagcagtacaactgtgccttcatctggcagaaggacggcgtgaagaagctgaacctgtacctgatcatcaactacttcaagggcggcaagctgcggttcaagaagatcaaacctgaagccttcgaagccaacagattctacaccgtgatcaacaaaaagagcggcgagatcgtgcccatggaggtgaacttcaacttcgacgaccccaacctgatcatcctgcctctggcctttggcaagagacagggcagagaattcatctggaacgacctgctgtccctggaaaccggcagcctgaagctggccaacggaagagtgatcgagaagacactgtacaacagaagaacccggcaggatgagcctgccctgttcgtggccctgaccttcgagcggcgggaggtcctggactcctccaatatcaaaccaatgaacctgatcggcgtggcaagaggcgaaaacatccccgccgtgatcgccctgaccgaccccgagggctgcccactgagccggtttaaggatagcctgggaaacccaacccacatcctgagaatcggcgagagctataaggagaagcagcggaccatccaggccaagaaggaggtggagcagcggagagccggcggctacagccggaagtacgccagcaaagccaagaatctggcagacgatatggtgagaaacaccgctagagatctgctgtactacgccgtgacccaggatgccatgctgatcttcgccaacctgagccggggcttcggccggcagggcaagcggaccttcatggccgagagacagtacacacggatggaggactggctgaccgccaagctggcctacgagggcctgagcaagacctacctgtccaagacactggcccagtacacctccaagacatgcagcaactgtgggtttaccatcaccagcgccgactacgacagggtgctggagaagctgaagaagacagcaacaggctggatgaccacaattaacggcaaggagctgaaggtggagggccagattacctactacaacagatacaagagacagaacgtagtcaaggacctgtccgtcgagctggatagactgagcgaagaatctgtgaacaacgacatctcctcctggacaaagggcagaagcggagaagctctgagcctcctgaagaaaagattctcccatagacccgtgcaggagaagttcgtgtgcctgaactgcggcttcgagacacacgcagccgagcaagccgccctgaacatcgccagatcctggctgttcctgcggagccaggagtacaagaaataccagacaaacaagacaaccggcaacaccgataagagagccttcgtcgagacctggcagtccttttaccggaagaagcttaaggaggtgtggaaacctgccgtgcggtctggcggatctggcggaggctccatgccccagggcagcgtgagcttcaaggacgtgaccgtggacttcacccaggaggagtggcagcagctggacagcgcccagaaggccctgtacagggacgtgatgctggagaactactgccacttcgtgagcgtgggcttccacatgaccaagcccgacatgatccacaagctggagcagggcaaggagctgtggaccaccggcaggatcttccccagcaggagctacctgggcgagagcgtgggcggcccaagcagcggcgcccctcctcccagcggcggcagcccagccggctccccaacctctaccgaggagggcacctctgagtccgccacccccgagagcggccctggcacctccaccgagcccagcgagggcagcgcacccggcagccctgccggcagccccacctccacagaggagggaaccagcaccgagcccagcgaaggcagcgccccaggcaccagcaccgagcctagtgagcaggagattaaacggatcaacaagatcagaagaagacttgtgaaagacagcaacaccaagaaggccggcaagacaggccccatgaaaaccctgctggttagagtgatgacacccgatctgagagagcggctggaaaacctgagaaagaagcctgaaaatatcccccagcccatcagcaatacatctagagccaacctgaataagctgctgaccgattacaccgaaatgaagaaggcgatcctgcatgtgtactgggaagagttccagaaggaccctgtgggcctgatgagccgggtggcccagcctgccagcaagaagatcgatcagaacaagctgaaacctgagatggacgagaagggcaacctgaccaccgccggctttgcctgctctcagtgtggccagcccctgttcgtgtacaagctggagcaggtgtctgagaagggcaaggcttacaccaactacttcggacggtgcaatgtggccgagcacgaaaagctgatcctgctggcccagctgaagcccgagaaggatagcgacgaagccgtgacatatagcctgggaaagtttgggcagagggccctggatttctacagcattcatgtgaccaaggagtccacccaccccgtgaagcccctggcccagatcgccggaaacagatacgcctccggacctgtgggaaaggccctgagcgacgcatgtatgggcacaatcgcctccttcctgtctaagtaccaggacatcatcatcgaacaccagaaggtggtgaagggcaaccagaagagactggagagcctgcgggagctggccggcaaggaaaacctggaataccctagcgtgaccctgccacctcagcctcacaccaaggagggcgttgatgcctacaacgaagtgatcgcccgggtgcgaatgtgggtgaacctgaacctgtggcagaagctgaagctaagcagagatgatgccaagcctctgctgagactgaagggattcccttcctttcctctggtcgagagacaggccaacgaagtggactggtgggacatggtgtgtaacgtgaagaagctgatcaacgagaaaaaggaggatggcaaggtgttttggcagaatctggctggctacaagagacaggaagccctgagaccatacctgagcagcgaggaagatcggaagaagggaaagaaattcgctcggtaccagctgggcgacctgctgctgcacctggaaaagaagcacggcgaggactggggaaaggtgtacgacgaggcctgggagcggattgacaagaaagtggaaggcctgagcaagcacatcaagctggaagaggaacggagaagcgaggacgcccagagcaaggccgccctgaccgactggctgcgggctaaggccagcttcgtgatcgagggcctgaaggaggccgacaaggacgagttctgcagatgcgagctgaagctgcagaagtggtacggggacctgcggggaaagcccttcgccatcgaagccgagaacagcatcctggacatcagcggcttcagcaagcagtacaactgtgccttcatctggcagaaggacggcgtgaagaagctgaacctgtacctgatcatcaactacttcaagggcggcaagctgcggttcaagaagatcaaacctgaagccttcgaagccaacagattctacaccgtgatcaacaaaaagagcggcgagatcgtgcccatggaggtgaacttcaacttcgacgaccccaacctgatcatcctgcctctggcctttggcaagagacagggcagagaattcatctggaacgacctgctgtccctggaaaccggcagcctgaagctggccaacggaagagtgatcgagaagacactgtacaacagaagaacccggcaggatgagcctgccctgttcgtggccctgaccttcgagcggcgggaggtcctggactcctccaatatcaaaccaatgaacctgatcggcgtggcaagaggcgaaaacatccccgccgtgatcgccctgaccgaccccgagggctgcccactgagccggtttaaggatagcctgggaaacccaacccacatcctgagaatcggcgagagctataaggagaagcagcggaccatccaggccaagaaggaggtggagcagcggagagccggcggctacagccggaagtacgccagcaaagccaagaatctggcagacgatatggtgagaaacaccgctagagatctgctgtactacgccgtgacccaggatgccatgctgatcttcgccaacctgagccggggcttcggccggcagggcaagcggaccttcatggccgagagacagtacacacggatggaggactggctgaccgccaagctggcctacgagggcctgagcaagacctacctgtccaagacactggcccagtacacctccaagacatgcagcaactgtgggtttaccatcaccagcgccgactacgacagggtgctggagaagctgaagaagacagcaacaggctggatgaccacaattaacggcaaggagctgaaggtggagggccagattacctactacaacagatacaagagacagaacgtagtcaaggacctgtccgtcgagctggatagactgagcgaagaatctgtgaacaacgacatctcctcctggacaaagggcagaagcggagaagctctgagcctcctgaagaaaagattctcccatagacccgtgcaggagaagttcgtgtgcctgaactgcggcttcgagacacacgcagccgagcaagccgccctgaacatcgccagatcctggctgttcctgcggagccaggagtacaagaaataccagacaaacaagacaaccggcaacaccgataagagagccttcgtcgagacctggcagtccttttaccggaagaagcttaaggaggtgtggaaacctgccgtgcggtctggcggatctggcggaggctcctatgccccagggcagcgtgagcttcaaggacgtgaccgtggacttcacccaggaggagtggcagcagctggacagcgcccagaaggccctgtacagggacgtgatgctggagaactactgccacttcgtgagcgtgggcttccacatgaccaagcccgacatgatccacaagctggagcagggcaaggagctgtggaccaccggcaggatcttccccagcaggagctacctgggcgagagcgtgggatctggctccggcagcggccccaagaaaaagagaaaagtctaagctgccttctgcggggcttgccttctggccatgcccttcttctctcccttgcacctgtacctcttggtctttgaataaagcctgagtaggaaggctagcaaaaaaaaaaaaaaaaaaaaaaaaaaaaaaaaaaaaaaaaaaaaaaaaaaaaaaaaaaaaaaaaaaaaaaaaaaaaaaaa

SEQ ID NO: 16405 - RNA, 9485 nt, synthetic construct
  source 1..9485: mol_type = other RNA
aggaaataagagagaaaagaagagtaagaagaaatataagagccaccatggcccctaagaagaagcgtaaagtgagccggatggaacgcctcgtctacgaggtgcggcagaagtgcagaaacatcgaggacatctgcatctcctgcggatctctgaacgtgaccctggagcacccactgttcatcggcggcatgtgccagaactgtaaaaactgttttctggagtgtgcctatcaatacgacgatgacggctaccagagctactgcaccatctgttgcggcggaagagaggtgctgatgtgtggaaataacaactgctgccggtgcttctgcgtggaatgcgtggacctgctggtgggccccggcgccgcccaggccgctattaaggaagatccttggaactgctacatgtgcggccacaagggcacatacggcctgctgagacggagagaggactggcctagcagactgcagatgttcttcgccaataaccacgaccaggagttcgacccccctaaggtgtaccctcccgtccccgccgagaagagaaagcccatccgggtcctgagcctgttcgatggcatcgccaccggtctgctggtgctgaaggacctgggcatccaggtggataggtacattgcctccgaggtgtgcgaggactccatcaccgtgggaatggtgcgtcatcagggcaagatcatgtacgtgggcgacgtgcggagcgtgacacagaagcatatccaggagtggggccctttcgacctggtgatcggcggcagcccttgcaatgacctgagcatcgtgaacccagcccggaagggcctgtacgagggaaccggcagactgttcttcgagttttacagactgctgcacgacgcccggcctaaggaaggcgacgaccggcccttcttttggctgttcgagaatgtggtggccatgggagtcagcgacaagcgggatattagccggttcctggagagcaaccccgtgatgatcgatgccaaggaagtgagcgccgcccaccgggccagatacttctggggcaatctgcctggcatgaacagacccctggccagcaccgtgaacgacaagctggagctgcaggagtgcctggagcacggccggatcgccaagttcagcaaggtgagaaccatcaccacccgaagcaacagcatcaaacaaggcaaggaccagcactttcctgtgttcatgaacgagaaggaggacatcctgtggtgtaccgagatggagagagtgttcgggttcccagtccactacacagatgtcagcaacatgtctagactggccagacagagactgctgggaagaagctggtccgtccctgtgatcagacacctgttcgcccctctgaaggagtacttcgcctgcgtgagcagcggcaacagcaacgccaacagccggggccccagcttctctagcggcctggtgccactgtccctgagagggagccacatgggccccatggagatctacaaaaccgtgagcgcctggaagcggcagcctgtgcgcgtgctgagcctgtttcggaatatcgataaagtcctgaaaagcctgggattcctggagagcggctctggctccggcggtggcaccctgaagtacgtggaggatgtgacaaacgtggtcagacgggatgtggagaagtggggccccttcgatctggtgtacggcagcacccaacccctgggcagctcttgtgaccggtgccctggctggtacatgtttcagttccaccggatcctgcagtacgccctgccgagacaggagtcccagcggccattcttttggattttcatggacaacttgctgctgaccgaggatgaccaggaaactaccactcggttcctgcagaccgaagccgtgaccctgcaggacgtgagaggccgggactaccagaacgccatgcgggtgtggtccaacatccctggactgaaaagcaagcacgcacctctgacccctaaagaagaggagtacctgcaggcccaggtgcggagcagaagcaagctggacgcccctaaggtggatctgctggtgaagaattgcctcctgcccctgagagagtacttcaagtatttcagccagaatagtctgcccctgggaggcagcggcggcggcgccctggtgacatttgaggacgtcgccgtgcggttcacccaggaggaatgggctctgctggatccttctcagaaaatcctgtaccgggacgtgatgagagagacataccggaatctgacctccgtgggcatcaactgggaatgttgggaccttgaagcctgcttcagaagcctgggaagaaacctgagagtgcaggtggtgaagagaaagtgcgagctgaccaacagcggcccctgcgccgagggcggcccaagcagcggcgcccctcctcccagcggcggcagcccagccggctccccaacctctaccgaggagggcacctctgagtccgccacccccgagagcggccctggcacctccaccgagcccagcgagggcagcgcacccggcagccctgccggcagccccacctccacagaggagggaaccagcaccgagcccagcgaaggcagcgccccaggcaccagcaccgagcctagtgagcaggagattaaacggatcaacaagatcagaagaagacttgtgaaagacagcaacaccaagaaggccggcaagacaggccccatgaaaaccctgctggttagagtgatgacacccgatctgagagagcggctggaaaacctgagaaagaagcctgaaaatatcccccagcccatcagcaatacatctagagccaacctgaataagctgctgaccgattacaccgaaatgaagaaggcgatcctgcatgtgtactgggaagagttccagaaggaccctgtgggcctgatgagccgggtggcccagcctgccagcaagaagatcgatcagaacaagctgaaacctgagatggacgagaagggcaacctgaccaccgccggctttgcctgctctcagtgtggccagcccctgttcgtgtacaagctggagcaggtgtctgagaagggcaaggcttacaccaactacttcggacggtgcaatgtggccgagcacgaaaagctgatcctgctggcccagctgaagcccgagaaggatagcgacgaagccgtgacatatagcctgggaaagtttgggcagagggccctggatttctacagcattcatgtgaccaaggagtccacccaccccgtgaagcccctggcccagatcgccggaaacagatacgcctccggacctgtgggaaaggccctgagcgacgcatgtatgggcacaatcgcctccttcctgtctaagtaccaggacatcatcatcgaacaccagaaggtggtgaagggcaaccagaagagactggagagcctgcgggagctggccggcaaggaaaacctggaataccctagcgtgaccctgccacctcagcctcacaccaaggagggcgttgatgcctacaacgaagtgatcgcccgggtgcgaatgtgggtgaacctgaacctgtggcagaagctgaagctaagcagagatgatgccaagcctctgctgagactgaagggattcccttcctttcctctggtcgagagacaggccaacgaagtggactggtgggacatggtgtgtaacgtgaagaagctgatcaacgagaaaaaggaggatggcaaggtgttttggcagaatctggctggctacaagagacaggaagccctgagaccatacctgagcagcgaggaagatcggaagaagggaaagaaattcgctcggtaccagctgggcgacctgctgctgcacctggaaaagaagcacggcgaggactggggaaaggtgtacgacgaggcctgggagcggattgacaagaaagtggaaggcctgagcaagcacatcaagctggaagaggaacggagaagcgaggacgcccagagcaaggccgccctgaccgactggctgcgggctaaggccagcttcgtgatcgagggcctgaaggaggccgacaaggacgagttctgcagatgcgagctgaagctgcagaagtggtacggggacctgcggggaaagcccttcgccatcgaagccgagaacagcatcctggacatcagcggcttcagcaagcagtacaactgtgccttcatctggcagaaggacggcgtgaagaagctgaacctgtacctgatcatcaactacttcaagggcggcaagctgcggttcaagaagatcaaacctgaagccttcgaagccaacagattctacaccgtgatcaacaaaaagagcggcgagatcgtgcccatggaggtgaacttcaacttcgacgaccccaacctgatcatcctgcctctggcctttggcaagagacagggcagagaattcatctggaacgacctgctgtccctggaaaccggcagcctgaagctggccaacggaagagtgatcgagaagacactgtacaacagaagaacccggcaggatgagcctgccctgttcgtggccctgaccttcgagcggcgggaggtcctggactcctccaatatcaaaccaatgaacctgatcggcgtggcaagaggcgaaaacatccccgccgtgatcgccctgaccgaccccgagggctgcccactgagccggtttaaggatagcctgggaaacccaacccacatcctgagaatcggcgagagctataaggagaagcagcggaccatccaggccaagaaggaggtggagcagcggagagccggcggctacagccggaagtacgccagcaaagccaagaatctggcagacgatatggtgagaaacaccgctagagatctgctgtactacgccgtgacccaggatgccatgctgatcttcgccaacctgagccggggcttcggccggcagggcaagcggaccttcatggccgagagacagtacacacggatggaggactggctgaccgccaagctggcctacgagggcctgagcaagacctacctgtccaagacactggcccagtacacctccaagacatgcagcaactgtgggtttaccatcaccagcgccgactacgacagggtgctggagaagctgaagaagacagcaacaggctggatgaccacaattaacggcaaggagctgaaggtggagggccagattacctactacaacagatacaagagacagaacgtagtcaaggacctgtccgtcgagctggatagactgagcgaagaatctgtgaacaacgacatctcctcctggacaaagggcagaagcggagaagctctgagcctcctgaagaaaagattctcccatagacccgtgcaggagaagttcgtgtgcctgaactgcggcttcgagacacacgcagccgagcaagccgccctgaacatcgccagatcctggctgttcctgcggagccaggagtacaagaaataccagacaaacaagacaaccggcaacaccgataagagagccttcgtcgagacctggcagtccttttaccggaagaagcttaaggaggtgtggaaacctgccgtgcggtctggcggatctggcggaggctccaaggagaagctggtgaccttcgaggacgtggccgtgtacttcacccaggccgagtgggacggcctgagccccgcccagaggaccctgtacagggacgtgatgctggagaactacggcaacgtggccagcctgggcttccccctgctgaagcccgccgtgatcagccagctggagggcggcggcgagctgggcggccccagccccctggccgccggcaccggcctgtggggcctgaggaccggcggcggcccaagcagcggcgcccctcctcccagcggcggcagcccagccggctccccaacctctaccgaggagggcacctctgagtccgccacccccgagagcggccctggcacctccaccgagcccagcgagggcagcgcacccggcagccctgccggcagccccacctccacagaggagggaaccagcaccgagcccagcgaaggcagcgccccaggcaccagcaccgagcctagtgagcaggagattaaacggatcaacaagatcagaagaagacttgtgaaagacagcaacaccaagaaggccggcaagacaggccccatgaaaaccctgctggttagagtgatgacacccgatctgagagagcggctggaaaacctgagaaagaagcctgaaaatatcccccagcccatcagcaatacatctagagccaacctgaataagctgctgaccgattacaccgaaatgaagaaggcgatcctgcatgtgtactgggaagagttccagaaggaccctgtgggcctgatgagccgggtggcccagcctgccagcaagaagatcgatcagaacaagctgaaacctgagatggacgagaagggcaacctgaccaccgccggctttgcctgctctcagtgtggccagcccctgttcgtgtacaagctggagcaggtgtctgagaagggcaaggcttacaccaactacttcggacggtgcaatgtggccgagcacgaaaagctgatcctgctggcccagctgaagcccgagaaggatagcgacgaagccgtgacatatagcctgggaaagtttgggcagagggccctggatttctacagcattcatgtgaccaaggagtccacccaccccgtgaagcccctggcccagatcgccggaaacagatacgcctccggacctgtgggaaaggccctgagcgacgcatgtatgggcacaatcgcctccttcctgtctaagtaccaggacatcatcatcgaacaccagaaggtggtgaagggcaaccagaagagactggagagcctgcgggagctggccggcaaggaaaacctggaataccctagcgtgaccctgccacctcagcctcacaccaaggagggcgttgatgcctacaacgaagtgatcgcccgggtgcgaatgtgggtgaacctgaacctgtggcagaagctgaagctaagcagagatgatgccaagcctctgctgagactgaagggattcccttcctttcctctggtcgagagacaggccaacgaagtggactggtgggacatggtgtgtaacgtgaagaagctgatcaacgagaaaaaggaggatggcaaggtgttttggcagaatctggctggctacaagagacaggaagccctgagaccatacctgagcagcgaggaagatcggaagaagggaaagaaattcgctcggtaccagctgggcgacctgctgctgcacctggaaaagaagcacggcgaggactggggaaaggtgtacgacgaggcctgggagcggattgacaagaaagtggaaggcctgagcaagcacatcaagctggaagaggaacggagaagcgaggacgcccagagcaaggccgccctgaccgactggctgcgggctaaggccagcttcgtgatcgagggcctgaaggaggccgacaaggacgagttctgcagatgcgagctgaagctgcagaagtggtacggggacctgcggggaaagcccttcgccatcgaagccgagaacagcatcctggacatcagcggcttcagcaagcagtacaactgtgccttcatctggcagaaggacggcgtgaagaagctgaacctgtacctgatcatcaactacttcaagggcggcaagctgcggttcaagaagatcaaacctgaagccttcgaagccaacagattctacaccgtgatcaacaaaaagagcggcgagatcgtgcccatggaggtgaacttcaacttcgacgaccccaacctgatcatcctgcctctggcctttggcaagagacagggcagagaattcatctggaacgacctgctgtccctggaaaccggcagcctgaagctggccaacggaagagtgatcgagaagacactgtacaacagaagaacccggcaggatgagcctgccctgttcgtggccctgaccttcgagcggcgggaggtcctggactcctccaatatcaaaccaatgaacctgatcggcgtggcaagaggcgaaaacatccccgccgtgatcgccctgaccgaccccgagggctgcccactgagccggtttaaggatagcctgggaaacccaacccacatcctgagaatcggcgagagctataaggagaagcagcggaccatccaggccaagaaggaggtggagcagcggagagccggcggctacagccggaagtacgccagcaaagccaagaatctggcagacgatatggtgagaaacaccgctagagatctgctgtactacgccgtgacccaggatgccatgctgatcttcgccaacctgagccggggcttcggccggcagggcaagcggaccttcatggccgagagacagtacacacggatggaggactggctgaccgccaagctggcctacgagggcctgagcaagacctacctgtccaagacactggcccagtacacctccaagacatgcagcaactgtgggtttaccatcaccagcgccgactacgacagggtgctggagaagctgaagaagacagcaacaggctggatgaccacaattaacggcaaggagctgaaggtggagggccagattacctactacaacagatacaagagacagaacgtagtcaaggacctgtccgtcgagctggatagactgagcgaagaatctgtgaacaacgacatctcctcctggacaaagggcagaagcggagaagctctgagcctcctgaagaaaagattctcccatagacccgtgcaggagaagttcgtgtgcctgaactgcggcttcgagacacacgcagccgagcaagccgccctgaacatcgccagatcctggctgttcctgcggagccaggagtacaagaaataccagacaaacaagacaaccggcaacaccgataagagagccttcgtcgagacctggcagtccttttaccggaagaagcttaaggaggtgtggaaacctgccgtgcggtctggcggatctggcggaggctcctaaggagaagctggtgaccttcgaggacgtggccgtgtacttcacccaggccgagtgggacggcctgagccccgcccagaggaccctgtacagggacgtgatgctggagaactacggcaacgtggccagcctgggcttccccctgctgaagcccgccgtgatcagccagctggagggcggcggcgagctgggcggccccagccccctggccgccggcaccggcctgtggggcctgaggaccggcggatctggctccggcagcggccccaagaaaaagagaaaagtctaagctgccttctgcggggcttgccttctggccatgcccttcttctctcccttgcacctgtacctcttggtctttgaataaagcctgagtaggaaggctagcaaaaaaaaaaaaaaaaaaaaaaaaaaaaaaaaaaaaaaaaaaaaaaaaaaaaaaaaaaaaaaaaaaaaaaaaaaaaaaaa

SEQ ID NO: 16406 - RNA, 9485 nt, synthetic construct
  source 1..9485: mol_type = other RNA
aggaaataagagagaaaagaagagtaagaagaaatataagagccaccatggcccctaagaagaagcgtaaagtgagccggatggaacgcctcgtctacgaggtgcggcagaagtgcagaaacatcgaggacatctgcatctcctgcggatctctgaacgtgaccctggagcacccactgttcatcggcggcatgtgccagaactgtaaaaactgttttctggagtgtgcctatcaatacgacgatgacggctaccagagctactgcaccatctgttgcggcggaagagaggtgctgatgtgtggaaataacaactgctgccggtgcttctgcgtggaatgcgtggacctgctggtgggccccggcgccgcccaggccgctattaaggaagatccttggaactgctacatgtgcggccacaagggcacatacggcctgctgagacggagagaggactggcctagcagactgcagatgttcttcgccaataaccacgaccaggagttcgacccccctaaggtgtaccctcccgtccccgccgagaagagaaagcccatccgggtcctgagcctgttcgatggcatcgccaccggtctgctggtgctgaaggacctgggcatccaggtggataggtacattgcctccgaggtgtgcgaggactccatcaccgtgggaatggtgcgtcatcagggcaagatcatgtacgtgggcgacgtgcggagcgtgacacagaagcatatccaggagtggggccctttcgacctggtgatcggcggcagcccttgcaatgacctgagcatcgtgaacccagcccggaagggcctgtacgagggaaccggcagactgttcttcgagttttacagactgctgcacgacgcccggcctaaggaaggcgacgaccggcccttcttttggctgttcgagaatgtggtggccatgggagtcagcgacaagcgggatattagccggttcctggagagcaaccccgtgatgatcgatgccaaggaagtgagcgccgcccaccgggccagatacttctggggcaatctgcctggcatgaacagacccctggccagcaccgtgaacgacaagctggagctgcaggagtgcctggagcacggccggatcgccaagttcagcaaggtgagaaccatcaccacccgaagcaacagcatcaaacaaggcaaggaccagcactttcctgtgttcatgaacgagaaggaggacatcctgtggtgtaccgagatggagagagtgttcgggttcccagtccactacacagatgtcagcaacatgtctagactggccagacagagactgctgggaagaagctggtccgtccctgtgatcagacacctgttcgcccctctgaaggagtacttcgcctgcgtgagcagcggcaacagcaacgccaacagccggggccccagcttctctagcggcctggtgccactgtccctgagagggagccacatgggccccatggagatctacaaaaccgtgagcgcctggaagcggcagcctgtgcgcgtgctgagcctgtttcggaatatcgataaagtcctgaaaagcctgggattcctggagagcggctctggctccggcggtggcaccctgaagtacgtggaggatgtgacaaacgtggtcagacgggatgtggagaagtggggccccttcgatctggtgtacggcagcacccaacccctgggcagctcttgtgaccggtgccctggctggtacatgtttcagttccaccggatcctgcagtacgccctgccgagacaggagtcccagcggccattcttttggattttcatggacaacttgctgctgaccgaggatgaccaggaaactaccactcggttcctgcagaccgaagccgtgaccctgcaggacgtgagaggccgggactaccagaacgccatgcgggtgtggtccaacatccctggactgaaaagcaagcacgcacctctgacccctaaagaagaggagtacctgcaggcccaggtgcggagcagaagcaagctggacgcccctaaggtggatctgctggtgaagaattgcctcctgcccctgagagagtacttcaagtatttcagccagaatagtctgcccctgggaggcagcggcggcggcgccctggtgacatttgaggacgtcgccgtgcggttcacccaggaggaatgggctctgctggatccttctcagaaaatcctgtaccgggacgtgatgagagagacataccggaatctgacctccgtgggcatcaactgggaatgttgggaccttgaagcctgcttcagaagcctgggaagaaacctgagagtgcaggtggtgaagagaaagtgcgagctgaccaacagcggcccctgcgccgagggcggcccaagcagcggcgcccctcctcccagcggcggcagcccagccggctccccaacctctaccgaggagggcacctctgagtccgccacccccgagagcggccctggcacctccaccgagcccagcgagggcagcgcacccggcagccctgccggcagccccacctccacagaggagggaaccagcaccgagcccagcgaaggcagcgccccaggcaccagcaccgagcctagtgagcaggagattaaacggatcaacaagatcagaagaagacttgtgaaagacagcaacaccaagaaggccggcaagacaggccccatgaaaaccctgctggttagagtgatgacacccgatctgagagagcggctggaaaacctgagaaagaagcctgaaaatatcccccagcccatcagcaatacatctagagccaacctgaataagctgctgaccgattacaccgaaatgaagaaggcgatcctgcatgtgtactgggaagagttccagaaggaccctgtgggcctgatgagccgggtggcccagcctgccagcaagaagatcgatcagaacaagctgaaacctgagatggacgagaagggcaacctgaccaccgccggctttgcctgctctcagtgtggccagcccctgttcgtgtacaagctggagcaggtgtctgagaagggcaaggcttacaccaactacttcggacggtgcaatgtggccgagcacgaaaagctgatcctgctggcccagctgaagcccgagaaggatagcgacgaagccgtgacatatagcctgggaaagtttgggcagagggccctggatttctacagcattcatgtgaccaaggagtccacccaccccgtgaagcccctggcccagatcgccggaaacagatacgcctccggacctgtgggaaaggccctgagcgacgcatgtatgggcacaatcgcctccttcctgtctaagtaccaggacatcatcatcgaacaccagaaggtggtgaagggcaaccagaagagactggagagcctgcgggagctggccggcaaggaaaacctggaataccctagcgtgaccctgccacctcagcctcacaccaaggagggcgttgatgcctacaacgaagtgatcgcccgggtgcgaatgtgggtgaacctgaacctgtggcagaagctgaagctaagcagagatgatgccaagcctctgctgagactgaagggattcccttcctttcctctggtcgagagacaggccaacgaagtggactggtgggacatggtgtgtaacgtgaagaagctgatcaacgagaaaaaggaggatggcaaggtgttttggcagaatctggctggctacaagagacaggaagccctgagaccatacctgagcagcgaggaagatcggaagaagggaaagaaattcgctcggtaccagctgggcgacctgctgctgcacctggaaaagaagcacggcgaggactggggaaaggtgtacgacgaggcctgggagcggattgacaagaaagtggaaggcctgagcaagcacatcaagctggaagaggaacggagaagcgaggacgcccagagcaaggccgccctgaccgactggctgcgggctaaggccagcttcgtgatcgagggcctgaaggaggccgacaaggacgagttctgcagatgcgagctgaagctgcagaagtggtacggggacctgcggggaaagcccttcgccatcgaagccgagaacagcatcctggacatcagcggcttcagcaagcagtacaactgtgccttcatctggcagaaggacggcgtgaagaagctgaacctgtacctgatcatcaactacttcaagggcggcaagctgcggttcaagaagatcaaacctgaagccttcgaagccaacagattctacaccgtgatcaacaaaaagagcggcgagatcgtgcccatggaggtgaacttcaacttcgacgaccccaacctgatcatcctgcctctggcctttggcaagagacagggcagagaattcatctggaacgacctgctgtccctggaaaccggcagcctgaagctggccaacggaagagtgatcgagaagacactgtacaacagaagaacccggcaggatgagcctgccctgttcgtggccctgaccttcgagcggcgggaggtcctggactcctccaatatcaaaccaatgaacctgatcggcgtggcaagaggcgaaaacatccccgccgtgatcgccctgaccgaccccgagggctgcccactgagccggtttaaggatagcctgggaaacccaacccacatcctgagaatcggcgagagctataaggagaagcagcggaccatccaggccaagaaggaggtggagcagcggagagccggcggctacagccggaagtacgccagcaaagccaagaatctggcagacgatatggtgagaaacaccgctagagatctgctgtactacgccgtgacccaggatgccatgctgatcttcgccaacctgagccggggcttcggccggcagggcaagcggaccttcatggccgagagacagtacacacggatggaggactggctgaccgccaagctggcctacgagggcctgagcaagacctacctgtccaagacactggcccagtacacctccaagacatgcagcaactgtgggtttaccatcaccagcgccgactacgacagggtgctggagaagctgaagaagacagcaacaggctggatgaccacaattaacggcaaggagctgaaggtggagggccagattacctactacaacagatacaagagacagaacgtagtcaaggacctgtccgtcgagctggatagactgagcgaagaatctgtgaacaacgacatctcctcctggacaaagggcagaagcggagaagctctgagcctcctgaagaaaagattctcccatagacccgtgcaggagaagttcgtgtgcctgaactgcggcttcgagacacacgcagccgagcaagccgccctgaacatcgccagatcctggctgttcctgcggagccaggagtacaagaaataccagacaaacaagacaaccggcaacaccgataagagagccttcgtcgagacctggcagtccttttaccggaagaagcttaaggaggtgtggaaacctgccgtgcggtctggcggatctggcggaggctccaagcccggcgccctgagcttcgccgacgtggccgtgtacttcagcagcgaggagtggggctgcctgaggcccgcccagagggccctgtacagggacgtgatgagggagacctacggccacctgggcgccctgggctgcgccggccccaagcccgccctgatcagctggctggagaggaacaccgacgactgggagcccgccgccctggacccccaggagtgccccaggggcgtggccgtgcagggcggcccaagcagcggcgcccctcctcccagcggcggcagcccagccggctccccaacctctaccgaggagggcacctctgagtccgccacccccgagagcggccctggcacctccaccgagcccagcgagggcagcgcacccggcagccctgccggcagccccacctccacagaggagggaaccagcaccgagcccagcgaaggcagcgccccaggcaccagcaccgagcctagtgagcaggagattaaacggatcaacaagatcagaagaagacttgtgaaagacagcaacaccaagaaggccggcaagacaggccccatgaaaaccctgctggttagagtgatgacacccgatctgagagagcggctggaaaacctgagaaagaagcctgaaaatatcccccagcccatcagcaatacatctagagccaacctgaataagctgctgaccgattacaccgaaatgaagaaggcgatcctgcatgtgtactgggaagagttccagaaggaccctgtgggcctgatgagccgggtggcccagcctgccagcaagaagatcgatcagaacaagctgaaacctgagatggacgagaagggcaacctgaccaccgccggctttgcctgctctcagtgtggccagcccctgttcgtgtacaagctggagcaggtgtctgagaagggcaaggcttacaccaactacttcggacggtgcaatgtggccgagcacgaaaagctgatcctgctggcccagctgaagcccgagaaggatagcgacgaagccgtgacatatagcctgggaaagtttgggcagagggccctggatttctacagcattcatgtgaccaaggagtccacccaccccgtgaagcccctggcccagatcgccggaaacagatacgcctccggacctgtgggaaaggccctgagcgacgcatgtatgggcacaatcgcctccttcctgtctaagtaccaggacatcatcatcgaacaccagaaggtggtgaagggcaaccagaagagactggagagcctgcgggagctggccggcaaggaaaacctggaataccctagcgtgaccctgccacctcagcctcacaccaaggagggcgttgatgcctacaacgaagtgatcgcccgggtgcgaatgtgggtgaacctgaacctgtggcagaagctgaagctaagcagagatgatgccaagcctctgctgagactgaagggattcccttcctttcctctggtcgagagacaggccaacgaagtggactggtgggacatggtgtgtaacgtgaagaagctgatcaacgagaaaaaggaggatggcaaggtgttttggcagaatctggctggctacaagagacaggaagccctgagaccatacctgagcagcgaggaagatcggaagaagggaaagaaattcgctcggtaccagctgggcgacctgctgctgcacctggaaaagaagcacggcgaggactggggaaaggtgtacgacgaggcctgggagcggattgacaagaaagtggaaggcctgagcaagcacatcaagctggaagaggaacggagaagcgaggacgcccagagcaaggccgccctgaccgactggctgcgggctaaggccagcttcgtgatcgagggcctgaaggaggccgacaaggacgagttctgcagatgcgagctgaagctgcagaagtggtacggggacctgcggggaaagcccttcgccatcgaagccgagaacagcatcctggacatcagcggcttcagcaagcagtacaactgtgccttcatctggcagaaggacggcgtgaagaagctgaacctgtacctgatcatcaactacttcaagggcggcaagctgcggttcaagaagatcaaacctgaagccttcgaagccaacagattctacaccgtgatcaacaaaaagagcggcgagatcgtgcccatggaggtgaacttcaacttcgacgaccccaacctgatcatcctgcctctggcctttggcaagagacagggcagagaattcatctggaacgacctgctgtccctggaaaccggcagcctgaagctggccaacggaagagtgatcgagaagacactgtacaacagaagaacccggcaggatgagcctgccctgttcgtggccctgaccttcgagcggcgggaggtcctggactcctccaatatcaaaccaatgaacctgatcggcgtggcaagaggcgaaaacatccccgccgtgatcgccctgaccgaccccgagggctgcccactgagccggtttaaggatagcctgggaaacccaacccacatcctgagaatcggcgagagctataaggagaagcagcggaccatccaggccaagaaggaggtggagcagcggagagccggcggctacagccggaagtacgccagcaaagccaagaatctggcagacgatatggtgagaaacaccgctagagatctgctgtactacgccgtgacccaggatgccatgctgatcttcgccaacctgagccggggcttcggccggcagggcaagcggaccttcatggccgagagacagtacacacggatggaggactggctgaccgccaagctggcctacgagggcctgagcaagacctacctgtccaagacactggcccagtacacctccaagacatgcagcaactgtgggtttaccatcaccagcgccgactacgacagggtgctggagaagctgaagaagacagcaacaggctggatgaccacaattaacggcaaggagctgaaggtggagggccagattacctactacaacagatacaagagacagaacgtagtcaaggacctgtccgtcgagctggatagactgagcgaagaatctgtgaacaacgacatctcctcctggacaaagggcagaagcggagaagctctgagcctcctgaagaaaagattctcccatagacccgtgcaggagaagttcgtgtgcctgaactgcggcttcgagacacacgcagccgagcaagccgccctgaacatcgccagatcctggctgttcctgcggagccaggagtacaagaaataccagacaaacaagacaaccggcaacaccgataagagagccttcgtcgagacctggcagtccttttaccggaagaagcttaaggaggtgtggaaacctgccgtgcggtctggcggatctggcggaggctcctaagcccggcgccctgagcttcgccgacgtggccgtgtacttcagcagcgaggagtggggctgcctgaggcccgcccagagggccctgtacagggacgtgatgagggagacctacggccacctgggcgccctgggctgcgccggccccaagcccgccctgatcagctggctggagaggaacaccgacgactgggagcccgccgccctggacccccaggagtgccccaggggcgtggccgtgcagggatctggctccggcagcggccccaagaaaaagagaaaagtctaagctgccttctgcggggcttgccttctggccatgcccttcttctctcccttgcacctgtacctcttggtctttgaataaagcctgagtaggaaggctagcaaaaaaaaaaaaaaaaaaaaaaaaaaaaaaaaaaaaaaaaaaaaaaaaaaaaaaaaaaaaaaaaaaaaaaaaaaaaaaaa

SEQ ID NO: 16407 - RNA, 9485 nt, synthetic construct
  source 1..9485: mol_type = other RNA
aggaaataagagagaaaagaagagtaagaagaaatataagagccaccatggcccctaagaagaagcgtaaagtgagccggatggaacgcctcgtctacgaggtgcggcagaagtgcagaaacatcgaggacatctgcatctcctgcggatctctgaacgtgaccctggagcacccactgttcatcggcggcatgtgccagaactgtaaaaactgttttctggagtgtgcctatcaatacgacgatgacggctaccagagctactgcaccatctgttgcggcggaagagaggtgctgatgtgtggaaataacaactgctgccggtgcttctgcgtggaatgcgtggacctgctggtgggccccggcgccgcccaggccgctattaaggaagatccttggaactgctacatgtgcggccacaagggcacatacggcctgctgagacggagagaggactggcctagcagactgcagatgttcttcgccaataaccacgaccaggagttcgacccccctaaggtgtaccctcccgtccccgccgagaagagaaagcccatccgggtcctgagcctgttcgatggcatcgccaccggtctgctggtgctgaaggacctgggcatccaggtggataggtacattgcctccgaggtgtgcgaggactccatcaccgtgggaatggtgcgtcatcagggcaagatcatgtacgtgggcgacgtgcggagcgtgacacagaagcatatccaggagtggggccctttcgacctggtgatcggcggcagcccttgcaatgacctgagcatcgtgaacccagcccggaagggcctgtacgagggaaccggcagactgttcttcgagttttacagactgctgcacgacgcccggcctaaggaaggcgacgaccggcccttcttttggctgttcgagaatgtggtggccatgggagtcagcgacaagcgggatattagccggttcctggagagcaaccccgtgatgatcgatgccaaggaagtgagcgccgcccaccgggccagatacttctggggcaatctgcctggcatgaacagacccctggccagcaccgtgaacgacaagctggagctgcaggagtgcctggagcacggccggatcgccaagttcagcaaggtgagaaccatcaccacccgaagcaacagcatcaaacaaggcaaggaccagcactttcctgtgttcatgaacgagaaggaggacatcctgtggtgtaccgagatggagagagtgttcgggttcccagtccactacacagatgtcagcaacatgtctagactggccagacagagactgctgggaagaagctggtccgtccctgtgatcagacacctgttcgcccctctgaaggagtacttcgcctgcgtgagcagcggcaacagcaacgccaacagccggggccccagcttctctagcggcctggtgccactgtccctgagagggagccacatgggccccatggagatctacaaaaccgtgagcgcctggaagcggcagcctgtgcgcgtgctgagcctgtttcggaatatcgataaagtcctgaaaagcctgggattcctggagagcggctctggctccggcggtggcaccctgaagtacgtggaggatgtgacaaacgtggtcagacgggatgtggagaagtggggccccttcgatctggtgtacggcagcacccaacccctgggcagctcttgtgaccggtgccctggctggtacatgtttcagttccaccggatcctgcagtacgccctgccgagacaggagtcccagcggccattcttttggattttcatggacaacttgctgctgaccgaggatgaccaggaaactaccactcggttcctgcagaccgaagccgtgaccctgcaggacgtgagaggccgggactaccagaacgccatgcgggtgtggtccaacatccctggactgaaaagcaagcacgcacctctgacccctaaagaagaggagtacctgcaggcccaggtgcggagcagaagcaagctggacgcccctaaggtggatctgctggtgaagaattgcctcctgcccctgagagagtacttcaagtatttcagccagaatagtctgcccctgggaggcagcggcggcggcgccctggtgacatttgaggacgtcgccgtgcggttcacccaggaggaatgggctctgctggatccttctcagaaaatcctgtaccgggacgtgatgagagagacataccggaatctgacctccgtgggcatcaactgggaatgttgggaccttgaagcctgcttcagaagcctgggaagaaacctgagagtgcaggtggtgaagagaaagtgcgagctgaccaacagcggcccctgcgccgagggcggcccaagcagcggcgcccctcctcccagcggcggcagcccagccggctccccaacctctaccgaggagggcacctctgagtccgccacccccgagagcggccctggcacctccaccgagcccagcgagggcagcgcacccggcagccctgccggcagccccacctccacagaggagggaaccagcaccgagcccagcgaaggcagcgccccaggcaccagcaccgagcctagtgagcaggagattaaacggatcaacaagatcagaagaagacttgtgaaagacagcaacaccaagaaggccggcaagacaggccccatgaaaaccctgctggttagagtgatgacacccgatctgagagagcggctggaaaacctgagaaagaagcctgaaaatatcccccagcccatcagcaatacatctagagccaacctgaataagctgctgaccgattacaccgaaatgaagaaggcgatcctgcatgtgtactgggaagagttccagaaggaccctgtgggcctgatgagccgggtggcccagcctgccagcaagaagatcgatcagaacaagctgaaacctgagatggacgagaagggcaacctgaccaccgccggctttgcctgctctcagtgtggccagcccctgttcgtgtacaagctggagcaggtgtctgagaagggcaaggcttacaccaactacttcggacggtgcaatgtggccgagcacgaaaagctgatcctgctggcccagctgaagcccgagaaggatagcgacgaagccgtgacatatagcctgggaaagtttgggcagagggccctggatttctacagcattcatgtgaccaaggagtccacccaccccgtgaagcccctggcccagatcgccggaaacagatacgcctccggacctgtgggaaaggccctgagcgacgcatgtatgggcacaatcgcctccttcctgtctaagtaccaggacatcatcatcgaacaccagaaggtggtgaagggcaaccagaagagactggagagcctgcgggagctggccggcaaggaaaacctggaataccctagcgtgaccctgccacctcagcctcacaccaaggagggcgttgatgcctacaacgaagtgatcgcccgggtgcgaatgtgggtgaacctgaacctgtggcagaagctgaagctaagcagagatgatgccaagcctctgctgagactgaagggattcccttcctttcctctggtcgagagacaggccaacgaagtggactggtgggacatggtgtgtaacgtgaagaagctgatcaacgagaaaaaggaggatggcaaggtgttttggcagaatctggctggctacaagagacaggaagccctgagaccatacctgagcagcgaggaagatcggaagaagggaaagaaattcgctcggtaccagctgggcgacctgctgctgcacctggaaaagaagcacggcgaggactggggaaaggtgtacgacgaggcctgggagcggattgacaagaaagtggaaggcctgagcaagcacatcaagctggaagaggaacggagaagcgaggacgcccagagcaaggccgccctgaccgactggctgcgggctaaggccagcttcgtgatcgagggcctgaaggaggccgacaaggacgagttctgcagatgcgagctgaagctgcagaagtggtacggggacctgcggggaaagcccttcgccatcgaagccgagaacagcatcctggacatcagcggcttcagcaagcagtacaactgtgccttcatctggcagaaggacggcgtgaagaagctgaacctgtacctgatcatcaactacttcaagggcggcaagctgcggttcaagaagatcaaacctgaagccttcgaagccaacagattctacaccgtgatcaacaaaaagagcggcgagatcgtgcccatggaggtgaacttcaacttcgacgaccccaacctgatcatcctgcctctggcctttggcaagagacagggcagagaattcatctggaacgacctgctgtccctggaaaccggcagcctgaagctggccaacggaagagtgatcgagaagacactgtacaacagaagaacccggcaggatgagcctgccctgttcgtggccctgaccttcgagcggcgggaggtcctggactcctccaatatcaaaccaatgaacctgatcggcgtggcaagaggcgaaaacatccccgccgtgatcgccctgaccgaccccgagggctgcccactgagccggtttaaggatagcctgggaaacccaacccacatcctgagaatcggcgagagctataaggagaagcagcggaccatccaggccaagaaggaggtggagcagcggagagccggcggctacagccggaagtacgccagcaaagccaagaatctggcagacgatatggtgagaaacaccgctagagatctgctgtactacgccgtgacccaggatgccatgctgatcttcgccaacctgagccggggcttcggccggcagggcaagcggaccttcatggccgagagacagtacacacggatggaggactggctgaccgccaagctggcctacgagggcctgagcaagacctacctgtccaagacactggcccagtacacctccaagacatgcagcaactgtgggtttaccatcaccagcgccgactacgacagggtgctggagaagctgaagaagacagcaacaggctggatgaccacaattaacggcaaggagctgaaggtggagggccagattacctactacaacagatacaagagacagaacgtagtcaaggacctgtccgtcgagctggatagactgagcgaagaatctgtgaacaacgacatctcctcctggacaaagggcagaagcggagaagctctgagcctcctgaagaaaagattctcccatagacccgtgcaggagaagttcgtgtgcctgaactgcggcttcgagacacacgcagccgagcaagccgccctgaacatcgccagatcctggctgttcctgcggagccaggagtacaagaaataccagacaaacaagacaaccggcaacaccgataagagagccttcgtcgagacctggcagtccttttaccggaagaagcttaaggaggtgtggaaacctgccgtgcggtctggcggatctggcggaggctccaagcccggcaccgtgagcttcgccgacgtggccgtgtacttcagccccgaggagtggaggtacctgaggcccgcccagagggccctgtacagggaggtgatgagggagacctacggcctgctgacctacctggacgtgggctgcgccaagcccgccctgatcagctgggtggaggaggagagcgaggtgtggggccccggcgcccaggaccccgaggtggccatgtgcaggaccgaggtgcacggcggcccaagcagcggcgcccctcctcccagcggcggcagcccagccggctccccaacctctaccgaggagggcacctctgagtccgccacccccgagagcggccctggcacctccaccgagcccagcgagggcagcgcacccggcagccctgccggcagccccacctccacagaggagggaaccagcaccgagcccagcgaaggcagcgccccaggcaccagcaccgagcctagtgagcaggagattaaacggatcaacaagatcagaagaagacttgtgaaagacagcaacaccaagaaggccggcaagacaggccccatgaaaaccctgctggttagagtgatgacacccgatctgagagagcggctggaaaacctgagaaagaagcctgaaaatatcccccagcccatcagcaatacatctagagccaacctgaataagctgctgaccgattacaccgaaatgaagaaggcgatcctgcatgtgtactgggaagagttccagaaggaccctgtgggcctgatgagccgggtggcccagcctgccagcaagaagatcgatcagaacaagctgaaacctgagatggacgagaagggcaacctgaccaccgccggctttgcctgctctcagtgtggccagcccctgttcgtgtacaagctggagcaggtgtctgagaagggcaaggcttacaccaactacttcggacggtgcaatgtggccgagcacgaaaagctgatcctgctggcccagctgaagcccgagaaggatagcgacgaagccgtgacatatagcctgggaaagtttgggcagagggccctggatttctacagcattcatgtgaccaaggagtccacccaccccgtgaagcccctggcccagatcgccggaaacagatacgcctccggacctgtgggaaaggccctgagcgacgcatgtatgggcacaatcgcctccttcctgtctaagtaccaggacatcatcatcgaacaccagaaggtggtgaagggcaaccagaagagactggagagcctgcgggagctggccggcaaggaaaacctggaataccctagcgtgaccctgccacctcagcctcacaccaaggagggcgttgatgcctacaacgaagtgatcgcccgggtgcgaatgtgggtgaacctgaacctgtggcagaagctgaagctaagcagagatgatgccaagcctctgctgagactgaagggattcccttcctttcctctggtcgagagacaggccaacgaagtggactggtgggacatggtgtgtaacgtgaagaagctgatcaacgagaaaaaggaggatggcaaggtgttttggcagaatctggctggctacaagagacaggaagccctgagaccatacctgagcagcgaggaagatcggaagaagggaaagaaattcgctcggtaccagctgggcgacctgctgctgcacctggaaaagaagcacggcgaggactggggaaaggtgtacgacgaggcctgggagcggattgacaagaaagtggaaggcctgagcaagcacatcaagctggaagaggaacggagaagcgaggacgcccagagcaaggccgccctgaccgactggctgcgggctaaggccagcttcgtgatcgagggcctgaaggaggccgacaaggacgagttctgcagatgcgagctgaagctgcagaagtggtacggggacctgcggggaaagcccttcgccatcgaagccgagaacagcatcctggacatcagcggcttcagcaagcagtacaactgtgccttcatctggcagaaggacggcgtgaagaagctgaacctgtacctgatcatcaactacttcaagggcggcaagctgcggttcaagaagatcaaacctgaagccttcgaagccaacagattctacaccgtgatcaacaaaaagagcggcgagatcgtgcccatggaggtgaacttcaacttcgacgaccccaacctgatcatcctgcctctggcctttggcaagagacagggcagagaattcatctggaacgacctgctgtccctggaaaccggcagcctgaagctggccaacggaagagtgatcgagaagacactgtacaacagaagaacccggcaggatgagcctgccctgttcgtggccctgaccttcgagcggcgggaggtcctggactcctccaatatcaaaccaatgaacctgatcggcgtggcaagaggcgaaaacatccccgccgtgatcgccctgaccgaccccgagggctgcccactgagccggtttaaggatagcctgggaaacccaacccacatcctgagaatcggcgagagctataaggagaagcagcggaccatccaggccaagaaggaggtggagcagcggagagccggcggctacagccggaagtacgccagcaaagccaagaatctggcagacgatatggtgagaaacaccgctagagatctgctgtactacgccgtgacccaggatgccatgctgatcttcgccaacctgagccggggcttcggccggcagggcaagcggaccttcatggccgagagacagtacacacggatggaggactggctgaccgccaagctggcctacgagggcctgagcaagacctacctgtccaagacactggcccagtacacctccaagacatgcagcaactgtgggtttaccatcaccagcgccgactacgacagggtgctggagaagctgaagaagacagcaacaggctggatgaccacaattaacggcaaggagctgaaggtggagggccagattacctactacaacagatacaagagacagaacgtagtcaaggacctgtccgtcgagctggatagactgagcgaagaatctgtgaacaacgacatctcctcctggacaaagggcagaagcggagaagctctgagcctcctgaagaaaagattctcccatagacccgtgcaggagaagttcgtgtgcctgaactgcggcttcgagacacacgcagccgagcaagccgccctgaacatcgccagatcctggctgttcctgcggagccaggagtacaagaaataccagacaaacaagacaaccggcaacaccgataagagagccttcgtcgagacctggcagtccttttaccggaagaagcttaaggaggtgtggaaacctgccgtgcggtctggcggatctggcggaggctcctaagcccggcaccgtgagcttcgccgacgtggccgtgtacttcagccccgaggagtggaggtacctgaggcccgcccagagggccctgtacagggaggtgatgagggagacctacggcctgctgacctacctggacgtgggctgcgccaagcccgccctgatcagctgggtggaggaggagagcgaggtgtggggccccggcgcccaggaccccgaggtggccatgtgcaggaccgaggtgcacggatctggctccggcagcggccccaagaaaaagagaaaagtctaagctgccttctgcggggcttgccttctggccatgcccttcttctctcccttgcacctgtacctcttggtctttgaataaagcctgagtaggaaggctagcaaaaaaaaaaaaaaaaaaaaaaaaaaaaaaaaaaaaaaaaaaaaaaaaaaaaaaaaaaaaaaaaaaaaaaaaaaaaaaaa

SEQ ID NO: 16408 - RNA, 9485 nt, synthetic construct
  source 1..9485: mol_type = other RNA
aggaaataagagagaaaagaagagtaagaagaaatataagagccaccatggcccctaagaagaagcgtaaagtgagccggatggaacgcctcgtctacgaggtgcggcagaagtgcagaaacatcgaggacatctgcatctcctgcggatctctgaacgtgaccctggagcacccactgttcatcggcggcatgtgccagaactgtaaaaactgttttctggagtgtgcctatcaatacgacgatgacggctaccagagctactgcaccatctgttgcggcggaagagaggtgctgatgtgtggaaataacaactgctgccggtgcttctgcgtggaatgcgtggacctgctggtgggccccggcgccgcccaggccgctattaaggaagatccttggaactgctacatgtgcggccacaagggcacatacggcctgctgagacggagagaggactggcctagcagactgcagatgttcttcgccaataaccacgaccaggagttcgacccccctaaggtgtaccctcccgtccccgccgagaagagaaagcccatccgggtcctgagcctgttcgatggcatcgccaccggtctgctggtgctgaaggacctgggcatccaggtggataggtacattgcctccgaggtgtgcgaggactccatcaccgtgggaatggtgcgtcatcagggcaagatcatgtacgtgggcgacgtgcggagcgtgacacagaagcatatccaggagtggggccctttcgacctggtgatcggcggcagcccttgcaatgacctgagcatcgtgaacccagcccggaagggcctgtacgagggaaccggcagactgttcttcgagttttacagactgctgcacgacgcccggcctaaggaaggcgacgaccggcccttcttttggctgttcgagaatgtggtggccatgggagtcagcgacaagcgggatattagccggttcctggagagcaaccccgtgatgatcgatgccaaggaagtgagcgccgcccaccgggccagatacttctggggcaatctgcctggcatgaacagacccctggccagcaccgtgaacgacaagctggagctgcaggagtgcctggagcacggccggatcgccaagttcagcaaggtgagaaccatcaccacccgaagcaacagcatcaaacaaggcaaggaccagcactttcctgtgttcatgaacgagaaggaggacatcctgtggtgtaccgagatggagagagtgttcgggttcccagtccactacacagatgtcagcaacatgtctagactggccagacagagactgctgggaagaagctggtccgtccctgtgatcagacacctgttcgcccctctgaaggagtacttcgcctgcgtgagcagcggcaacagcaacgccaacagccggggccccagcttctctagcggcctggtgccactgtccctgagagggagccacatgggccccatggagatctacaaaaccgtgagcgcctggaagcggcagcctgtgcgcgtgctgagcctgtttcggaatatcgataaagtcctgaaaagcctgggattcctggagagcggctctggctccggcggtggcaccctgaagtacgtggaggatgtgacaaacgtggtcagacgggatgtggagaagtggggccccttcgatctggtgtacggcagcacccaacccctgggcagctcttgtgaccggtgccctggctggtacatgtttcagttccaccggatcctgcagtacgccctgccgagacaggagtcccagcggccattcttttggattttcatggacaacttgctgctgaccgaggatgaccaggaaactaccactcggttcctgcagaccgaagccgtgaccctgcaggacgtgagaggccgggactaccagaacgccatgcgggtgtggtccaacatccctggactgaaaagcaagcacgcacctctgacccctaaagaagaggagtacctgcaggcccaggtgcggagcagaagcaagctggacgcccctaaggtggatctgctggtgaagaattgcctcctgcccctgagagagtacttcaagtatttcagccagaatagtctgcccctgggaggcagcggcggcggcgccctggtgacatttgaggacgtcgccgtgcggttcacccaggaggaatgggctctgctggatccttctcagaaaatcctgtaccgggacgtgatgagagagacataccggaatctgacctccgtgggcatcaactgggaatgttgggaccttgaagcctgcttcagaagcctgggaagaaacctgagagtgcaggtggtgaagagaaagtgcgagctgaccaacagcggcccctgcgccgagggcggcccaagcagcggcgcccctcctcccagcggcggcagcccagccggctccccaacctctaccgaggagggcacctctgagtccgccacccccgagagcggccctggcacctccaccgagcccagcgagggcagcgcacccggcagccctgccggcagccccacctccacagaggagggaaccagcaccgagcccagcgaaggcagcgccccaggcaccagcaccgagcctagtgagcaggagattaaacggatcaacaagatcagaagaagacttgtgaaagacagcaacaccaagaaggccggcaagacaggccccatgaaaaccctgctggttagagtgatgacacccgatctgagagagcggctggaaaacctgagaaagaagcctgaaaatatcccccagcccatcagcaatacatctagagccaacctgaataagctgctgaccgattacaccgaaatgaagaaggcgatcctgcatgtgtactgggaagagttccagaaggaccctgtgggcctgatgagccgggtggcccagcctgccagcaagaagatcgatcagaacaagctgaaacctgagatggacgagaagggcaacctgaccaccgccggctttgcctgctctcagtgtggccagcccctgttcgtgtacaagctggagcaggtgtctgagaagggcaaggcttacaccaactacttcggacggtgcaatgtggccgagcacgaaaagctgatcctgctggcccagctgaagcccgagaaggatagcgacgaagccgtgacatatagcctgggaaagtttgggcagagggccctggatttctacagcattcatgtgaccaaggagtccacccaccccgtgaagcccctggcccagatcgccggaaacagatacgcctccggacctgtgggaaaggccctgagcgacgcatgtatgggcacaatcgcctccttcctgtctaagtaccaggacatcatcatcgaacaccagaaggtggtgaagggcaaccagaagagactggagagcctgcgggagctggccggcaaggaaaacctggaataccctagcgtgaccctgccacctcagcctcacaccaaggagggcgttgatgcctacaacgaagtgatcgcccgggtgcgaatgtgggtgaacctgaacctgtggcagaagctgaagctaagcagagatgatgccaagcctctgctgagactgaagggattcccttcctttcctctggtcgagagacaggccaacgaagtggactggtgggacatggtgtgtaacgtgaagaagctgatcaacgagaaaaaggaggatggcaaggtgttttggcagaatctggctggctacaagagacaggaagccctgagaccatacctgagcagcgaggaagatcggaagaagggaaagaaattcgctcggtaccagctgggcgacctgctgctgcacctggaaaagaagcacggcgaggactggggaaaggtgtacgacgaggcctgggagcggattgacaagaaagtggaaggcctgagcaagcacatcaagctggaagaggaacggagaagcgaggacgcccagagcaaggccgccctgaccgactggctgcgggctaaggccagcttcgtgatcgagggcctgaaggaggccgacaaggacgagttctgcagatgcgagctgaagctgcagaagtggtacggggacctgcggggaaagcccttcgccatcgaagccgagaacagcatcctggacatcagcggcttcagcaagcagtacaactgtgccttcatctggcagaaggacggcgtgaagaagctgaacctgtacctgatcatcaactacttcaagggcggcaagctgcggttcaagaagatcaaacctgaagccttcgaagccaacagattctacaccgtgatcaacaaaaagagcggcgagatcgtgcccatggaggtgaacttcaacttcgacgaccccaacctgatcatcctgcctctggcctttggcaagagacagggcagagaattcatctggaacgacctgctgtccctggaaaccggcagcctgaagctggccaacggaagagtgatcgagaagacactgtacaacagaagaacccggcaggatgagcctgccctgttcgtggccctgaccttcgagcggcgggaggtcctggactcctccaatatcaaaccaatgaacctgatcggcgtggcaagaggcgaaaacatccccgccgtgatcgccctgaccgaccccgagggctgcccactgagccggtttaaggatagcctgggaaacccaacccacatcctgagaatcggcgagagctataaggagaagcagcggaccatccaggccaagaaggaggtggagcagcggagagccggcggctacagccggaagtacgccagcaaagccaagaatctggcagacgatatggtgagaaacaccgctagagatctgctgtactacgccgtgacccaggatgccatgctgatcttcgccaacctgagccggggcttcggccggcagggcaagcggaccttcatggccgagagacagtacacacggatggaggactggctgaccgccaagctggcctacgagggcctgagcaagacctacctgtccaagacactggcccagtacacctccaagacatgcagcaactgtgggtttaccatcaccagcgccgactacgacagggtgctggagaagctgaagaagacagcaacaggctggatgaccacaattaacggcaaggagctgaaggtggagggccagattacctactacaacagatacaagagacagaacgtagtcaaggacctgtccgtcgagctggatagactgagcgaagaatctgtgaacaacgacatctcctcctggacaaagggcagaagcggagaagctctgagcctcctgaagaaaagattctcccatagacccgtgcaggagaagttcgtgtgcctgaactgcggcttcgagacacacgcagccgagcaagccgccctgaacatcgccagatcctggctgttcctgcggagccaggagtacaagaaataccagacaaacaagacaaccggcaacaccgataagagagccttcgtcgagacctggcagtccttttaccggaagaagcttaaggaggtgtggaaacctgccgtgcggtctggcggatctggcggaggctccccccagaagctggtgaccttcgaggacgtggccgtgtacttcacccagaccgagtgggacggcctgagcaccgcccagagggccctgtacagggacgtgatgctggagaactacggcaacgtggccagcctgggcttccccctgctgaagcccgccgtgatcagccagctggagggcggcggcgagctggagggccccagcagcctggccagcggcgccggcaccggcccccagggcctgtggggcggcccaagcagcggcgcccctcctcccagcggcggcagcccagccggctccccaacctctaccgaggagggcacctctgagtccgccacccccgagagcggccctggcacctccaccgagcccagcgagggcagcgcacccggcagccctgccggcagccccacctccacagaggagggaaccagcaccgagcccagcgaaggcagcgccccaggcaccagcaccgagcctagtgagcaggagattaaacggatcaacaagatcagaagaagacttgtgaaagacagcaacaccaagaaggccggcaagacaggccccatgaaaaccctgctggttagagtgatgacacccgatctgagagagcggctggaaaacctgagaaagaagcctgaaaatatcccccagcccatcagcaatacatctagagccaacctgaataagctgctgaccgattacaccgaaatgaagaaggcgatcctgcatgtgtactgggaagagttccagaaggaccctgtgggcctgatgagccgggtggcccagcctgccagcaagaagatcgatcagaacaagctgaaacctgagatggacgagaagggcaacctgaccaccgccggctttgcctgctctcagtgtggccagcccctgttcgtgtacaagctggagcaggtgtctgagaagggcaaggcttacaccaactacttcggacggtgcaatgtggccgagcacgaaaagctgatcctgctggcccagctgaagcccgagaaggatagcgacgaagccgtgacatatagcctgggaaagtttgggcagagggccctggatttctacagcattcatgtgaccaaggagtccacccaccccgtgaagcccctggcccagatcgccggaaacagatacgcctccggacctgtgggaaaggccctgagcgacgcatgtatgggcacaatcgcctccttcctgtctaagtaccaggacatcatcatcgaacaccagaaggtggtgaagggcaaccagaagagactggagagcctgcgggagctggccggcaaggaaaacctggaataccctagcgtgaccctgccacctcagcctcacaccaaggagggcgttgatgcctacaacgaagtgatcgcccgggtgcgaatgtgggtgaacctgaacctgtggcagaagctgaagctaagcagagatgatgccaagcctctgctgagactgaagggattcccttcctttcctctggtcgagagacaggccaacgaagtggactggtgggacatggtgtgtaacgtgaagaagctgatcaacgagaaaaaggaggatggcaaggtgttttggcagaatctggctggctacaagagacaggaagccctgagaccatacctgagcagcgaggaagatcggaagaagggaaagaaattcgctcggtaccagctgggcgacctgctgctgcacctggaaaagaagcacggcgaggactggggaaaggtgtacgacgaggcctgggagcggattgacaagaaagtggaaggcctgagcaagcacatcaagctggaagaggaacggagaagcgaggacgcccagagcaaggccgccctgaccgactggctgcgggctaaggccagcttcgtgatcgagggcctgaaggaggccgacaaggacgagttctgcagatgcgagctgaagctgcagaagtggtacggggacctgcggggaaagcccttcgccatcgaagccgagaacagcatcctggacatcagcggcttcagcaagcagtacaactgtgccttcatctggcagaaggacggcgtgaagaagctgaacctgtacctgatcatcaactacttcaagggcggcaagctgcggttcaagaagatcaaacctgaagccttcgaagccaacagattctacaccgtgatcaacaaaaagagcggcgagatcgtgcccatggaggtgaacttcaacttcgacgaccccaacctgatcatcctgcctctggcctttggcaagagacagggcagagaattcatctggaacgacctgctgtccctggaaaccggcagcctgaagctggccaacggaagagtgatcgagaagacactgtacaacagaagaacccggcaggatgagcctgccctgttcgtggccctgaccttcgagcggcgggaggtcctggactcctccaatatcaaaccaatgaacctgatcggcgtggcaagaggcgaaaacatccccgccgtgatcgccctgaccgaccccgagggctgcccactgagccggtttaaggatagcctgggaaacccaacccacatcctgagaatcggcgagagctataaggagaagcagcggaccatccaggccaagaaggaggtggagcagcggagagccggcggctacagccggaagtacgccagcaaagccaagaatctggcagacgatatggtgagaaacaccgctagagatctgctgtactacgccgtgacccaggatgccatgctgatcttcgccaacctgagccggggcttcggccggcagggcaagcggaccttcatggccgagagacagtacacacggatggaggactggctgaccgccaagctggcctacgagggcctgagcaagacctacctgtccaagacactggcccagtacacctccaagacatgcagcaactgtgggtttaccatcaccagcgccgactacgacagggtgctggagaagctgaagaagacagcaacaggctggatgaccacaattaacggcaaggagctgaaggtggagggccagattacctactacaacagatacaagagacagaacgtagtcaaggacctgtccgtcgagctggatagactgagcgaagaatctgtgaacaacgacatctcctcctggacaaagggcagaagcggagaagctctgagcctcctgaagaaaagattctcccatagacccgtgcaggagaagttcgtgtgcctgaactgcggcttcgagacacacgcagccgagcaagccgccctgaacatcgccagatcctggctgttcctgcggagccaggagtacaagaaataccagacaaacaagacaaccggcaacaccgataagagagccttcgtcgagacctggcagtccttttaccggaagaagcttaaggaggtgtggaaacctgccgtgcggtctggcggatctggcggaggctcctccccagaagctggtgaccttcgaggacgtggccgtgtacttcacccagaccgagtgggacggcctgagcaccgcccagagggccctgtacagggacgtgatgctggagaactacggcaacgtggccagcctgggcttccccctgctgaagcccgccgtgatcagccagctggagggcggcggcgagctggagggccccagcagcctggccagcggcgccggcaccggcccccagggcctgtggggatctggctccggcagcggccccaagaaaaagagaaaagtctaagctgccttctgcggggcttgccttctggccatgcccttcttctctcccttgcacctgtacctcttggtctttgaataaagcctgagtaggaaggctagcaaaaaaaaaaaaaaaaaaaaaaaaaaaaaaaaaaaaaaaaaaaaaaaaaaaaaaaaaaaaaaaaaaaaaaaaaaaaaaaa

SEQ ID NO: 16409 - RNA, 9485 nt, synthetic construct
  source 1..9485: mol_type = other RNA
aggaaataagagagaaaagaagagtaagaagaaatataagagccaccatggcccctaagaagaagcgtaaagtgagccggatggaacgcctcgtctacgaggtgcggcagaagtgcagaaacatcgaggacatctgcatctcctgcggatctctgaacgtgaccctggagcacccactgttcatcggcggcatgtgccagaactgtaaaaactgttttctggagtgtgcctatcaatacgacgatgacggctaccagagctactgcaccatctgttgcggcggaagagaggtgctgatgtgtggaaataacaactgctgccggtgcttctgcgtggaatgcgtggacctgctggtgggccccggcgccgcccaggccgctattaaggaagatccttggaactgctacatgtgcggccacaagggcacatacggcctgctgagacggagagaggactggcctagcagactgcagatgttcttcgccaataaccacgaccaggagttcgacccccctaaggtgtaccctcccgtccccgccgagaagagaaagcccatccgggtcctgagcctgttcgatggcatcgccaccggtctgctggtgctgaaggacctgggcatccaggtggataggtacattgcctccgaggtgtgcgaggactccatcaccgtgggaatggtgcgtcatcagggcaagatcatgtacgtgggcgacgtgcggagcgtgacacagaagcatatccaggagtggggccctttcgacctggtgatcggcggcagcccttgcaatgacctgagcatcgtgaacccagcccggaagggcctgtacgagggaaccggcagactgttcttcgagttttacagactgctgcacgacgcccggcctaaggaaggcgacgaccggcccttcttttggctgttcgagaatgtggtggccatgggagtcagcgacaagcgggatattagccggttcctggagagcaaccccgtgatgatcgatgccaaggaagtgagcgccgcccaccgggccagatacttctggggcaatctgcctggcatgaacagacccctggccagcaccgtgaacgacaagctggagctgcaggagtgcctggagcacggccggatcgccaagttcagcaaggtgagaaccatcaccacccgaagcaacagcatcaaacaaggcaaggaccagcactttcctgtgttcatgaacgagaaggaggacatcctgtggtgtaccgagatggagagagtgttcgggttcccagtccactacacagatgtcagcaacatgtctagactggccagacagagactgctgggaagaagctggtccgtccctgtgatcagacacctgttcgcccctctgaaggagtacttcgcctgcgtgagcagcggcaacagcaacgccaacagccggggccccagcttctctagcggcctggtgccactgtccctgagagggagccacatgggccccatggagatctacaaaaccgtgagcgcctggaagcggcagcctgtgcgcgtgctgagcctgtttcggaatatcgataaagtcctgaaaagcctgggattcctggagagcggctctggctccggcggtggcaccctgaagtacgtggaggatgtgacaaacgtggtcagacgggatgtggagaagtggggccccttcgatctggtgtacggcagcacccaacccctgggcagctcttgtgaccggtgccctggctggtacatgtttcagttccaccggatcctgcagtacgccctgccgagacaggagtcccagcggccattcttttggattttcatggacaacttgctgctgaccgaggatgaccaggaaactaccactcggttcctgcagaccgaagccgtgaccctgcaggacgtgagaggccgggactaccagaacgccatgcgggtgtggtccaacatccctggactgaaaagcaagcacgcacctctgacccctaaagaagaggagtacctgcaggcccaggtgcggagcagaagcaagctggacgcccctaaggtggatctgctggtgaagaattgcctcctgcccctgagagagtacttcaagtatttcagccagaatagtctgcccctgggaggcagcggcggcggcgccctggtgacatttgaggacgtcgccgtgcggttcacccaggaggaatgggctctgctggatccttctcagaaaatcctgtaccgggacgtgatgagagagacataccggaatctgacctccgtgggcatcaactgggaatgttgggaccttgaagcctgcttcagaagcctgggaagaaacctgagagtgcaggtggtgaagagaaagtgcgagctgaccaacagcggcccctgcgccgagggcggcccaagcagcggcgcccctcctcccagcggcggcagcccagccggctccccaacctctaccgaggagggcacctctgagtccgccacccccgagagcggccctggcacctccaccgagcccagcgagggcagcgcacccggcagccctgccggcagccccacctccacagaggagggaaccagcaccgagcccagcgaaggcagcgccccaggcaccagcaccgagcctagtgagcaggagattaaacggatcaacaagatcagaagaagacttgtgaaagacagcaacaccaagaaggccggcaagacaggccccatgaaaaccctgctggttagagtgatgacacccgatctgagagagcggctggaaaacctgagaaagaagcctgaaaatatcccccagcccatcagcaatacatctagagccaacctgaataagctgctgaccgattacaccgaaatgaagaaggcgatcctgcatgtgtactgggaagagttccagaaggaccctgtgggcctgatgagccgggtggcccagcctgccagcaagaagatcgatcagaacaagctgaaacctgagatggacgagaagggcaacctgaccaccgccggctttgcctgctctcagtgtggccagcccctgttcgtgtacaagctggagcaggtgtctgagaagggcaaggcttacaccaactacttcggacggtgcaatgtggccgagcacgaaaagctgatcctgctggcccagctgaagcccgagaaggatagcgacgaagccgtgacatatagcctgggaaagtttgggcagagggccctggatttctacagcattcatgtgaccaaggagtccacccaccccgtgaagcccctggcccagatcgccggaaacagatacgcctccggacctgtgggaaaggccctgagcgacgcatgtatgggcacaatcgcctccttcctgtctaagtaccaggacatcatcatcgaacaccagaaggtggtgaagggcaaccagaagagactggagagcctgcgggagctggccggcaaggaaaacctggaataccctagcgtgaccctgccacctcagcctcacaccaaggagggcgttgatgcctacaacgaagtgatcgcccgggtgcgaatgtgggtgaacctgaacctgtggcagaagctgaagctaagcagagatgatgccaagcctctgctgagactgaagggattcccttcctttcctctggtcgagagacaggccaacgaagtggactggtgggacatggtgtgtaacgtgaagaagctgatcaacgagaaaaaggaggatggcaaggtgttttggcagaatctggctggctacaagagacaggaagccctgagaccatacctgagcagcgaggaagatcggaagaagggaaagaaattcgctcggtaccagctgggcgacctgctgctgcacctggaaaagaagcacggcgaggactggggaaaggtgtacgacgaggcctgggagcggattgacaagaaagtggaaggcctgagcaagcacatcaagctggaagaggaacggagaagcgaggacgcccagagcaaggccgccctgaccgactggctgcgggctaaggccagcttcgtgatcgagggcctgaaggaggccgacaaggacgagttctgcagatgcgagctgaagctgcagaagtggtacggggacctgcggggaaagcccttcgccatcgaagccgagaacagcatcctggacatcagcggcttcagcaagcagtacaactgtgccttcatctggcagaaggacggcgtgaagaagctgaacctgtacctgatcatcaactacttcaagggcggcaagctgcggttcaagaagatcaaacctgaagccttcgaagccaacagattctacaccgtgatcaacaaaaagagcggcgagatcgtgcccatggaggtgaacttcaacttcgacgaccccaacctgatcatcctgcctctggcctttggcaagagacagggcagagaattcatctggaacgacctgctgtccctggaaaccggcagcctgaagctggccaacggaagagtgatcgagaagacactgtacaacagaagaacccggcaggatgagcctgccctgttcgtggccctgaccttcgagcggcgggaggtcctggactcctccaatatcaaaccaatgaacctgatcggcgtggcaagaggcgaaaacatccccgccgtgatcgccctgaccgaccccgagggctgcccactgagccggtttaaggatagcctgggaaacccaacccacatcctgagaatcggcgagagctataaggagaagcagcggaccatccaggccaagaaggaggtggagcagcggagagccggcggctacagccggaagtacgccagcaaagccaagaatctggcagacgatatggtgagaaacaccgctagagatctgctgtactacgccgtgacccaggatgccatgctgatcttcgccaacctgagccggggcttcggccggcagggcaagcggaccttcatggccgagagacagtacacacggatggaggactggctgaccgccaagctggcctacgagggcctgagcaagacctacctgtccaagacactggcccagtacacctccaagacatgcagcaactgtgggtttaccatcaccagcgccgactacgacagggtgctggagaagctgaagaagacagcaacaggctggatgaccacaattaacggcaaggagctgaaggtggagggccagattacctactacaacagatacaagagacagaacgtagtcaaggacctgtccgtcgagctggatagactgagcgaagaatctgtgaacaacgacatctcctcctggacaaagggcagaagcggagaagctctgagcctcctgaagaaaagattctcccatagacccgtgcaggagaagttcgtgtgcctgaactgcggcttcgagacacacgcagccgagcaagccgccctgaacatcgccagatcctggctgttcctgcggagccaggagtacaagaaataccagacaaacaagacaaccggcaacaccgataagagagccttcgtcgagacctggcagtccttttaccggaagaagcttaaggaggtgtggaaacctgccgtgcggtctggcggatctggcggaggctccgcccaggagcccctgaccttccacgacgtggccgtggacttcacctgggaggagtggcagctgctggaccccgagcagaaggacctgtacagggacgtgatgctggagacctacagccacctggtgagcgtgggctacgaggccagcaagcccgacatcctgagcaagctggaccacggcgaggccccctggaccgtggccggcgagatccactgcggcacccacagcgagatctggaagaggggcggcccaagcagcggcgcccctcctcccagcggcggcagcccagccggctccccaacctctaccgaggagggcacctctgagtccgccacccccgagagcggccctggcacctccaccgagcccagcgagggcagcgcacccggcagccctgccggcagccccacctccacagaggagggaaccagcaccgagcccagcgaaggcagcgccccaggcaccagcaccgagcctagtgagcaggagattaaacggatcaacaagatcagaagaagacttgtgaaagacagcaacaccaagaaggccggcaagacaggccccatgaaaaccctgctggttagagtgatgacacccgatctgagagagcggctggaaaacctgagaaagaagcctgaaaatatcccccagcccatcagcaatacatctagagccaacctgaataagctgctgaccgattacaccgaaatgaagaaggcgatcctgcatgtgtactgggaagagttccagaaggaccctgtgggcctgatgagccgggtggcccagcctgccagcaagaagatcgatcagaacaagctgaaacctgagatggacgagaagggcaacctgaccaccgccggctttgcctgctctcagtgtggccagcccctgttcgtgtacaagctggagcaggtgtctgagaagggcaaggcttacaccaactacttcggacggtgcaatgtggccgagcacgaaaagctgatcctgctggcccagctgaagcccgagaaggatagcgacgaagccgtgacatatagcctgggaaagtttgggcagagggccctggatttctacagcattcatgtgaccaaggagtccacccaccccgtgaagcccctggcccagatcgccggaaacagatacgcctccggacctgtgggaaaggccctgagcgacgcatgtatgggcacaatcgcctccttcctgtctaagtaccaggacatcatcatcgaacaccagaaggtggtgaagggcaaccagaagagactggagagcctgcgggagctggccggcaaggaaaacctggaataccctagcgtgaccctgccacctcagcctcacaccaaggagggcgttgatgcctacaacgaagtgatcgcccgggtgcgaatgtgggtgaacctgaacctgtggcagaagctgaagctaagcagagatgatgccaagcctctgctgagactgaagggattcccttcctttcctctggtcgagagacaggccaacgaagtggactggtgggacatggtgtgtaacgtgaagaagctgatcaacgagaaaaaggaggatggcaaggtgttttggcagaatctggctggctacaagagacaggaagccctgagaccatacctgagcagcgaggaagatcggaagaagggaaagaaattcgctcggtaccagctgggcgacctgctgctgcacctggaaaagaagcacggcgaggactggggaaaggtgtacgacgaggcctgggagcggattgacaagaaagtggaaggcctgagcaagcacatcaagctggaagaggaacggagaagcgaggacgcccagagcaaggccgccctgaccgactggctgcgggctaaggccagcttcgtgatcgagggcctgaaggaggccgacaaggacgagttctgcagatgcgagctgaagctgcagaagtggtacggggacctgcggggaaagcccttcgccatcgaagccgagaacagcatcctggacatcagcggcttcagcaagcagtacaactgtgccttcatctggcagaaggacggcgtgaagaagctgaacctgtacctgatcatcaactacttcaagggcggcaagctgcggttcaagaagatcaaacctgaagccttcgaagccaacagattctacaccgtgatcaacaaaaagagcggcgagatcgtgcccatggaggtgaacttcaacttcgacgaccccaacctgatcatcctgcctctggcctttggcaagagacagggcagagaattcatctggaacgacctgctgtccctggaaaccggcagcctgaagctggccaacggaagagtgatcgagaagacactgtacaacagaagaacccggcaggatgagcctgccctgttcgtggccctgaccttcgagcggcgggaggtcctggactcctccaatatcaaaccaatgaacctgatcggcgtggcaagaggcgaaaacatccccgccgtgatcgccctgaccgaccccgagggctgcccactgagccggtttaaggatagcctgggaaacccaacccacatcctgagaatcggcgagagctataaggagaagcagcggaccatccaggccaagaaggaggtggagcagcggagagccggcggctacagccggaagtacgccagcaaagccaagaatctggcagacgatatggtgagaaacaccgctagagatctgctgtactacgccgtgacccaggatgccatgctgatcttcgccaacctgagccggggcttcggccggcagggcaagcggaccttcatggccgagagacagtacacacggatggaggactggctgaccgccaagctggcctacgagggcctgagcaagacctacctgtccaagacactggcccagtacacctccaagacatgcagcaactgtgggtttaccatcaccagcgccgactacgacagggtgctggagaagctgaagaagacagcaacaggctggatgaccacaattaacggcaaggagctgaaggtggagggccagattacctactacaacagatacaagagacagaacgtagtcaaggacctgtccgtcgagctggatagactgagcgaagaatctgtgaacaacgacatctcctcctggacaaagggcagaagcggagaagctctgagcctcctgaagaaaagattctcccatagacccgtgcaggagaagttcgtgtgcctgaactgcggcttcgagacacacgcagccgagcaagccgccctgaacatcgccagatcctggctgttcctgcggagccaggagtacaagaaataccagacaaacaagacaaccggcaacaccgataagagagccttcgtcgagacctggcagtccttttaccggaagaagcttaaggaggtgtggaaacctgccgtgcggtctggcggatctggcggaggctcctgcccaggagcccctgaccttccacgacgtggccgtggacttcacctgggaggagtggcagctgctggaccccgagcagaaggacctgtacagggacgtgatgctggagacctacagccacctggtgagcgtgggctacgaggccagcaagcccgacatcctgagcaagctggaccacggcgaggccccctggaccgtggccggcgagatccactgcggcacccacagcgagatctggaagaggggatctggctccggcagcggccccaagaaaaagagaaaagtctaagctgccttctgcggggcttgccttctggccatgcccttcttctctcccttgcacctgtacctcttggtctttgaataaagcctgagtaggaaggctagcaaaaaaaaaaaaaaaaaaaaaaaaaaaaaaaaaaaaaaaaaaaaaaaaaaaaaaaaaaaaaaaaaaaaaaaaaaaaaaaa

SEQ ID NO: 16410 - RNA, 9485 nt, synthetic construct
  source 1..9485: mol_type = other RNA
aggaaataagagagaaaagaagagtaagaagaaatataagagccaccatggcccctaagaagaagcgtaaagtgagccggatggaacgcctcgtctacgaggtgcggcagaagtgcagaaacatcgaggacatctgcatctcctgcggatctctgaacgtgaccctggagcacccactgttcatcggcggcatgtgccagaactgtaaaaactgttttctggagtgtgcctatcaatacgacgatgacggctaccagagctactgcaccatctgttgcggcggaagagaggtgctgatgtgtggaaataacaactgctgccggtgcttctgcgtggaatgcgtggacctgctggtgggccccggcgccgcccaggccgctattaaggaagatccttggaactgctacatgtgcggccacaagggcacatacggcctgctgagacggagagaggactggcctagcagactgcagatgttcttcgccaataaccacgaccaggagttcgacccccctaaggtgtaccctcccgtccccgccgagaagagaaagcccatccgggtcctgagcctgttcgatggcatcgccaccggtctgctggtgctgaaggacctgggcatccaggtggataggtacattgcctccgaggtgtgcgaggactccatcaccgtgggaatggtgcgtcatcagggcaagatcatgtacgtgggcgacgtgcggagcgtgacacagaagcatatccaggagtggggccctttcgacctggtgatcggcggcagcccttgcaatgacctgagcatcgtgaacccagcccggaagggcctgtacgagggaaccggcagactgttcttcgagttttacagactgctgcacgacgcccggcctaaggaaggcgacgaccggcccttcttttggctgttcgagaatgtggtggccatgggagtcagcgacaagcgggatattagccggttcctggagagcaaccccgtgatgatcgatgccaaggaagtgagcgccgcccaccgggccagatacttctggggcaatctgcctggcatgaacagacccctggccagcaccgtgaacgacaagctggagctgcaggagtgcctggagcacggccggatcgccaagttcagcaaggtgagaaccatcaccacccgaagcaacagcatcaaacaaggcaaggaccagcactttcctgtgttcatgaacgagaaggaggacatcctgtggtgtaccgagatggagagagtgttcgggttcccagtccactacacagatgtcagcaacatgtctagactggccagacagagactgctgggaagaagctggtccgtccctgtgatcagacacctgttcgcccctctgaaggagtacttcgcctgcgtgagcagcggcaacagcaacgccaacagccggggccccagcttctctagcggcctggtgccactgtccctgagagggagccacatgggccccatggagatctacaaaaccgtgagcgcctggaagcggcagcctgtgcgcgtgctgagcctgtttcggaatatcgataaagtcctgaaaagcctgggattcctggagagcggctctggctccggcggtggcaccctgaagtacgtggaggatgtgacaaacgtggtcagacgggatgtggagaagtggggccccttcgatctggtgtacggcagcacccaacccctgggcagctcttgtgaccggtgccctggctggtacatgtttcagttccaccggatcctgcagtacgccctgccgagacaggagtcccagcggccattcttttggattttcatggacaacttgctgctgaccgaggatgaccaggaaactaccactcggttcctgcagaccgaagccgtgaccctgcaggacgtgagaggccgggactaccagaacgccatgcgggtgtggtccaacatccctggactgaaaagcaagcacgcacctctgacccctaaagaagaggagtacctgcaggcccaggtgcggagcagaagcaagctggacgcccctaaggtggatctgctggtgaagaattgcctcctgcccctgagagagtacttcaagtatttcagccagaatagtctgcccctgggaggcagcggcggcggcgccctggtgacatttgaggacgtcgccgtgcggttcacccaggaggaatgggctctgctggatccttctcagaaaatcctgtaccgggacgtgatgagagagacataccggaatctgacctccgtgggcatcaactgggaatgttgggaccttgaagcctgcttcagaagcctgggaagaaacctgagagtgcaggtggtgaagagaaagtgcgagctgaccaacagcggcccctgcgccgagggcggcccaagcagcggcgcccctcctcccagcggcggcagcccagccggctccccaacctctaccgaggagggcacctctgagtccgccacccccgagagcggccctggcacctccaccgagcccagcgagggcagcgcacccggcagccctgccggcagccccacctccacagaggagggaaccagcaccgagcccagcgaaggcagcgccccaggcaccagcaccgagcctagtgagcaggagattaaacggatcaacaagatcagaagaagacttgtgaaagacagcaacaccaagaaggccggcaagacaggccccatgaaaaccctgctggttagagtgatgacacccgatctgagagagcggctggaaaacctgagaaagaagcctgaaaatatcccccagcccatcagcaatacatctagagccaacctgaataagctgctgaccgattacaccgaaatgaagaaggcgatcctgcatgtgtactgggaagagttccagaaggaccctgtgggcctgatgagccgggtggcccagcctgccagcaagaagatcgatcagaacaagctgaaacctgagatggacgagaagggcaacctgaccaccgccggctttgcctgctctcagtgtggccagcccctgttcgtgtacaagctggagcaggtgtctgagaagggcaaggcttacaccaactacttcggacggtgcaatgtggccgagcacgaaaagctgatcctgctggcccagctgaagcccgagaaggatagcgacgaagccgtgacatatagcctgggaaagtttgggcagagggccctggatttctacagcattcatgtgaccaaggagtccacccaccccgtgaagcccctggcccagatcgccggaaacagatacgcctccggacctgtgggaaaggccctgagcgacgcatgtatgggcacaatcgcctccttcctgtctaagtaccaggacatcatcatcgaacaccagaaggtggtgaagggcaaccagaagagactggagagcctgcgggagctggccggcaaggaaaacctggaataccctagcgtgaccctgccacctcagcctcacaccaaggagggcgttgatgcctacaacgaagtgatcgcccgggtgcgaatgtgggtgaacctgaacctgtggcagaagctgaagctaagcagagatgatgccaagcctctgctgagactgaagggattcccttcctttcctctggtcgagagacaggccaacgaagtggactggtgggacatggtgtgtaacgtgaagaagctgatcaacgagaaaaaggaggatggcaaggtgttttggcagaatctggctggctacaagagacaggaagccctgagaccatacctgagcagcgaggaagatcggaagaagggaaagaaattcgctcggtaccagctgggcgacctgctgctgcacctggaaaagaagcacggcgaggactggggaaaggtgtacgacgaggcctgggagcggattgacaagaaagtggaaggcctgagcaagcacatcaagctggaagaggaacggagaagcgaggacgcccagagcaaggccgccctgaccgactggctgcgggctaaggccagcttcgtgatcgagggcctgaaggaggccgacaaggacgagttctgcagatgcgagctgaagctgcagaagtggtacggggacctgcggggaaagcccttcgccatcgaagccgagaacagcatcctggacatcagcggcttcagcaagcagtacaactgtgccttcatctggcagaaggacggcgtgaagaagctgaacctgtacctgatcatcaactacttcaagggcggcaagctgcggttcaagaagatcaaacctgaagccttcgaagccaacagattctacaccgtgatcaacaaaaagagcggcgagatcgtgcccatggaggtgaacttcaacttcgacgaccccaacctgatcatcctgcctctggcctttggcaagagacagggcagagaattcatctggaacgacctgctgtccctggaaaccggcagcctgaagctggccaacggaagagtgatcgagaagacactgtacaacagaagaacccggcaggatgagcctgccctgttcgtggccctgaccttcgagcggcgggaggtcctggactcctccaatatcaaaccaatgaacctgatcggcgtggcaagaggcgaaaacatccccgccgtgatcgccctgaccgaccccgagggctgcccactgagccggtttaaggatagcctgggaaacccaacccacatcctgagaatcggcgagagctataaggagaagcagcggaccatccaggccaagaaggaggtggagcagcggagagccggcggctacagccggaagtacgccagcaaagccaagaatctggcagacgatatggtgagaaacaccgctagagatctgctgtactacgccgtgacccaggatgccatgctgatcttcgccaacctgagccggggcttcggccggcagggcaagcggaccttcatggccgagagacagtacacacggatggaggactggctgaccgccaagctggcctacgagggcctgagcaagacctacctgtccaagacactggcccagtacacctccaagacatgcagcaactgtgggtttaccatcaccagcgccgactacgacagggtgctggagaagctgaagaagacagcaacaggctggatgaccacaattaacggcaaggagctgaaggtggagggccagattacctactacaacagatacaagagacagaacgtagtcaaggacctgtccgtcgagctggatagactgagcgaagaatctgtgaacaacgacatctcctcctggacaaagggcagaagcggagaagctctgagcctcctgaagaaaagattctcccatagacccgtgcaggagaagttcgtgtgcctgaactgcggcttcgagacacacgcagccgagcaagccgccctgaacatcgccagatcctggctgttcctgcggagccaggagtacaagaaataccagacaaacaagacaaccggcaacaccgataagagagccttcgtcgagacctggcagtccttttaccggaagaagcttaaggaggtgtggaaacctgccgtgcggtctggcggatctggcggaggctccgccaggggcaagagcaagagcaaggcccccatcaccttcggcgacctggccatctacttcagccaggaggagtgggagtggctgagccccatccagaaggacctgtacgaggacgtgatgctggagaactacaggaacctggtgagcctgggcctgagcttcaggaggcccaacgtgatcaccctgctggagaagggcaaggccccctggatggtggagcccgtgaggaggaggagggcccccggcggcccaagcagcggcgcccctcctcccagcggcggcagcccagccggctccccaacctctaccgaggagggcacctctgagtccgccacccccgagagcggccctggcacctccaccgagcccagcgagggcagcgcacccggcagccctgccggcagccccacctccacagaggagggaaccagcaccgagcccagcgaaggcagcgccccaggcaccagcaccgagcctagtgagcaggagattaaacggatcaacaagatcagaagaagacttgtgaaagacagcaacaccaagaaggccggcaagacaggccccatgaaaaccctgctggttagagtgatgacacccgatctgagagagcggctggaaaacctgagaaagaagcctgaaaatatcccccagcccatcagcaatacatctagagccaacctgaataagctgctgaccgattacaccgaaatgaagaaggcgatcctgcatgtgtactgggaagagttccagaaggaccctgtgggcctgatgagccgggtggcccagcctgccagcaagaagatcgatcagaacaagctgaaacctgagatggacgagaagggcaacctgaccaccgccggctttgcctgctctcagtgtggccagcccctgttcgtgtacaagctggagcaggtgtctgagaagggcaaggcttacaccaactacttcggacggtgcaatgtggccgagcacgaaaagctgatcctgctggcccagctgaagcccgagaaggatagcgacgaagccgtgacatatagcctgggaaagtttgggcagagggccctggatttctacagcattcatgtgaccaaggagtccacccaccccgtgaagcccctggcccagatcgccggaaacagatacgcctccggacctgtgggaaaggccctgagcgacgcatgtatgggcacaatcgcctccttcctgtctaagtaccaggacatcatcatcgaacaccagaaggtggtgaagggcaaccagaagagactggagagcctgcgggagctggccggcaaggaaaacctggaataccctagcgtgaccctgccacctcagcctcacaccaaggagggcgttgatgcctacaacgaagtgatcgcccgggtgcgaatgtgggtgaacctgaacctgtggcagaagctgaagctaagcagagatgatgccaagcctctgctgagactgaagggattcccttcctttcctctggtcgagagacaggccaacgaagtggactggtgggacatggtgtgtaacgtgaagaagctgatcaacgagaaaaaggaggatggcaaggtgttttggcagaatctggctggctacaagagacaggaagccctgagaccatacctgagcagcgaggaagatcggaagaagggaaagaaattcgctcggtaccagctgggcgacctgctgctgcacctggaaaagaagcacggcgaggactggggaaaggtgtacgacgaggcctgggagcggattgacaagaaagtggaaggcctgagcaagcacatcaagctggaagaggaacggagaagcgaggacgcccagagcaaggccgccctgaccgactggctgcgggctaaggccagcttcgtgatcgagggcctgaaggaggccgacaaggacgagttctgcagatgcgagctgaagctgcagaagtggtacggggacctgcggggaaagcccttcgccatcgaagccgagaacagcatcctggacatcagcggcttcagcaagcagtacaactgtgccttcatctggcagaaggacggcgtgaagaagctgaacctgtacctgatcatcaactacttcaagggcggcaagctgcggttcaagaagatcaaacctgaagccttcgaagccaacagattctacaccgtgatcaacaaaaagagcggcgagatcgtgcccatggaggtgaacttcaacttcgacgaccccaacctgatcatcctgcctctggcctttggcaagagacagggcagagaattcatctggaacgacctgctgtccctggaaaccggcagcctgaagctggccaacggaagagtgatcgagaagacactgtacaacagaagaacccggcaggatgagcctgccctgttcgtggccctgaccttcgagcggcgggaggtcctggactcctccaatatcaaaccaatgaacctgatcggcgtggcaagaggcgaaaacatccccgccgtgatcgccctgaccgaccccgagggctgcccactgagccggtttaaggatagcctgggaaacccaacccacatcctgagaatcggcgagagctataaggagaagcagcggaccatccaggccaagaaggaggtggagcagcggagagccggcggctacagccggaagtacgccagcaaagccaagaatctggcagacgatatggtgagaaacaccgctagagatctgctgtactacgccgtgacccaggatgccatgctgatcttcgccaacctgagccggggcttcggccggcagggcaagcggaccttcatggccgagagacagtacacacggatggaggactggctgaccgccaagctggcctacgagggcctgagcaagacctacctgtccaagacactggcccagtacacctccaagacatgcagcaactgtgggtttaccatcaccagcgccgactacgacagggtgctggagaagctgaagaagacagcaacaggctggatgaccacaattaacggcaaggagctgaaggtggagggccagattacctactacaacagatacaagagacagaacgtagtcaaggacctgtccgtcgagctggatagactgagcgaagaatctgtgaacaacgacatctcctcctggacaaagggcagaagcggagaagctctgagcctcctgaagaaaagattctcccatagacccgtgcaggagaagttcgtgtgcctgaactgcggcttcgagacacacgcagccgagcaagccgccctgaacatcgccagatcctggctgttcctgcggagccaggagtacaagaaataccagacaaacaagacaaccggcaacaccgataagagagccttcgtcgagacctggcagtccttttaccggaagaagcttaaggaggtgtggaaacctgccgtgcggtctggcggatctggcggaggctcctgccaggggcaagagcaagagcaaggcccccatcaccttcggcgacctggccatctacttcagccaggaggagtgggagtggctgagccccatccagaaggacctgtacgaggacgtgatgctggagaactacaggaacctggtgagcctgggcctgagcttcaggaggcccaacgtgatcaccctgctggagaagggcaaggccccctggatggtggagcccgtgaggaggaggagggcccccggatctggctccggcagcggccccaagaaaaagagaaaagtctaagctgccttctgcggggcttgccttctggccatgcccttcttctctcccttgcacctgtacctcttggtctttgaataaagcctgagtaggaaggctagcaaaaaaaaaaaaaaaaaaaaaaaaaaaaaaaaaaaaaaaaaaaaaaaaaaaaaaaaaaaaaaaaaaaaaaaaaaaaaaaa

SEQ ID NO: 16411 - RNA, 9485 nt, synthetic construct
  source 1..9485: mol_type = other RNA
aggaaataagagagaaaagaagagtaagaagaaatataagagccaccatggcccctaagaagaagcgtaaagtgagccggatggaacgcctcgtctacgaggtgcggcagaagtgcagaaacatcgaggacatctgcatctcctgcggatctctgaacgtgaccctggagcacccactgttcatcggcggcatgtgccagaactgtaaaaactgttttctggagtgtgcctatcaatacgacgatgacggctaccagagctactgcaccatctgttgcggcggaagagaggtgctgatgtgtggaaataacaactgctgccggtgcttctgcgtggaatgcgtggacctgctggtgggccccggcgccgcccaggccgctattaaggaagatccttggaactgctacatgtgcggccacaagggcacatacggcctgctgagacggagagaggactggcctagcagactgcagatgttcttcgccaataaccacgaccaggagttcgacccccctaaggtgtaccctcccgtccccgccgagaagagaaagcccatccgggtcctgagcctgttcgatggcatcgccaccggtctgctggtgctgaaggacctgggcatccaggtggataggtacattgcctccgaggtgtgcgaggactccatcaccgtgggaatggtgcgtcatcagggcaagatcatgtacgtgggcgacgtgcggagcgtgacacagaagcatatccaggagtggggccctttcgacctggtgatcggcggcagcccttgcaatgacctgagcatcgtgaacccagcccggaagggcctgtacgagggaaccggcagactgttcttcgagttttacagactgctgcacgacgcccggcctaaggaaggcgacgaccggcccttcttttggctgttcgagaatgtggtggccatgggagtcagcgacaagcgggatattagccggttcctggagagcaaccccgtgatgatcgatgccaaggaagtgagcgccgcccaccgggccagatacttctggggcaatctgcctggcatgaacagacccctggccagcaccgtgaacgacaagctggagctgcaggagtgcctggagcacggccggatcgccaagttcagcaaggtgagaaccatcaccacccgaagcaacagcatcaaacaaggcaaggaccagcactttcctgtgttcatgaacgagaaggaggacatcctgtggtgtaccgagatggagagagtgttcgggttcccagtccactacacagatgtcagcaacatgtctagactggccagacagagactgctgggaagaagctggtccgtccctgtgatcagacacctgttcgcccctctgaaggagtacttcgcctgcgtgagcagcggcaacagcaacgccaacagccggggccccagcttctctagcggcctggtgccactgtccctgagagggagccacatgggccccatggagatctacaaaaccgtgagcgcctggaagcggcagcctgtgcgcgtgctgagcctgtttcggaatatcgataaagtcctgaaaagcctgggattcctggagagcggctctggctccggcggtggcaccctgaagtacgtggaggatgtgacaaacgtggtcagacgggatgtggagaagtggggccccttcgatctggtgtacggcagcacccaacccctgggcagctcttgtgaccggtgccctggctggtacatgtttcagttccaccggatcctgcagtacgccctgccgagacaggagtcccagcggccattcttttggattttcatggacaacttgctgctgaccgaggatgaccaggaaactaccactcggttcctgcagaccgaagccgtgaccctgcaggacgtgagaggccgggactaccagaacgccatgcgggtgtggtccaacatccctggactgaaaagcaagcacgcacctctgacccctaaagaagaggagtacctgcaggcccaggtgcggagcagaagcaagctggacgcccctaaggtggatctgctggtgaagaattgcctcctgcccctgagagagtacttcaagtatttcagccagaatagtctgcccctgggaggcagcggcggcggcgccctggtgacatttgaggacgtcgccgtgcggttcacccaggaggaatgggctctgctggatccttctcagaaaatcctgtaccgggacgtgatgagagagacataccggaatctgacctccgtgggcatcaactgggaatgttgggaccttgaagcctgcttcagaagcctgggaagaaacctgagagtgcaggtggtgaagagaaagtgcgagctgaccaacagcggcccctgcgccgagggcggcccaagcagcggcgcccctcctcccagcggcggcagcccagccggctccccaacctctaccgaggagggcacctctgagtccgccacccccgagagcggccctggcacctccaccgagcccagcgagggcagcgcacccggcagccctgccggcagccccacctccacagaggagggaaccagcaccgagcccagcgaaggcagcgccccaggcaccagcaccgagcctagtgagcaggagattaaacggatcaacaagatcagaagaagacttgtgaaagacagcaacaccaagaaggccggcaagacaggccccatgaaaaccctgctggttagagtgatgacacccgatctgagagagcggctggaaaacctgagaaagaagcctgaaaatatcccccagcccatcagcaatacatctagagccaacctgaataagctgctgaccgattacaccgaaatgaagaaggcgatcctgcatgtgtactgggaagagttccagaaggaccctgtgggcctgatgagccgggtggcccagcctgccagcaagaagatcgatcagaacaagctgaaacctgagatggacgagaagggcaacctgaccaccgccggctttgcctgctctcagtgtggccagcccctgttcgtgtacaagctggagcaggtgtctgagaagggcaaggcttacaccaactacttcggacggtgcaatgtggccgagcacgaaaagctgatcctgctggcccagctgaagcccgagaaggatagcgacgaagccgtgacatatagcctgggaaagtttgggcagagggccctggatttctacagcattcatgtgaccaaggagtccacccaccccgtgaagcccctggcccagatcgccggaaacagatacgcctccggacctgtgggaaaggccctgagcgacgcatgtatgggcacaatcgcctccttcctgtctaagtaccaggacatcatcatcgaacaccagaaggtggtgaagggcaaccagaagagactggagagcctgcgggagctggccggcaaggaaaacctggaataccctagcgtgaccctgccacctcagcctcacaccaaggagggcgttgatgcctacaacgaagtgatcgcccgggtgcgaatgtgggtgaacctgaacctgtggcagaagctgaagctaagcagagatgatgccaagcctctgctgagactgaagggattcccttcctttcctctggtcgagagacaggccaacgaagtggactggtgggacatggtgtgtaacgtgaagaagctgatcaacgagaaaaaggaggatggcaaggtgttttggcagaatctggctggctacaagagacaggaagccctgagaccatacctgagcagcgaggaagatcggaagaagggaaagaaattcgctcggtaccagctgggcgacctgctgctgcacctggaaaagaagcacggcgaggactggggaaaggtgtacgacgaggcctgggagcggattgacaagaaagtggaaggcctgagcaagcacatcaagctggaagaggaacggagaagcgaggacgcccagagcaaggccgccctgaccgactggctgcgggctaaggccagcttcgtgatcgagggcctgaaggaggccgacaaggacgagttctgcagatgcgagctgaagctgcagaagtggtacggggacctgcggggaaagcccttcgccatcgaagccgagaacagcatcctggacatcagcggcttcagcaagcagtacaactgtgccttcatctggcagaaggacggcgtgaagaagctgaacctgtacctgatcatcaactacttcaagggcggcaagctgcggttcaagaagatcaaacctgaagccttcgaagccaacagattctacaccgtgatcaacaaaaagagcggcgagatcgtgcccatggaggtgaacttcaacttcgacgaccccaacctgatcatcctgcctctggcctttggcaagagacagggcagagaattcatctggaacgacctgctgtccctggaaaccggcagcctgaagctggccaacggaagagtgatcgagaagacactgtacaacagaagaacccggcaggatgagcctgccctgttcgtggccctgaccttcgagcggcgggaggtcctggactcctccaatatcaaaccaatgaacctgatcggcgtggcaagaggcgaaaacatccccgccgtgatcgccctgaccgaccccgagggctgcccactgagccggtttaaggatagcctgggaaacccaacccacatcctgagaatcggcgagagctataaggagaagcagcggaccatccaggccaagaaggaggtggagcagcggagagccggcggctacagccggaagtacgccagcaaagccaagaatctggcagacgatatggtgagaaacaccgctagagatctgctgtactacgccgtgacccaggatgccatgctgatcttcgccaacctgagccggggcttcggccggcagggcaagcggaccttcatggccgagagacagtacacacggatggaggactggctgaccgccaagctggcctacgagggcctgagcaagacctacctgtccaagacactggcccagtacacctccaagacatgcagcaactgtgggtttaccatcaccagcgccgactacgacagggtgctggagaagctgaagaagacagcaacaggctggatgaccacaattaacggcaaggagctgaaggtggagggccagattacctactacaacagatacaagagacagaacgtagtcaaggacctgtccgtcgagctggatagactgagcgaagaatctgtgaacaacgacatctcctcctggacaaagggcagaagcggagaagctctgagcctcctgaagaaaagattctcccatagacccgtgcaggagaagttcgtgtgcctgaactgcggcttcgagacacacgcagccgagcaagccgccctgaacatcgccagatcctggctgttcctgcggagccaggagtacaagaaataccagacaaacaagacaaccggcaacaccgataagagagccttcgtcgagacctggcagtccttttaccggaagaagcttaaggaggtgtggaaacctgccgtgcggtctggcggatctggcggaggctccggcctggtgagcttcgacgaggtgagcgtgcacttcaccaacgaggagtgggccctgctggaccccggccagagggccctgtacgaggaggtgatggaggagatcagggagatgatgaccagcgtgggcgacgtgagcgagttcctgaccgagggcgagcagagcgagcccagcagggagggcgccgaggagcagaaggagcagaggaagcagagggtgcaggtgggcacctacaggaaggagggcggcccaagcagcggcgcccctcctcccagcggcggcagcccagccggctccccaacctctaccgaggagggcacctctgagtccgccacccccgagagcggccctggcacctccaccgagcccagcgagggcagcgcacccggcagccctgccggcagccccacctccacagaggagggaaccagcaccgagcccagcgaaggcagcgccccaggcaccagcaccgagcctagtgagcaggagattaaacggatcaacaagatcagaagaagacttgtgaaagacagcaacaccaagaaggccggcaagacaggccccatgaaaaccctgctggttagagtgatgacacccgatctgagagagcggctggaaaacctgagaaagaagcctgaaaatatcccccagcccatcagcaatacatctagagccaacctgaataagctgctgaccgattacaccgaaatgaagaaggcgatcctgcatgtgtactgggaagagttccagaaggaccctgtgggcctgatgagccgggtggcccagcctgccagcaagaagatcgatcagaacaagctgaaacctgagatggacgagaagggcaacctgaccaccgccggctttgcctgctctcagtgtggccagcccctgttcgtgtacaagctggagcaggtgtctgagaagggcaaggcttacaccaactacttcggacggtgcaatgtggccgagcacgaaaagctgatcctgctggcccagctgaagcccgagaaggatagcgacgaagccgtgacatatagcctgggaaagtttgggcagagggccctggatttctacagcattcatgtgaccaaggagtccacccaccccgtgaagcccctggcccagatcgccggaaacagatacgcctccggacctgtgggaaaggccctgagcgacgcatgtatgggcacaatcgcctccttcctgtctaagtaccaggacatcatcatcgaacaccagaaggtggtgaagggcaaccagaagagactggagagcctgcgggagctggccggcaaggaaaacctggaataccctagcgtgaccctgccacctcagcctcacaccaaggagggcgttgatgcctacaacgaagtgatcgcccgggtgcgaatgtgggtgaacctgaacctgtggcagaagctgaagctaagcagagatgatgccaagcctctgctgagactgaagggattcccttcctttcctctggtcgagagacaggccaacgaagtggactggtgggacatggtgtgtaacgtgaagaagctgatcaacgagaaaaaggaggatggcaaggtgttttggcagaatctggctggctacaagagacaggaagccctgagaccatacctgagcagcgaggaagatcggaagaagggaaagaaattcgctcggtaccagctgggcgacctgctgctgcacctggaaaagaagcacggcgaggactggggaaaggtgtacgacgaggcctgggagcggattgacaagaaagtggaaggcctgagcaagcacatcaagctggaagaggaacggagaagcgaggacgcccagagcaaggccgccctgaccgactggctgcgggctaaggccagcttcgtgatcgagggcctgaaggaggccgacaaggacgagttctgcagatgcgagctgaagctgcagaagtggtacggggacctgcggggaaagcccttcgccatcgaagccgagaacagcatcctggacatcagcggcttcagcaagcagtacaactgtgccttcatctggcagaaggacggcgtgaagaagctgaacctgtacctgatcatcaactacttcaagggcggcaagctgcggttcaagaagatcaaacctgaagccttcgaagccaacagattctacaccgtgatcaacaaaaagagcggcgagatcgtgcccatggaggtgaacttcaacttcgacgaccccaacctgatcatcctgcctctggcctttggcaagagacagggcagagaattcatctggaacgacctgctgtccctggaaaccggcagcctgaagctggccaacggaagagtgatcgagaagacactgtacaacagaagaacccggcaggatgagcctgccctgttcgtggccctgaccttcgagcggcgggaggtcctggactcctccaatatcaaaccaatgaacctgatcggcgtggcaagaggcgaaaacatccccgccgtgatcgccctgaccgaccccgagggctgcccactgagccggtttaaggatagcctgggaaacccaacccacatcctgagaatcggcgagagctataaggagaagcagcggaccatccaggccaagaaggaggtggagcagcggagagccggcggctacagccggaagtacgccagcaaagccaagaatctggcagacgatatggtgagaaacaccgctagagatctgctgtactacgccgtgacccaggatgccatgctgatcttcgccaacctgagccggggcttcggccggcagggcaagcggaccttcatggccgagagacagtacacacggatggaggactggctgaccgccaagctggcctacgagggcctgagcaagacctacctgtccaagacactggcccagtacacctccaagacatgcagcaactgtgggtttaccatcaccagcgccgactacgacagggtgctggagaagctgaagaagacagcaacaggctggatgaccacaattaacggcaaggagctgaaggtggagggccagattacctactacaacagatacaagagacagaacgtagtcaaggacctgtccgtcgagctggatagactgagcgaagaatctgtgaacaacgacatctcctcctggacaaagggcagaagcggagaagctctgagcctcctgaagaaaagattctcccatagacccgtgcaggagaagttcgtgtgcctgaactgcggcttcgagacacacgcagccgagcaagccgccctgaacatcgccagatcctggctgttcctgcggagccaggagtacaagaaataccagacaaacaagacaaccggcaacaccgataagagagccttcgtcgagacctggcagtccttttaccggaagaagcttaaggaggtgtggaaacctgccgtgcggtctggcggatctggcggaggctcctggcctggtgagcttcgacgaggtgagcgtgcacttcaccaacgaggagtgggccctgctggaccccggccagagggccctgtacgaggaggtgatggaggagatcagggagatgatgaccagcgtgggcgacgtgagcgagttcctgaccgagggcgagcagagcgagcccagcagggagggcgccgaggagcagaaggagcagaggaagcagagggtgcaggtgggcacctacaggaaggagggatctggctccggcagcggccccaagaaaaagagaaaagtctaagctgccttctgcggggcttgccttctggccatgcccttcttctctcccttgcacctgtacctcttggtctttgaataaagcctgagtaggaaggctagcaaaaaaaaaaaaaaaaaaaaaaaaaaaaaaaaaaaaaaaaaaaaaaaaaaaaaaaaaaaaaaaaaaaaaaaaaaaaaaaa

SEQ ID NO: 16412 - RNA, 9485 nt, synthetic construct
  source 1..9485: mol_type = other RNA
aggaaataagagagaaaagaagagtaagaagaaatataagagccaccatggcccctaagaagaagcgtaaagtgagccggatggaacgcctcgtctacgaggtgcggcagaagtgcagaaacatcgaggacatctgcatctcctgcggatctctgaacgtgaccctggagcacccactgttcatcggcggcatgtgccagaactgtaaaaactgttttctggagtgtgcctatcaatacgacgatgacggctaccagagctactgcaccatctgttgcggcggaagagaggtgctgatgtgtggaaataacaactgctgccggtgcttctgcgtggaatgcgtggacctgctggtgggccccggcgccgcccaggccgctattaaggaagatccttggaactgctacatgtgcggccacaagggcacatacggcctgctgagacggagagaggactggcctagcagactgcagatgttcttcgccaataaccacgaccaggagttcgacccccctaaggtgtaccctcccgtccccgccgagaagagaaagcccatccgggtcctgagcctgttcgatggcatcgccaccggtctgctggtgctgaaggacctgggcatccaggtggataggtacattgcctccgaggtgtgcgaggactccatcaccgtgggaatggtgcgtcatcagggcaagatcatgtacgtgggcgacgtgcggagcgtgacacagaagcatatccaggagtggggccctttcgacctggtgatcggcggcagcccttgcaatgacctgagcatcgtgaacccagcccggaagggcctgtacgagggaaccggcagactgttcttcgagttttacagactgctgcacgacgcccggcctaaggaaggcgacgaccggcccttcttttggctgttcgagaatgtggtggccatgggagtcagcgacaagcgggatattagccggttcctggagagcaaccccgtgatgatcgatgccaaggaagtgagcgccgcccaccgggccagatacttctggggcaatctgcctggcatgaacagacccctggccagcaccgtgaacgacaagctggagctgcaggagtgcctggagcacggccggatcgccaagttcagcaaggtgagaaccatcaccacccgaagcaacagcatcaaacaaggcaaggaccagcactttcctgtgttcatgaacgagaaggaggacatcctgtggtgtaccgagatggagagagtgttcgggttcccagtccactacacagatgtcagcaacatgtctagactggccagacagagactgctgggaagaagctggtccgtccctgtgatcagacacctgttcgcccctctgaaggagtacttcgcctgcgtgagcagcggcaacagcaacgccaacagccggggccccagcttctctagcggcctggtgccactgtccctgagagggagccacatgggccccatggagatctacaaaaccgtgagcgcctggaagcggcagcctgtgcgcgtgctgagcctgtttcggaatatcgataaagtcctgaaaagcctgggattcctggagagcggctctggctccggcggtggcaccctgaagtacgtggaggatgtgacaaacgtggtcagacgggatgtggagaagtggggccccttcgatctggtgtacggcagcacccaacccctgggcagctcttgtgaccggtgccctggctggtacatgtttcagttccaccggatcctgcagtacgccctgccgagacaggagtcccagcggccattcttttggattttcatggacaacttgctgctgaccgaggatgaccaggaaactaccactcggttcctgcagaccgaagccgtgaccctgcaggacgtgagaggccgggactaccagaacgccatgcgggtgtggtccaacatccctggactgaaaagcaagcacgcacctctgacccctaaagaagaggagtacctgcaggcccaggtgcggagcagaagcaagctggacgcccctaaggtggatctgctggtgaagaattgcctcctgcccctgagagagtacttcaagtatttcagccagaatagtctgcccctgggaggcagcggcggcggcgccctggtgacatttgaggacgtcgccgtgcggttcacccaggaggaatgggctctgctggatccttctcagaaaatcctgtaccgggacgtgatgagagagacataccggaatctgacctccgtgggcatcaactgggaatgttgggaccttgaagcctgcttcagaagcctgggaagaaacctgagagtgcaggtggtgaagagaaagtgcgagctgaccaacagcggcccctgcgccgagggcggcccaagcagcggcgcccctcctcccagcggcggcagcccagccggctccccaacctctaccgaggagggcacctctgagtccgccacccccgagagcggccctggcacctccaccgagcccagcgagggcagcgcacccggcagccctgccggcagccccacctccacagaggagggaaccagcaccgagcccagcgaaggcagcgccccaggcaccagcaccgagcctagtgagcaggagattaaacggatcaacaagatcagaagaagacttgtgaaagacagcaacaccaagaaggccggcaagacaggccccatgaaaaccctgctggttagagtgatgacacccgatctgagagagcggctggaaaacctgagaaagaagcctgaaaatatcccccagcccatcagcaatacatctagagccaacctgaataagctgctgaccgattacaccgaaatgaagaaggcgatcctgcatgtgtactgggaagagttccagaaggaccctgtgggcctgatgagccgggtggcccagcctgccagcaagaagatcgatcagaacaagctgaaacctgagatggacgagaagggcaacctgaccaccgccggctttgcctgctctcagtgtggccagcccctgttcgtgtacaagctggagcaggtgtctgagaagggcaaggcttacaccaactacttcggacggtgcaatgtggccgagcacgaaaagctgatcctgctggcccagctgaagcccgagaaggatagcgacgaagccgtgacatatagcctgggaaagtttgggcagagggccctggatttctacagcattcatgtgaccaaggagtccacccaccccgtgaagcccctggcccagatcgccggaaacagatacgcctccggacctgtgggaaaggccctgagcgacgcatgtatgggcacaatcgcctccttcctgtctaagtaccaggacatcatcatcgaacaccagaaggtggtgaagggcaaccagaagagactggagagcctgcgggagctggccggcaaggaaaacctggaataccctagcgtgaccctgccacctcagcctcacaccaaggagggcgttgatgcctacaacgaagtgatcgcccgggtgcgaatgtgggtgaacctgaacctgtggcagaagctgaagctaagcagagatgatgccaagcctctgctgagactgaagggattcccttcctttcctctggtcgagagacaggccaacgaagtggactggtgggacatggtgtgtaacgtgaagaagctgatcaacgagaaaaaggaggatggcaaggtgttttggcagaatctggctggctacaagagacaggaagccctgagaccatacctgagcagcgaggaagatcggaagaagggaaagaaattcgctcggtaccagctgggcgacctgctgctgcacctggaaaagaagcacggcgaggactggggaaaggtgtacgacgaggcctgggagcggattgacaagaaagtggaaggcctgagcaagcacatcaagctggaagaggaacggagaagcgaggacgcccagagcaaggccgccctgaccgactggctgcgggctaaggccagcttcgtgatcgagggcctgaaggaggccgacaaggacgagttctgcagatgcgagctgaagctgcagaagtggtacggggacctgcggggaaagcccttcgccatcgaagccgagaacagcatcctggacatcagcggcttcagcaagcagtacaactgtgccttcatctggcagaaggacggcgtgaagaagctgaacctgtacctgatcatcaactacttcaagggcggcaagctgcggttcaagaagatcaaacctgaagccttcgaagccaacagattctacaccgtgatcaacaaaaagagcggcgagatcgtgcccatggaggtgaacttcaacttcgacgaccccaacctgatcatcctgcctctggcctttggcaagagacagggcagagaattcatctggaacgacctgctgtccctggaaaccggcagcctgaagctggccaacggaagagtgatcgagaagacactgtacaacagaagaacccggcaggatgagcctgccctgttcgtggccctgaccttcgagcggcgggaggtcctggactcctccaatatcaaaccaatgaacctgatcggcgtggcaagaggcgaaaacatccccgccgtgatcgccctgaccgaccccgagggctgcccactgagccggtttaaggatagcctgggaaacccaacccacatcctgagaatcggcgagagctataaggagaagcagcggaccatccaggccaagaaggaggtggagcagcggagagccggcggctacagccggaagtacgccagcaaagccaagaatctggcagacgatatggtgagaaacaccgctagagatctgctgtactacgccgtgacccaggatgccatgctgatcttcgccaacctgagccggggcttcggccggcagggcaagcggaccttcatggccgagagacagtacacacggatggaggactggctgaccgccaagctggcctacgagggcctgagcaagacctacctgtccaagacactggcccagtacacctccaagacatgcagcaactgtgggtttaccatcaccagcgccgactacgacagggtgctggagaagctgaagaagacagcaacaggctggatgaccacaattaacggcaaggagctgaaggtggagggccagattacctactacaacagatacaagagacagaacgtagtcaaggacctgtccgtcgagctggatagactgagcgaagaatctgtgaacaacgacatctcctcctggacaaagggcagaagcggagaagctctgagcctcctgaagaaaagattctcccatagacccgtgcaggagaagttcgtgtgcctgaactgcggcttcgagacacacgcagccgagcaagccgccctgaacatcgccagatcctggctgttcctgcggagccaggagtacaagaaataccagacaaacaagacaaccggcaacaccgataagagagccttcgtcgagacctggcagtccttttaccggaagaagcttaaggaggtgtggaaacctgccgtgcggtctggcggatctggcggaggctccgacagcatgagggtgaccttcgaggaggtggccgtgtacttcacccccggccagggcgccctgctgggccccgcccagagggccctgtacagggacgtgatgcaggagaactacgaggccgtgaccagcctgggcttccccgtgcccaagcccgagctgatcgccaggctggagaggggcgaggagccctgggtgcccgacctgcaggccagggaggagagggagatccccaggggcacctgcggcggcccaagcagcggcgcccctcctcccagcggcggcagcccagccggctccccaacctctaccgaggagggcacctctgagtccgccacccccgagagcggccctggcacctccaccgagcccagcgagggcagcgcacccggcagccctgccggcagccccacctccacagaggagggaaccagcaccgagcccagcgaaggcagcgccccaggcaccagcaccgagcctagtgagcaggagattaaacggatcaacaagatcagaagaagacttgtgaaagacagcaacaccaagaaggccggcaagacaggccccatgaaaaccctgctggttagagtgatgacacccgatctgagagagcggctggaaaacctgagaaagaagcctgaaaatatcccccagcccatcagcaatacatctagagccaacctgaataagctgctgaccgattacaccgaaatgaagaaggcgatcctgcatgtgtactgggaagagttccagaaggaccctgtgggcctgatgagccgggtggcccagcctgccagcaagaagatcgatcagaacaagctgaaacctgagatggacgagaagggcaacctgaccaccgccggctttgcctgctctcagtgtggccagcccctgttcgtgtacaagctggagcaggtgtctgagaagggcaaggcttacaccaactacttcggacggtgcaatgtggccgagcacgaaaagctgatcctgctggcccagctgaagcccgagaaggatagcgacgaagccgtgacatatagcctgggaaagtttgggcagagggccctggatttctacagcattcatgtgaccaaggagtccacccaccccgtgaagcccctggcccagatcgccggaaacagatacgcctccggacctgtgggaaaggccctgagcgacgcatgtatgggcacaatcgcctccttcctgtctaagtaccaggacatcatcatcgaacaccagaaggtggtgaagggcaaccagaagagactggagagcctgcgggagctggccggcaaggaaaacctggaataccctagcgtgaccctgccacctcagcctcacaccaaggagggcgttgatgcctacaacgaagtgatcgcccgggtgcgaatgtgggtgaacctgaacctgtggcagaagctgaagctaagcagagatgatgccaagcctctgctgagactgaagggattcccttcctttcctctggtcgagagacaggccaacgaagtggactggtgggacatggtgtgtaacgtgaagaagctgatcaacgagaaaaaggaggatggcaaggtgttttggcagaatctggctggctacaagagacaggaagccctgagaccatacctgagcagcgaggaagatcggaagaagggaaagaaattcgctcggtaccagctgggcgacctgctgctgcacctggaaaagaagcacggcgaggactggggaaaggtgtacgacgaggcctgggagcggattgacaagaaagtggaaggcctgagcaagcacatcaagctggaagaggaacggagaagcgaggacgcccagagcaaggccgccctgaccgactggctgcgggctaaggccagcttcgtgatcgagggcctgaaggaggccgacaaggacgagttctgcagatgcgagctgaagctgcagaagtggtacggggacctgcggggaaagcccttcgccatcgaagccgagaacagcatcctggacatcagcggcttcagcaagcagtacaactgtgccttcatctggcagaaggacggcgtgaagaagctgaacctgtacctgatcatcaactacttcaagggcggcaagctgcggttcaagaagatcaaacctgaagccttcgaagccaacagattctacaccgtgatcaacaaaaagagcggcgagatcgtgcccatggaggtgaacttcaacttcgacgaccccaacctgatcatcctgcctctggcctttggcaagagacagggcagagaattcatctggaacgacctgctgtccctggaaaccggcagcctgaagctggccaacggaagagtgatcgagaagacactgtacaacagaagaacccggcaggatgagcctgccctgttcgtggccctgaccttcgagcggcgggaggtcctggactcctccaatatcaaaccaatgaacctgatcggcgtggcaagaggcgaaaacatccccgccgtgatcgccctgaccgaccccgagggctgcccactgagccggtttaaggatagcctgggaaacccaacccacatcctgagaatcggcgagagctataaggagaagcagcggaccatccaggccaagaaggaggtggagcagcggagagccggcggctacagccggaagtacgccagcaaagccaagaatctggcagacgatatggtgagaaacaccgctagagatctgctgtactacgccgtgacccaggatgccatgctgatcttcgccaacctgagccggggcttcggccggcagggcaagcggaccttcatggccgagagacagtacacacggatggaggactggctgaccgccaagctggcctacgagggcctgagcaagacctacctgtccaagacactggcccagtacacctccaagacatgcagcaactgtgggtttaccatcaccagcgccgactacgacagggtgctggagaagctgaagaagacagcaacaggctggatgaccacaattaacggcaaggagctgaaggtggagggccagattacctactacaacagatacaagagacagaacgtagtcaaggacctgtccgtcgagctggatagactgagcgaagaatctgtgaacaacgacatctcctcctggacaaagggcagaagcggagaagctctgagcctcctgaagaaaagattctcccatagacccgtgcaggagaagttcgtgtgcctgaactgcggcttcgagacacacgcagccgagcaagccgccctgaacatcgccagatcctggctgttcctgcggagccaggagtacaagaaataccagacaaacaagacaaccggcaacaccgataagagagccttcgtcgagacctggcagtccttttaccggaagaagcttaaggaggtgtggaaacctgccgtgcggtctggcggatctggcggaggctcctgacagcatgagggtgaccttcgaggaggtggccgtgtacttcacccccggccagggcgccctgctgggccccgcccagagggccctgtacagggacgtgatgcaggagaactacgaggccgtgaccagcctgggcttccccgtgcccaagcccgagctgatcgccaggctggagaggggcgaggagccctgggtgcccgacctgcaggccagggaggagagggagatccccaggggcacctgcggatctggctccggcagcggccccaagaaaaagagaaaagtctaagctgccttctgcggggcttgccttctggccatgcccttcttctctcccttgcacctgtacctcttggtctttgaataaagcctgagtaggaaggctagcaaaaaaaaaaaaaaaaaaaaaaaaaaaaaaaaaaaaaaaaaaaaaaaaaaaaaaaaaaaaaaaaaaaaaaaaaaaaaaaa

SEQ ID NO: 16413 - RNA, 9485 nt, synthetic construct
  source 1..9485: mol_type = other RNA
aggaaataagagagaaaagaagagtaagaagaaatataagagccaccatggcccctaagaagaagcgtaaagtgagccggatggaacgcctcgtctacgaggtgcggcagaagtgcagaaacatcgaggacatctgcatctcctgcggatctctgaacgtgaccctggagcacccactgttcatcggcggcatgtgccagaactgtaaaaactgttttctggagtgtgcctatcaatacgacgatgacggctaccagagctactgcaccatctgttgcggcggaagagaggtgctgatgtgtggaaataacaactgctgccggtgcttctgcgtggaatgcgtggacctgctggtgggccccggcgccgcccaggccgctattaaggaagatccttggaactgctacatgtgcggccacaagggcacatacggcctgctgagacggagagaggactggcctagcagactgcagatgttcttcgccaataaccacgaccaggagttcgacccccctaaggtgtaccctcccgtccccgccgagaagagaaagcccatccgggtcctgagcctgttcgatggcatcgccaccggtctgctggtgctgaaggacctgggcatccaggtggataggtacattgcctccgaggtgtgcgaggactccatcaccgtgggaatggtgcgtcatcagggcaagatcatgtacgtgggcgacgtgcggagcgtgacacagaagcatatccaggagtggggccctttcgacctggtgatcggcggcagcccttgcaatgacctgagcatcgtgaacccagcccggaagggcctgtacgagggaaccggcagactgttcttcgagttttacagactgctgcacgacgcccggcctaaggaaggcgacgaccggcccttcttttggctgttcgagaatgtggtggccatgggagtcagcgacaagcgggatattagccggttcctggagagcaaccccgtgatgatcgatgccaaggaagtgagcgccgcccaccgggccagatacttctggggcaatctgcctggcatgaacagacccctggccagcaccgtgaacgacaagctggagctgcaggagtgcctggagcacggccggatcgccaagttcagcaaggtgagaaccatcaccacccgaagcaacagcatcaaacaaggcaaggaccagcactttcctgtgttcatgaacgagaaggaggacatcctgtggtgtaccgagatggagagagtgttcgggttcccagtccactacacagatgtcagcaacatgtctagactggccagacagagactgctgggaagaagctggtccgtccctgtgatcagacacctgttcgcccctctgaaggagtacttcgcctgcgtgagcagcggcaacagcaacgccaacagccggggccccagcttctctagcggcctggtgccactgtccctgagagggagccacatgggccccatggagatctacaaaaccgtgagcgcctggaagcggcagcctgtgcgcgtgctgagcctgtttcggaatatcgataaagtcctgaaaagcctgggattcctggagagcggctctggctccggcggtggcaccctgaagtacgtggaggatgtgacaaacgtggtcagacgggatgtggagaagtggggccccttcgatctggtgtacggcagcacccaacccctgggcagctcttgtgaccggtgccctggctggtacatgtttcagttccaccggatcctgcagtacgccctgccgagacaggagtcccagcggccattcttttggattttcatggacaacttgctgctgaccgaggatgaccaggaaactaccactcggttcctgcagaccgaagccgtgaccctgcaggacgtgagaggccgggactaccagaacgccatgcgggtgtggtccaacatccctggactgaaaagcaagcacgcacctctgacccctaaagaagaggagtacctgcaggcccaggtgcggagcagaagcaagctggacgcccctaaggtggatctgctggtgaagaattgcctcctgcccctgagagagtacttcaagtatttcagccagaatagtctgcccctgggaggcagcggcggcggcgccctggtgacatttgaggacgtcgccgtgcggttcacccaggaggaatgggctctgctggatccttctcagaaaatcctgtaccgggacgtgatgagagagacataccggaatctgacctccgtgggcatcaactgggaatgttgggaccttgaagcctgcttcagaagcctgggaagaaacctgagagtgcaggtggtgaagagaaagtgcgagctgaccaacagcggcccctgcgccgagggcggcccaagcagcggcgcccctcctcccagcggcggcagcccagccggctccccaacctctaccgaggagggcacctctgagtccgccacccccgagagcggccctggcacctccaccgagcccagcgagggcagcgcacccggcagccctgccggcagccccacctccacagaggagggaaccagcaccgagcccagcgaaggcagcgccccaggcaccagcaccgagcctagtgagcaggagattaaacggatcaacaagatcagaagaagacttgtgaaagacagcaacaccaagaaggccggcaagacaggccccatgaaaaccctgctggttagagtgatgacacccgatctgagagagcggctggaaaacctgagaaagaagcctgaaaatatcccccagcccatcagcaatacatctagagccaacctgaataagctgctgaccgattacaccgaaatgaagaaggcgatcctgcatgtgtactgggaagagttccagaaggaccctgtgggcctgatgagccgggtggcccagcctgccagcaagaagatcgatcagaacaagctgaaacctgagatggacgagaagggcaacctgaccaccgccggctttgcctgctctcagtgtggccagcccctgttcgtgtacaagctggagcaggtgtctgagaagggcaaggcttacaccaactacttcggacggtgcaatgtggccgagcacgaaaagctgatcctgctggcccagctgaagcccgagaaggatagcgacgaagccgtgacatatagcctgggaaagtttgggcagagggccctggatttctacagcattcatgtgaccaaggagtccacccaccccgtgaagcccctggcccagatcgccggaaacagatacgcctccggacctgtgggaaaggccctgagcgacgcatgtatgggcacaatcgcctccttcctgtctaagtaccaggacatcatcatcgaacaccagaaggtggtgaagggcaaccagaagagactggagagcctgcgggagctggccggcaaggaaaacctggaataccctagcgtgaccctgccacctcagcctcacaccaaggagggcgttgatgcctacaacgaagtgatcgcccgggtgcgaatgtgggtgaacctgaacctgtggcagaagctgaagctaagcagagatgatgccaagcctctgctgagactgaagggattcccttcctttcctctggtcgagagacaggccaacgaagtggactggtgggacatggtgtgtaacgtgaagaagctgatcaacgagaaaaaggaggatggcaaggtgttttggcagaatctggctggctacaagagacaggaagccctgagaccatacctgagcagcgaggaagatcggaagaagggaaagaaattcgctcggtaccagctgggcgacctgctgctgcacctggaaaagaagcacggcgaggactggggaaaggtgtacgacgaggcctgggagcggattgacaagaaagtggaaggcctgagcaagcacatcaagctggaagaggaacggagaagcgaggacgcccagagcaaggccgccctgaccgactggctgcgggctaaggccagcttcgtgatcgagggcctgaaggaggccgacaaggacgagttctgcagatgcgagctgaagctgcagaagtggtacggggacctgcggggaaagcccttcgccatcgaagccgagaacagcatcctggacatcagcggcttcagcaagcagtacaactgtgccttcatctggcagaaggacggcgtgaagaagctgaacctgtacctgatcatcaactacttcaagggcggcaagctgcggttcaagaagatcaaacctgaagccttcgaagccaacagattctacaccgtgatcaacaaaaagagcggcgagatcgtgcccatggaggtgaacttcaacttcgacgaccccaacctgatcatcctgcctctggcctttggcaagagacagggcagagaattcatctggaacgacctgctgtccctggaaaccggcagcctgaagctggccaacggaagagtgatcgagaagacactgtacaacagaagaacccggcaggatgagcctgccctgttcgtggccctgaccttcgagcggcgggaggtcctggactcctccaatatcaaaccaatgaacctgatcggcgtggcaagaggcgaaaacatccccgccgtgatcgccctgaccgaccccgagggctgcccactgagccggtttaaggatagcctgggaaacccaacccacatcctgagaatcggcgagagctataaggagaagcagcggaccatccaggccaagaaggaggtggagcagcggagagccggcggctacagccggaagtacgccagcaaagccaagaatctggcagacgatatggtgagaaacaccgctagagatctgctgtactacgccgtgacccaggatgccatgctgatcttcgccaacctgagccggggcttcggccggcagggcaagcggaccttcatggccgagagacagtacacacggatggaggactggctgaccgccaagctggcctacgagggcctgagcaagacctacctgtccaagacactggcccagtacacctccaagacatgcagcaactgtgggtttaccatcaccagcgccgactacgacagggtgctggagaagctgaagaagacagcaacaggctggatgaccacaattaacggcaaggagctgaaggtggagggccagattacctactacaacagatacaagagacagaacgtagtcaaggacctgtccgtcgagctggatagactgagcgaagaatctgtgaacaacgacatctcctcctggacaaagggcagaagcggagaagctctgagcctcctgaagaaaagattctcccatagacccgtgcaggagaagttcgtgtgcctgaactgcggcttcgagacacacgcagccgagcaagccgccctgaacatcgccagatcctggctgttcctgcggagccaggagtacaagaaataccagacaaacaagacaaccggcaacaccgataagagagccttcgtcgagacctggcagtccttttaccggaagaagcttaaggaggtgtggaaacctgccgtgcggtctggcggatctggcggaggctcctgcttcagcggcgaggagaggatggccgccggccacccccccaggtggccccaggagctggtgaccttcgaggacgtgagcgtggacttcagccaggaggagtgggagctgctggaccccgcccagaaggagctgtacagggaggtgaccctggagaactacaggaacctggtgagcctggaggccctgaagaacccctgcgccgacgccggcatggaggagggccccttcagcaccgcccacggcggcccaagcagcggcgcccctcctcccagcggcggcagcccagccggctccccaacctctaccgaggagggcacctctgagtccgccacccccgagagcggccctggcacctccaccgagcccagcgagggcagcgcacccggcagccctgccggcagccccacctccacagaggagggaaccagcaccgagcccagcgaaggcagcgccccaggcaccagcaccgagcctagtgagcaggagattaaacggatcaacaagatcagaagaagacttgtgaaagacagcaacaccaagaaggccggcaagacaggccccatgaaaaccctgctggttagagtgatgacacccgatctgagagagcggctggaaaacctgagaaagaagcctgaaaatatcccccagcccatcagcaatacatctagagccaacctgaataagctgctgaccgattacaccgaaatgaagaaggcgatcctgcatgtgtactgggaagagttccagaaggaccctgtgggcctgatgagccgggtggcccagcctgccagcaagaagatcgatcagaacaagctgaaacctgagatggacgagaagggcaacctgaccaccgccggctttgcctgctctcagtgtggccagcccctgttcgtgtacaagctggagcaggtgtctgagaagggcaaggcttacaccaactacttcggacggtgcaatgtggccgagcacgaaaagctgatcctgctggcccagctgaagcccgagaaggatagcgacgaagccgtgacatatagcctgggaaagtttgggcagagggccctggatttctacagcattcatgtgaccaaggagtccacccaccccgtgaagcccctggcccagatcgccggaaacagatacgcctccggacctgtgggaaaggccctgagcgacgcatgtatgggcacaatcgcctccttcctgtctaagtaccaggacatcatcatcgaacaccagaaggtggtgaagggcaaccagaagagactggagagcctgcgggagctggccggcaaggaaaacctggaataccctagcgtgaccctgccacctcagcctcacaccaaggagggcgttgatgcctacaacgaagtgatcgcccgggtgcgaatgtgggtgaacctgaacctgtggcagaagctgaagctaagcagagatgatgccaagcctctgctgagactgaagggattcccttcctttcctctggtcgagagacaggccaacgaagtggactggtgggacatggtgtgtaacgtgaagaagctgatcaacgagaaaaaggaggatggcaaggtgttttggcagaatctggctggctacaagagacaggaagccctgagaccatacctgagcagcgaggaagatcggaagaagggaaagaaattcgctcggtaccagctgggcgacctgctgctgcacctggaaaagaagcacggcgaggactggggaaaggtgtacgacgaggcctgggagcggattgacaagaaagtggaaggcctgagcaagcacatcaagctggaagaggaacggagaagcgaggacgcccagagcaaggccgccctgaccgactggctgcgggctaaggccagcttcgtgatcgagggcctgaaggaggccgacaaggacgagttctgcagatgcgagctgaagctgcagaagtggtacggggacctgcggggaaagcccttcgccatcgaagccgagaacagcatcctggacatcagcggcttcagcaagcagtacaactgtgccttcatctggcagaaggacggcgtgaagaagctgaacctgtacctgatcatcaactacttcaagggcggcaagctgcggttcaagaagatcaaacctgaagccttcgaagccaacagattctacaccgtgatcaacaaaaagagcggcgagatcgtgcccatggaggtgaacttcaacttcgacgaccccaacctgatcatcctgcctctggcctttggcaagagacagggcagagaattcatctggaacgacctgctgtccctggaaaccggcagcctgaagctggccaacggaagagtgatcgagaagacactgtacaacagaagaacccggcaggatgagcctgccctgttcgtggccctgaccttcgagcggcgggaggtcctggactcctccaatatcaaaccaatgaacctgatcggcgtggcaagaggcgaaaacatccccgccgtgatcgccctgaccgaccccgagggctgcccactgagccggtttaaggatagcctgggaaacccaacccacatcctgagaatcggcgagagctataaggagaagcagcggaccatccaggccaagaaggaggtggagcagcggagagccggcggctacagccggaagtacgccagcaaagccaagaatctggcagacgatatggtgagaaacaccgctagagatctgctgtactacgccgtgacccaggatgccatgctgatcttcgccaacctgagccggggcttcggccggcagggcaagcggaccttcatggccgagagacagtacacacggatggaggactggctgaccgccaagctggcctacgagggcctgagcaagacctacctgtccaagacactggcccagtacacctccaagacatgcagcaactgtgggtttaccatcaccagcgccgactacgacagggtgctggagaagctgaagaagacagcaacaggctggatgaccacaattaacggcaaggagctgaaggtggagggccagattacctactacaacagatacaagagacagaacgtagtcaaggacctgtccgtcgagctggatagactgagcgaagaatctgtgaacaacgacatctcctcctggacaaagggcagaagcggagaagctctgagcctcctgaagaaaagattctcccatagacccgtgcaggagaagttcgtgtgcctgaactgcggcttcgagacacacgcagccgagcaagccgccctgaacatcgccagatcctggctgttcctgcggagccaggagtacaagaaataccagacaaacaagacaaccggcaacaccgataagagagccttcgtcgagacctggcagtccttttaccggaagaagcttaaggaggtgtggaaacctgccgtgcggtctggcggatctggcggaggctccttgcttcagcggcgaggagaggatggccgccggccacccccccaggtggccccaggagctggtgaccttcgaggacgtgagcgtggacttcagccaggaggagtgggagctgctggaccccgcccagaaggagctgtacagggaggtgaccctggagaactacaggaacctggtgagcctggaggccctgaagaacccctgcgccgacgccggcatggaggagggccccttcagcaccgcccacggatctggctccggcagcggccccaagaaaaagagaaaagtctaagctgccttctgcggggcttgccttctggccatgcccttcttctctcccttgcacctgtacctcttggtctttgaataaagcctgagtaggaaggctagcaaaaaaaaaaaaaaaaaaaaaaaaaaaaaaaaaaaaaaaaaaaaaaaaaaaaaaaaaaaaaaaaaaaaaaaaaaaaaaaa

SEQ ID NO: 16414 - RNA, 9485 nt, synthetic construct
  source 1..9485: mol_type = other RNA
aggaaataagagagaaaagaagagtaagaagaaatataagagccaccatggcccctaagaagaagcgtaaagtgagccggatggaacgcctcgtctacgaggtgcggcagaagtgcagaaacatcgaggacatctgcatctcctgcggatctctgaacgtgaccctggagcacccactgttcatcggcggcatgtgccagaactgtaaaaactgttttctggagtgtgcctatcaatacgacgatgacggctaccagagctactgcaccatctgttgcggcggaagagaggtgctgatgtgtggaaataacaactgctgccggtgcttctgcgtggaatgcgtggacctgctggtgggccccggcgccgcccaggccgctattaaggaagatccttggaactgctacatgtgcggccacaagggcacatacggcctgctgagacggagagaggactggcctagcagactgcagatgttcttcgccaataaccacgaccaggagttcgacccccctaaggtgtaccctcccgtccccgccgagaagagaaagcccatccgggtcctgagcctgttcgatggcatcgccaccggtctgctggtgctgaaggacctgggcatccaggtggataggtacattgcctccgaggtgtgcgaggactccatcaccgtgggaatggtgcgtcatcagggcaagatcatgtacgtgggcgacgtgcggagcgtgacacagaagcatatccaggagtggggccctttcgacctggtgatcggcggcagcccttgcaatgacctgagcatcgtgaacccagcccggaagggcctgtacgagggaaccggcagactgttcttcgagttttacagactgctgcacgacgcccggcctaaggaaggcgacgaccggcccttcttttggctgttcgagaatgtggtggccatgggagtcagcgacaagcgggatattagccggttcctggagagcaaccccgtgatgatcgatgccaaggaagtgagcgccgcccaccgggccagatacttctggggcaatctgcctggcatgaacagacccctggccagcaccgtgaacgacaagctggagctgcaggagtgcctggagcacggccggatcgccaagttcagcaaggtgagaaccatcaccacccgaagcaacagcatcaaacaaggcaaggaccagcactttcctgtgttcatgaacgagaaggaggacatcctgtggtgtaccgagatggagagagtgttcgggttcccagtccactacacagatgtcagcaacatgtctagactggccagacagagactgctgggaagaagctggtccgtccctgtgatcagacacctgttcgcccctctgaaggagtacttcgcctgcgtgagcagcggcaacagcaacgccaacagccggggccccagcttctctagcggcctggtgccactgtccctgagagggagccacatgggccccatggagatctacaaaaccgtgagcgcctggaagcggcagcctgtgcgcgtgctgagcctgtttcggaatatcgataaagtcctgaaaagcctgggattcctggagagcggctctggctccggcggtggcaccctgaagtacgtggaggatgtgacaaacgtggtcagacgggatgtggagaagtggggccccttcgatctggtgtacggcagcacccaacccctgggcagctcttgtgaccggtgccctggctggtacatgtttcagttccaccggatcctgcagtacgccctgccgagacaggagtcccagcggccattcttttggattttcatggacaacttgctgctgaccgaggatgaccaggaaactaccactcggttcctgcagaccgaagccgtgaccctgcaggacgtgagaggccgggactaccagaacgccatgcgggtgtggtccaacatccctggactgaaaagcaagcacgcacctctgacccctaaagaagaggagtacctgcaggcccaggtgcggagcagaagcaagctggacgcccctaaggtggatctgctggtgaagaattgcctcctgcccctgagagagtacttcaagtatttcagccagaatagtctgcccctgggaggcagcggcggcggcgccctggtgacatttgaggacgtcgccgtgcggttcacccaggaggaatgggctctgctggatccttctcagaaaatcctgtaccgggacgtgatgagagagacataccggaatctgacctccgtgggcatcaactgggaatgttgggaccttgaagcctgcttcagaagcctgggaagaaacctgagagtgcaggtggtgaagagaaagtgcgagctgaccaacagcggcccctgcgccgagggcggcccaagcagcggcgcccctcctcccagcggcggcagcccagccggctccccaacctctaccgaggagggcacctctgagtccgccacccccgagagcggccctggcacctccaccgagcccagcgagggcagcgcacccggcagccctgccggcagccccacctccacagaggagggaaccagcaccgagcccagcgaaggcagcgccccaggcaccagcaccgagcctagtgagcaggagattaaacggatcaacaagatcagaagaagacttgtgaaagacagcaacaccaagaaggccggcaagacaggccccatgaaaaccctgctggttagagtgatgacacccgatctgagagagcggctggaaaacctgagaaagaagcctgaaaatatcccccagcccatcagcaatacatctagagccaacctgaataagctgctgaccgattacaccgaaatgaagaaggcgatcctgcatgtgtactgggaagagttccagaaggaccctgtgggcctgatgagccgggtggcccagcctgccagcaagaagatcgatcagaacaagctgaaacctgagatggacgagaagggcaacctgaccaccgccggctttgcctgctctcagtgtggccagcccctgttcgtgtacaagctggagcaggtgtctgagaagggcaaggcttacaccaactacttcggacggtgcaatgtggccgagcacgaaaagctgatcctgctggcccagctgaagcccgagaaggatagcgacgaagccgtgacatatagcctgggaaagtttgggcagagggccctggatttctacagcattcatgtgaccaaggagtccacccaccccgtgaagcccctggcccagatcgccggaaacagatacgcctccggacctgtgggaaaggccctgagcgacgcatgtatgggcacaatcgcctccttcctgtctaagtaccaggacatcatcatcgaacaccagaaggtggtgaagggcaaccagaagagactggagagcctgcgggagctggccggcaaggaaaacctggaataccctagcgtgaccctgccacctcagcctcacaccaaggagggcgttgatgcctacaacgaagtgatcgcccgggtgcgaatgtgggtgaacctgaacctgtggcagaagctgaagctaagcagagatgatgccaagcctctgctgagactgaagggattcccttcctttcctctggtcgagagacaggccaacgaagtggactggtgggacatggtgtgtaacgtgaagaagctgatcaacgagaaaaaggaggatggcaaggtgttttggcagaatctggctggctacaagagacaggaagccctgagaccatacctgagcagcgaggaagatcggaagaagggaaagaaattcgctcggtaccagctgggcgacctgctgctgcacctggaaaagaagcacggcgaggactggggaaaggtgtacgacgaggcctgggagcggattgacaagaaagtggaaggcctgagcaagcacatcaagctggaagaggaacggagaagcgaggacgcccagagcaaggccgccctgaccgactggctgcgggctaaggccagcttcgtgatcgagggcctgaaggaggccgacaaggacgagttctgcagatgcgagctgaagctgcagaagtggtacggggacctgcggggaaagcccttcgccatcgaagccgagaacagcatcctggacatcagcggcttcagcaagcagtacaactgtgccttcatctggcagaaggacggcgtgaagaagctgaacctgtacctgatcatcaactacttcaagggcggcaagctgcggttcaagaagatcaaacctgaagccttcgaagccaacagattctacaccgtgatcaacaaaaagagcggcgagatcgtgcccatggaggtgaacttcaacttcgacgaccccaacctgatcatcctgcctctggcctttggcaagagacagggcagagaattcatctggaacgacctgctgtccctggaaaccggcagcctgaagctggccaacggaagagtgatcgagaagacactgtacaacagaagaacccggcaggatgagcctgccctgttcgtggccctgaccttcgagcggcgggaggtcctggactcctccaatatcaaaccaatgaacctgatcggcgtggcaagaggcgaaaacatccccgccgtgatcgccctgaccgaccccgagggctgcccactgagccggtttaaggatagcctgggaaacccaacccacatcctgagaatcggcgagagctataaggagaagcagcggaccatccaggccaagaaggaggtggagcagcggagagccggcggctacagccggaagtacgccagcaaagccaagaatctggcagacgatatggtgagaaacaccgctagagatctgctgtactacgccgtgacccaggatgccatgctgatcttcgccaacctgagccggggcttcggccggcagggcaagcggaccttcatggccgagagacagtacacacggatggaggactggctgaccgccaagctggcctacgagggcctgagcaagacctacctgtccaagacactggcccagtacacctccaagacatgcagcaactgtgggtttaccatcaccagcgccgactacgacagggtgctggagaagctgaagaagacagcaacaggctggatgaccacaattaacggcaaggagctgaaggtggagggccagattacctactacaacagatacaagagacagaacgtagtcaaggacctgtccgtcgagctggatagactgagcgaagaatctgtgaacaacgacatctcctcctggacaaagggcagaagcggagaagctctgagcctcctgaagaaaagattctcccatagacccgtgcaggagaagttcgtgtgcctgaactgcggcttcgagacacacgcagccgagcaagccgccctgaacatcgccagatcctggctgttcctgcggagccaggagtacaagaaataccagacaaacaagacaaccggcaacaccgataagagagccttcgtcgagacctggcagtccttttaccggaagaagcttaaggaggtgtggaaacctgccgtgcggtctggcggatctggcggaggctccgagctggtgatgttcagggacgtggccatcgacgtgagccaggaggagtgggagtgcctgaaccccgcccagaggaacctgtacaaggaggtgatgctggagaactacagcaacctggtgagcctgggcctgagcgtgagcaagcccgccgtgatcagcagcctggagcagggcaaggagccctggatgttcgtgagggaggagaccggcaggtggtgcagcgacctggccagcagggacgagggcggcccaagcagcggcgcccctcctcccagcggcggcagcccagccggctccccaacctctaccgaggagggcacctctgagtccgccacccccgagagcggccctggcacctccaccgagcccagcgagggcagcgcacccggcagccctgccggcagccccacctccacagaggagggaaccagcaccgagcccagcgaaggcagcgccccaggcaccagcaccgagcctagtgagcaggagattaaacggatcaacaagatcagaagaagacttgtgaaagacagcaacaccaagaaggccggcaagacaggccccatgaaaaccctgctggttagagtgatgacacccgatctgagagagcggctggaaaacctgagaaagaagcctgaaaatatcccccagcccatcagcaatacatctagagccaacctgaataagctgctgaccgattacaccgaaatgaagaaggcgatcctgcatgtgtactgggaagagttccagaaggaccctgtgggcctgatgagccgggtggcccagcctgccagcaagaagatcgatcagaacaagctgaaacctgagatggacgagaagggcaacctgaccaccgccggctttgcctgctctcagtgtggccagcccctgttcgtgtacaagctggagcaggtgtctgagaagggcaaggcttacaccaactacttcggacggtgcaatgtggccgagcacgaaaagctgatcctgctggcccagctgaagcccgagaaggatagcgacgaagccgtgacatatagcctgggaaagtttgggcagagggccctggatttctacagcattcatgtgaccaaggagtccacccaccccgtgaagcccctggcccagatcgccggaaacagatacgcctccggacctgtgggaaaggccctgagcgacgcatgtatgggcacaatcgcctccttcctgtctaagtaccaggacatcatcatcgaacaccagaaggtggtgaagggcaaccagaagagactggagagcctgcgggagctggccggcaaggaaaacctggaataccctagcgtgaccctgccacctcagcctcacaccaaggagggcgttgatgcctacaacgaagtgatcgcccgggtgcgaatgtgggtgaacctgaacctgtggcagaagctgaagctaagcagagatgatgccaagcctctgctgagactgaagggattcccttcctttcctctggtcgagagacaggccaacgaagtggactggtgggacatggtgtgtaacgtgaagaagctgatcaacgagaaaaaggaggatggcaaggtgttttggcagaatctggctggctacaagagacaggaagccctgagaccatacctgagcagcgaggaagatcggaagaagggaaagaaattcgctcggtaccagctgggcgacctgctgctgcacctggaaaagaagcacggcgaggactggggaaaggtgtacgacgaggcctgggagcggattgacaagaaagtggaaggcctgagcaagcacatcaagctggaagaggaacggagaagcgaggacgcccagagcaaggccgccctgaccgactggctgcgggctaaggccagcttcgtgatcgagggcctgaaggaggccgacaaggacgagttctgcagatgcgagctgaagctgcagaagtggtacggggacctgcggggaaagcccttcgccatcgaagccgagaacagcatcctggacatcagcggcttcagcaagcagtacaactgtgccttcatctggcagaaggacggcgtgaagaagctgaacctgtacctgatcatcaactacttcaagggcggcaagctgcggttcaagaagatcaaacctgaagccttcgaagccaacagattctacaccgtgatcaacaaaaagagcggcgagatcgtgcccatggaggtgaacttcaacttcgacgaccccaacctgatcatcctgcctctggcctttggcaagagacagggcagagaattcatctggaacgacctgctgtccctggaaaccggcagcctgaagctggccaacggaagagtgatcgagaagacactgtacaacagaagaacccggcaggatgagcctgccctgttcgtggccctgaccttcgagcggcgggaggtcctggactcctccaatatcaaaccaatgaacctgatcggcgtggcaagaggcgaaaacatccccgccgtgatcgccctgaccgaccccgagggctgcccactgagccggtttaaggatagcctgggaaacccaacccacatcctgagaatcggcgagagctataaggagaagcagcggaccatccaggccaagaaggaggtggagcagcggagagccggcggctacagccggaagtacgccagcaaagccaagaatctggcagacgatatggtgagaaacaccgctagagatctgctgtactacgccgtgacccaggatgccatgctgatcttcgccaacctgagccggggcttcggccggcagggcaagcggaccttcatggccgagagacagtacacacggatggaggactggctgaccgccaagctggcctacgagggcctgagcaagacctacctgtccaagacactggcccagtacacctccaagacatgcagcaactgtgggtttaccatcaccagcgccgactacgacagggtgctggagaagctgaagaagacagcaacaggctggatgaccacaattaacggcaaggagctgaaggtggagggccagattacctactacaacagatacaagagacagaacgtagtcaaggacctgtccgtcgagctggatagactgagcgaagaatctgtgaacaacgacatctcctcctggacaaagggcagaagcggagaagctctgagcctcctgaagaaaagattctcccatagacccgtgcaggagaagttcgtgtgcctgaactgcggcttcgagacacacgcagccgagcaagccgccctgaacatcgccagatcctggctgttcctgcggagccaggagtacaagaaataccagacaaacaagacaaccggcaacaccgataagagagccttcgtcgagacctggcagtccttttaccggaagaagcttaaggaggtgtggaaacctgccgtgcggtctggcggatctggcggaggctcctgagctggtgatgttcagggacgtggccatcgacgtgagccaggaggagtgggagtgcctgaaccccgcccagaggaacctgtacaaggaggtgatgctggagaactacagcaacctggtgagcctgggcctgagcgtgagcaagcccgccgtgatcagcagcctggagcagggcaaggagccctggatgttcgtgagggaggagaccggcaggtggtgcagcgacctggccagcagggacgagggatctggctccggcagcggccccaagaaaaagagaaaagtctaagctgccttctgcggggcttgccttctggccatgcccttcttctctcccttgcacctgtacctcttggtctttgaataaagcctgagtaggaaggctagcaaaaaaaaaaaaaaaaaaaaaaaaaaaaaaaaaaaaaaaaaaaaaaaaaaaaaaaaaaaaaaaaaaaaaaaaaaaaaaaa

SEQ ID NO: 16415 - RNA, 9485 nt, synthetic construct
  source 1..9485: mol_type = other RNA
aggaaataagagagaaaagaagagtaagaagaaatataagagccaccatggcccctaagaagaagcgtaaagtgagccggatggaacgcctcgtctacgaggtgcggcagaagtgcagaaacatcgaggacatctgcatctcctgcggatctctgaacgtgaccctggagcacccactgttcatcggcggcatgtgccagaactgtaaaaactgttttctggagtgtgcctatcaatacgacgatgacggctaccagagctactgcaccatctgttgcggcggaagagaggtgctgatgtgtggaaataacaactgctgccggtgcttctgcgtggaatgcgtggacctgctggtgggccccggcgccgcccaggccgctattaaggaagatccttggaactgctacatgtgcggccacaagggcacatacggcctgctgagacggagagaggactggcctagcagactgcagatgttcttcgccaataaccacgaccaggagttcgacccccctaaggtgtaccctcccgtccccgccgagaagagaaagcccatccgggtcctgagcctgttcgatggcatcgccaccggtctgctggtgctgaaggacctgggcatccaggtggataggtacattgcctccgaggtgtgcgaggactccatcaccgtgggaatggtgcgtcatcagggcaagatcatgtacgtgggcgacgtgcggagcgtgacacagaagcatatccaggagtggggccctttcgacctggtgatcggcggcagcccttgcaatgacctgagcatcgtgaacccagcccggaagggcctgtacgagggaaccggcagactgttcttcgagttttacagactgctgcacgacgcccggcctaaggaaggcgacgaccggcccttcttttggctgttcgagaatgtggtggccatgggagtcagcgacaagcgggatattagccggttcctggagagcaaccccgtgatgatcgatgccaaggaagtgagcgccgcccaccgggccagatacttctggggcaatctgcctggcatgaacagacccctggccagcaccgtgaacgacaagctggagctgcaggagtgcctggagcacggccggatcgccaagttcagcaaggtgagaaccatcaccacccgaagcaacagcatcaaacaaggcaaggaccagcactttcctgtgttcatgaacgagaaggaggacatcctgtggtgtaccgagatggagagagtgttcgggttcccagtccactacacagatgtcagcaacatgtctagactggccagacagagactgctgggaagaagctggtccgtccctgtgatcagacacctgttcgcccctctgaaggagtacttcgcctgcgtgagcagcggcaacagcaacgccaacagccggggccccagcttctctagcggcctggtgccactgtccctgagagggagccacatgggccccatggagatctacaaaaccgtgagcgcctggaagcggcagcctgtgcgcgtgctgagcctgtttcggaatatcgataaagtcctgaaaagcctgggattcctggagagcggctctggctccggcggtggcaccctgaagtacgtggaggatgtgacaaacgtggtcagacgggatgtggagaagtggggccccttcgatctggtgtacggcagcacccaacccctgggcagctcttgtgaccggtgccctggctggtacatgtttcagttccaccggatcctgcagtacgccctgccgagacaggagtcccagcggccattcttttggattttcatggacaacttgctgctgaccgaggatgaccaggaaactaccactcggttcctgcagaccgaagccgtgaccctgcaggacgtgagaggccgggactaccagaacgccatgcgggtgtggtccaacatccctggactgaaaagcaagcacgcacctctgacccctaaagaagaggagtacctgcaggcccaggtgcggagcagaagcaagctggacgcccctaaggtggatctgctggtgaagaattgcctcctgcccctgagagagtacttcaagtatttcagccagaatagtctgcccctgggaggcagcggcggcggcgccctggtgacatttgaggacgtcgccgtgcggttcacccaggaggaatgggctctgctggatccttctcagaaaatcctgtaccgggacgtgatgagagagacataccggaatctgacctccgtgggcatcaactgggaatgttgggaccttgaagcctgcttcagaagcctgggaagaaacctgagagtgcaggtggtgaagagaaagtgcgagctgaccaacagcggcccctgcgccgagggcggcccaagcagcggcgcccctcctcccagcggcggcagcccagccggctccccaacctctaccgaggagggcacctctgagtccgccacccccgagagcggccctggcacctccaccgagcccagcgagggcagcgcacccggcagccctgccggcagccccacctccacagaggagggaaccagcaccgagcccagcgaaggcagcgccccaggcaccagcaccgagcctagtgagcaggagattaaacggatcaacaagatcagaagaagacttgtgaaagacagcaacaccaagaaggccggcaagacaggccccatgaaaaccctgctggttagagtgatgacacccgatctgagagagcggctggaaaacctgagaaagaagcctgaaaatatcccccagcccatcagcaatacatctagagccaacctgaataagctgctgaccgattacaccgaaatgaagaaggcgatcctgcatgtgtactgggaagagttccagaaggaccctgtgggcctgatgagccgggtggcccagcctgccagcaagaagatcgatcagaacaagctgaaacctgagatggacgagaagggcaacctgaccaccgccggctttgcctgctctcagtgtggccagcccctgttcgtgtacaagctggagcaggtgtctgagaagggcaaggcttacaccaactacttcggacggtgcaatgtggccgagcacgaaaagctgatcctgctggcccagctgaagcccgagaaggatagcgacgaagccgtgacatatagcctgggaaagtttgggcagagggccctggatttctacagcattcatgtgaccaaggagtccacccaccccgtgaagcccctggcccagatcgccggaaacagatacgcctccggacctgtgggaaaggccctgagcgacgcatgtatgggcacaatcgcctccttcctgtctaagtaccaggacatcatcatcgaacaccagaaggtggtgaagggcaaccagaagagactggagagcctgcgggagctggccggcaaggaaaacctggaataccctagcgtgaccctgccacctcagcctcacaccaaggagggcgttgatgcctacaacgaagtgatcgcccgggtgcgaatgtgggtgaacctgaacctgtggcagaagctgaagctaagcagagatgatgccaagcctctgctgagactgaagggattcccttcctttcctctggtcgagagacaggccaacgaagtggactggtgggacatggtgtgtaacgtgaagaagctgatcaacgagaaaaaggaggatggcaaggtgttttggcagaatctggctggctacaagagacaggaagccctgagaccatacctgagcagcgaggaagatcggaagaagggaaagaaattcgctcggtaccagctgggcgacctgctgctgcacctggaaaagaagcacggcgaggactggggaaaggtgtacgacgaggcctgggagcggattgacaagaaagtggaaggcctgagcaagcacatcaagctggaagaggaacggagaagcgaggacgcccagagcaaggccgccctgaccgactggctgcgggctaaggccagcttcgtgatcgagggcctgaaggaggccgacaaggacgagttctgcagatgcgagctgaagctgcagaagtggtacggggacctgcggggaaagcccttcgccatcgaagccgagaacagcatcctggacatcagcggcttcagcaagcagtacaactgtgccttcatctggcagaaggacggcgtgaagaagctgaacctgtacctgatcatcaactacttcaagggcggcaagctgcggttcaagaagatcaaacctgaagccttcgaagccaacagattctacaccgtgatcaacaaaaagagcggcgagatcgtgcccatggaggtgaacttcaacttcgacgaccccaacctgatcatcctgcctctggcctttggcaagagacagggcagagaattcatctggaacgacctgctgtccctggaaaccggcagcctgaagctggccaacggaagagtgatcgagaagacactgtacaacagaagaacccggcaggatgagcctgccctgttcgtggccctgaccttcgagcggcgggaggtcctggactcctccaatatcaaaccaatgaacctgatcggcgtggcaagaggcgaaaacatccccgccgtgatcgccctgaccgaccccgagggctgcccactgagccggtttaaggatagcctgggaaacccaacccacatcctgagaatcggcgagagctataaggagaagcagcggaccatccaggccaagaaggaggtggagcagcggagagccggcggctacagccggaagtacgccagcaaagccaagaatctggcagacgatatggtgagaaacaccgctagagatctgctgtactacgccgtgacccaggatgccatgctgatcttcgccaacctgagccggggcttcggccggcagggcaagcggaccttcatggccgagagacagtacacacggatggaggactggctgaccgccaagctggcctacgagggcctgagcaagacctacctgtccaagacactggcccagtacacctccaagacatgcagcaactgtgggtttaccatcaccagcgccgactacgacagggtgctggagaagctgaagaagacagcaacaggctggatgaccacaattaacggcaaggagctgaaggtggagggccagattacctactacaacagatacaagagacagaacgtagtcaaggacctgtccgtcgagctggatagactgagcgaagaatctgtgaacaacgacatctcctcctggacaaagggcagaagcggagaagctctgagcctcctgaagaaaagattctcccatagacccgtgcaggagaagttcgtgtgcctgaactgcggcttcgagacacacgcagccgagcaagccgccctgaacatcgccagatcctggctgttcctgcggagccaggagtacaagaaataccagacaaacaagacaaccggcaacaccgataagagagccttcgtcgagacctggcagtccttttaccggaagaagcttaaggaggtgtggaaacctgccgtgcggtctggcggatctggcggaggctccaccagccagagccccctgaccttcggcgacgtggccgtggagttcagcggcgaggagtgggcctggctggacagcgcccagaggagcctgcacaggagcgtgatgctggagaactacaggaacctggccagcctgggcaaggtgagcaagcccgagatgatcagcagcctggagcagaggaaggagccctgggccgtgaccaggaagaccaccggcggcgagtgcgccgacagccagaccctgggcggcccaagcagcggcgcccctcctcccagcggcggcagcccagccggctccccaacctctaccgaggagggcacctctgagtccgccacccccgagagcggccctggcacctccaccgagcccagcgagggcagcgcacccggcagccctgccggcagccccacctccacagaggagggaaccagcaccgagcccagcgaaggcagcgccccaggcaccagcaccgagcctagtgagcaggagattaaacggatcaacaagatcagaagaagacttgtgaaagacagcaacaccaagaaggccggcaagacaggccccatgaaaaccctgctggttagagtgatgacacccgatctgagagagcggctggaaaacctgagaaagaagcctgaaaatatcccccagcccatcagcaatacatctagagccaacctgaataagctgctgaccgattacaccgaaatgaagaaggcgatcctgcatgtgtactgggaagagttccagaaggaccctgtgggcctgatgagccgggtggcccagcctgccagcaagaagatcgatcagaacaagctgaaacctgagatggacgagaagggcaacctgaccaccgccggctttgcctgctctcagtgtggccagcccctgttcgtgtacaagctggagcaggtgtctgagaagggcaaggcttacaccaactacttcggacggtgcaatgtggccgagcacgaaaagctgatcctgctggcccagctgaagcccgagaaggatagcgacgaagccgtgacatatagcctgggaaagtttgggcagagggccctggatttctacagcattcatgtgaccaaggagtccacccaccccgtgaagcccctggcccagatcgccggaaacagatacgcctccggacctgtgggaaaggccctgagcgacgcatgtatgggcacaatcgcctccttcctgtctaagtaccaggacatcatcatcgaacaccagaaggtggtgaagggcaaccagaagagactggagagcctgcgggagctggccggcaaggaaaacctggaataccctagcgtgaccctgccacctcagcctcacaccaaggagggcgttgatgcctacaacgaagtgatcgcccgggtgcgaatgtgggtgaacctgaacctgtggcagaagctgaagctaagcagagatgatgccaagcctctgctgagactgaagggattcccttcctttcctctggtcgagagacaggccaacgaagtggactggtgggacatggtgtgtaacgtgaagaagctgatcaacgagaaaaaggaggatggcaaggtgttttggcagaatctggctggctacaagagacaggaagccctgagaccatacctgagcagcgaggaagatcggaagaagggaaagaaattcgctcggtaccagctgggcgacctgctgctgcacctggaaaagaagcacggcgaggactggggaaaggtgtacgacgaggcctgggagcggattgacaagaaagtggaaggcctgagcaagcacatcaagctggaagaggaacggagaagcgaggacgcccagagcaaggccgccctgaccgactggctgcgggctaaggccagcttcgtgatcgagggcctgaaggaggccgacaaggacgagttctgcagatgcgagctgaagctgcagaagtggtacggggacctgcggggaaagcccttcgccatcgaagccgagaacagcatcctggacatcagcggcttcagcaagcagtacaactgtgccttcatctggcagaaggacggcgtgaagaagctgaacctgtacctgatcatcaactacttcaagggcggcaagctgcggttcaagaagatcaaacctgaagccttcgaagccaacagattctacaccgtgatcaacaaaaagagcggcgagatcgtgcccatggaggtgaacttcaacttcgacgaccccaacctgatcatcctgcctctggcctttggcaagagacagggcagagaattcatctggaacgacctgctgtccctggaaaccggcagcctgaagctggccaacggaagagtgatcgagaagacactgtacaacagaagaacccggcaggatgagcctgccctgttcgtggccctgaccttcgagcggcgggaggtcctggactcctccaatatcaaaccaatgaacctgatcggcgtggcaagaggcgaaaacatccccgccgtgatcgccctgaccgaccccgagggctgcccactgagccggtttaaggatagcctgggaaacccaacccacatcctgagaatcggcgagagctataaggagaagcagcggaccatccaggccaagaaggaggtggagcagcggagagccggcggctacagccggaagtacgccagcaaagccaagaatctggcagacgatatggtgagaaacaccgctagagatctgctgtactacgccgtgacccaggatgccatgctgatcttcgccaacctgagccggggcttcggccggcagggcaagcggaccttcatggccgagagacagtacacacggatggaggactggctgaccgccaagctggcctacgagggcctgagcaagacctacctgtccaagacactggcccagtacacctccaagacatgcagcaactgtgggtttaccatcaccagcgccgactacgacagggtgctggagaagctgaagaagacagcaacaggctggatgaccacaattaacggcaaggagctgaaggtggagggccagattacctactacaacagatacaagagacagaacgtagtcaaggacctgtccgtcgagctggatagactgagcgaagaatctgtgaacaacgacatctcctcctggacaaagggcagaagcggagaagctctgagcctcctgaagaaaagattctcccatagacccgtgcaggagaagttcgtgtgcctgaactgcggcttcgagacacacgcagccgagcaagccgccctgaacatcgccagatcctggctgttcctgcggagccaggagtacaagaaataccagacaaacaagacaaccggcaacaccgataagagagccttcgtcgagacctggcagtccttttaccggaagaagcttaaggaggtgtggaaacctgccgtgcggtctggcggatctggcggaggctcctaccagccagagccccctgaccttcggcgacgtggccgtggagttcagcggcgaggagtgggcctggctggacagcgcccagaggagcctgcacaggagcgtgatgctggagaactacaggaacctggccagcctgggcaaggtgagcaagcccgagatgatcagcagcctggagcagaggaaggagccctgggccgtgaccaggaagaccaccggcggcgagtgcgccgacagccagaccctgggatctggctccggcagcggccccaagaaaaagagaaaagtctaagctgccttctgcggggcttgccttctggccatgcccttcttctctcccttgcacctgtacctcttggtctttgaataaagcctgagtaggaaggctagcaaaaaaaaaaaaaaaaaaaaaaaaaaaaaaaaaaaaaaaaaaaaaaaaaaaaaaaaaaaaaaaaaaaaaaaaaaaaaaaa

SEQ ID NO: 16416 - RNA, 9485 nt, synthetic construct
  source 1..9485: mol_type = other RNA
aggaaataagagagaaaagaagagtaagaagaaatataagagccaccatggcccctaagaagaagcgtaaagtgagccggatggaacgcctcgtctacgaggtgcggcagaagtgcagaaacatcgaggacatctgcatctcctgcggatctctgaacgtgaccctggagcacccactgttcatcggcggcatgtgccagaactgtaaaaactgttttctggagtgtgcctatcaatacgacgatgacggctaccagagctactgcaccatctgttgcggcggaagagaggtgctgatgtgtggaaataacaactgctgccggtgcttctgcgtggaatgcgtggacctgctggtgggccccggcgccgcccaggccgctattaaggaagatccttggaactgctacatgtgcggccacaagggcacatacggcctgctgagacggagagaggactggcctagcagactgcagatgttcttcgccaataaccacgaccaggagttcgacccccctaaggtgtaccctcccgtccccgccgagaagagaaagcccatccgggtcctgagcctgttcgatggcatcgccaccggtctgctggtgctgaaggacctgggcatccaggtggataggtacattgcctccgaggtgtgcgaggactccatcaccgtgggaatggtgcgtcatcagggcaagatcatgtacgtgggcgacgtgcggagcgtgacacagaagcatatccaggagtggggccctttcgacctggtgatcggcggcagcccttgcaatgacctgagcatcgtgaacccagcccggaagggcctgtacgagggaaccggcagactgttcttcgagttttacagactgctgcacgacgcccggcctaaggaaggcgacgaccggcccttcttttggctgttcgagaatgtggtggccatgggagtcagcgacaagcgggatattagccggttcctggagagcaaccccgtgatgatcgatgccaaggaagtgagcgccgcccaccgggccagatacttctggggcaatctgcctggcatgaacagacccctggccagcaccgtgaacgacaagctggagctgcaggagtgcctggagcacggccggatcgccaagttcagcaaggtgagaaccatcaccacccgaagcaacagcatcaaacaaggcaaggaccagcactttcctgtgttcatgaacgagaaggaggacatcctgtggtgtaccgagatggagagagtgttcgggttcccagtccactacacagatgtcagcaacatgtctagactggccagacagagactgctgggaagaagctggtccgtccctgtgatcagacacctgttcgcccctctgaaggagtacttcgcctgcgtgagcagcggcaacagcaacgccaacagccggggccccagcttctctagcggcctggtgccactgtccctgagagggagccacatgggccccatggagatctacaaaaccgtgagcgcctggaagcggcagcctgtgcgcgtgctgagcctgtttcggaatatcgataaagtcctgaaaagcctgggattcctggagagcggctctggctccggcggtggcaccctgaagtacgtggaggatgtgacaaacgtggtcagacgggatgtggagaagtggggccccttcgatctggtgtacggcagcacccaacccctgggcagctcttgtgaccggtgccctggctggtacatgtttcagttccaccggatcctgcagtacgccctgccgagacaggagtcccagcggccattcttttggattttcatggacaacttgctgctgaccgaggatgaccaggaaactaccactcggttcctgcagaccgaagccgtgaccctgcaggacgtgagaggccgggactaccagaacgccatgcgggtgtggtccaacatccctggactgaaaagcaagcacgcacctctgacccctaaagaagaggagtacctgcaggcccaggtgcggagcagaagcaagctggacgcccctaaggtggatctgctggtgaagaattgcctcctgcccctgagagagtacttcaagtatttcagccagaatagtctgcccctgggaggcagcggcggcggcgccctggtgacatttgaggacgtcgccgtgcggttcacccaggaggaatgggctctgctggatccttctcagaaaatcctgtaccgggacgtgatgagagagacataccggaatctgacctccgtgggcatcaactgggaatgttgggaccttgaagcctgcttcagaagcctgggaagaaacctgagagtgcaggtggtgaagagaaagtgcgagctgaccaacagcggcccctgcgccgagggcggcccaagcagcggcgcccctcctcccagcggcggcagcccagccggctccccaacctctaccgaggagggcacctctgagtccgccacccccgagagcggccctggcacctccaccgagcccagcgagggcagcgcacccggcagccctgccggcagccccacctccacagaggagggaaccagcaccgagcccagcgaaggcagcgccccaggcaccagcaccgagcctagtgagcaggagattaaacggatcaacaagatcagaagaagacttgtgaaagacagcaacaccaagaaggccggcaagacaggccccatgaaaaccctgctggttagagtgatgacacccgatctgagagagcggctggaaaacctgagaaagaagcctgaaaatatcccccagcccatcagcaatacatctagagccaacctgaataagctgctgaccgattacaccgaaatgaagaaggcgatcctgcatgtgtactgggaagagttccagaaggaccctgtgggcctgatgagccgggtggcccagcctgccagcaagaagatcgatcagaacaagctgaaacctgagatggacgagaagggcaacctgaccaccgccggctttgcctgctctcagtgtggccagcccctgttcgtgtacaagctggagcaggtgtctgagaagggcaaggcttacaccaactacttcggacggtgcaatgtggccgagcacgaaaagctgatcctgctggcccagctgaagcccgagaaggatagcgacgaagccgtgacatatagcctgggaaagtttgggcagagggccctggatttctacagcattcatgtgaccaaggagtccacccaccccgtgaagcccctggcccagatcgccggaaacagatacgcctccggacctgtgggaaaggccctgagcgacgcatgtatgggcacaatcgcctccttcctgtctaagtaccaggacatcatcatcgaacaccagaaggtggtgaagggcaaccagaagagactggagagcctgcgggagctggccggcaaggaaaacctggaataccctagcgtgaccctgccacctcagcctcacaccaaggagggcgttgatgcctacaacgaagtgatcgcccgggtgcgaatgtgggtgaacctgaacctgtggcagaagctgaagctaagcagagatgatgccaagcctctgctgagactgaagggattcccttcctttcctctggtcgagagacaggccaacgaagtggactggtgggacatggtgtgtaacgtgaagaagctgatcaacgagaaaaaggaggatggcaaggtgttttggcagaatctggctggctacaagagacaggaagccctgagaccatacctgagcagcgaggaagatcggaagaagggaaagaaattcgctcggtaccagctgggcgacctgctgctgcacctggaaaagaagcacggcgaggactggggaaaggtgtacgacgaggcctgggagcggattgacaagaaagtggaaggcctgagcaagcacatcaagctggaagaggaacggagaagcgaggacgcccagagcaaggccgccctgaccgactggctgcgggctaaggccagcttcgtgatcgagggcctgaaggaggccgacaaggacgagttctgcagatgcgagctgaagctgcagaagtggtacggggacctgcggggaaagcccttcgccatcgaagccgagaacagcatcctggacatcagcggcttcagcaagcagtacaactgtgccttcatctggcagaaggacggcgtgaagaagctgaacctgtacctgatcatcaactacttcaagggcggcaagctgcggttcaagaagatcaaacctgaagccttcgaagccaacagattctacaccgtgatcaacaaaaagagcggcgagatcgtgcccatggaggtgaacttcaacttcgacgaccccaacctgatcatcctgcctctggcctttggcaagagacagggcagagaattcatctggaacgacctgctgtccctggaaaccggcagcctgaagctggccaacggaagagtgatcgagaagacactgtacaacagaagaacccggcaggatgagcctgccctgttcgtggccctgaccttcgagcggcgggaggtcctggactcctccaatatcaaaccaatgaacctgatcggcgtggcaagaggcgaaaacatccccgccgtgatcgccctgaccgaccccgagggctgcccactgagccggtttaaggatagcctgggaaacccaacccacatcctgagaatcggcgagagctataaggagaagcagcggaccatccaggccaagaaggaggtggagcagcggagagccggcggctacagccggaagtacgccagcaaagccaagaatctggcagacgatatggtgagaaacaccgctagagatctgctgtactacgccgtgacccaggatgccatgctgatcttcgccaacctgagccggggcttcggccggcagggcaagcggaccttcatggccgagagacagtacacacggatggaggactggctgaccgccaagctggcctacgagggcctgagcaagacctacctgtccaagacactggcccagtacacctccaagacatgcagcaactgtgggtttaccatcaccagcgccgactacgacagggtgctggagaagctgaagaagacagcaacaggctggatgaccacaattaacggcaaggagctgaaggtggagggccagattacctactacaacagatacaagagacagaacgtagtcaaggacctgtccgtcgagctggatagactgagcgaagaatctgtgaacaacgacatctcctcctggacaaagggcagaagcggagaagctctgagcctcctgaagaaaagattctcccatagacccgtgcaggagaagttcgtgtgcctgaactgcggcttcgagacacacgcagccgagcaagccgccctgaacatcgccagatcctggctgttcctgcggagccaggagtacaagaaataccagacaaacaagacaaccggcaacaccgataagagagccttcgtcgagacctggcagtccttttaccggaagaagcttaaggaggtgtggaaacctgccgtgcggtctggcggatctggcggaggctcccaggagcccgtgaccttcgccgacgtggccgtgctgttcacccccgaggagtggatgttcctggacagcgcccagaggagcctgtacagggacgtgatgctggagaactacaggaacctggccagcgtgggcgccggcgaccagctgggcaagcccagcatgctgagcctgagcgagcccggcgaggagctgtgggcccccgagaggaggaccttccccggcaccaggcccgagccccagcacggcggcccaagcagcggcgcccctcctcccagcggcggcagcccagccggctccccaacctctaccgaggagggcacctctgagtccgccacccccgagagcggccctggcacctccaccgagcccagcgagggcagcgcacccggcagccctgccggcagccccacctccacagaggagggaaccagcaccgagcccagcgaaggcagcgccccaggcaccagcaccgagcctagtgagcaggagattaaacggatcaacaagatcagaagaagacttgtgaaagacagcaacaccaagaaggccggcaagacaggccccatgaaaaccctgctggttagagtgatgacacccgatctgagagagcggctggaaaacctgagaaagaagcctgaaaatatcccccagcccatcagcaatacatctagagccaacctgaataagctgctgaccgattacaccgaaatgaagaaggcgatcctgcatgtgtactgggaagagttccagaaggaccctgtgggcctgatgagccgggtggcccagcctgccagcaagaagatcgatcagaacaagctgaaacctgagatggacgagaagggcaacctgaccaccgccggctttgcctgctctcagtgtggccagcccctgttcgtgtacaagctggagcaggtgtctgagaagggcaaggcttacaccaactacttcggacggtgcaatgtggccgagcacgaaaagctgatcctgctggcccagctgaagcccgagaaggatagcgacgaagccgtgacatatagcctgggaaagtttgggcagagggccctggatttctacagcattcatgtgaccaaggagtccacccaccccgtgaagcccctggcccagatcgccggaaacagatacgcctccggacctgtgggaaaggccctgagcgacgcatgtatgggcacaatcgcctccttcctgtctaagtaccaggacatcatcatcgaacaccagaaggtggtgaagggcaaccagaagagactggagagcctgcgggagctggccggcaaggaaaacctggaataccctagcgtgaccctgccacctcagcctcacaccaaggagggcgttgatgcctacaacgaagtgatcgcccgggtgcgaatgtgggtgaacctgaacctgtggcagaagctgaagctaagcagagatgatgccaagcctctgctgagactgaagggattcccttcctttcctctggtcgagagacaggccaacgaagtggactggtgggacatggtgtgtaacgtgaagaagctgatcaacgagaaaaaggaggatggcaaggtgttttggcagaatctggctggctacaagagacaggaagccctgagaccatacctgagcagcgaggaagatcggaagaagggaaagaaattcgctcggtaccagctgggcgacctgctgctgcacctggaaaagaagcacggcgaggactggggaaaggtgtacgacgaggcctgggagcggattgacaagaaagtggaaggcctgagcaagcacatcaagctggaagaggaacggagaagcgaggacgcccagagcaaggccgccctgaccgactggctgcgggctaaggccagcttcgtgatcgagggcctgaaggaggccgacaaggacgagttctgcagatgcgagctgaagctgcagaagtggtacggggacctgcggggaaagcccttcgccatcgaagccgagaacagcatcctggacatcagcggcttcagcaagcagtacaactgtgccttcatctggcagaaggacggcgtgaagaagctgaacctgtacctgatcatcaactacttcaagggcggcaagctgcggttcaagaagatcaaacctgaagccttcgaagccaacagattctacaccgtgatcaacaaaaagagcggcgagatcgtgcccatggaggtgaacttcaacttcgacgaccccaacctgatcatcctgcctctggcctttggcaagagacagggcagagaattcatctggaacgacctgctgtccctggaaaccggcagcctgaagctggccaacggaagagtgatcgagaagacactgtacaacagaagaacccggcaggatgagcctgccctgttcgtggccctgaccttcgagcggcgggaggtcctggactcctccaatatcaaaccaatgaacctgatcggcgtggcaagaggcgaaaacatccccgccgtgatcgccctgaccgaccccgagggctgcccactgagccggtttaaggatagcctgggaaacccaacccacatcctgagaatcggcgagagctataaggagaagcagcggaccatccaggccaagaaggaggtggagcagcggagagccggcggctacagccggaagtacgccagcaaagccaagaatctggcagacgatatggtgagaaacaccgctagagatctgctgtactacgccgtgacccaggatgccatgctgatcttcgccaacctgagccggggcttcggccggcagggcaagcggaccttcatggccgagagacagtacacacggatggaggactggctgaccgccaagctggcctacgagggcctgagcaagacctacctgtccaagacactggcccagtacacctccaagacatgcagcaactgtgggtttaccatcaccagcgccgactacgacagggtgctggagaagctgaagaagacagcaacaggctggatgaccacaattaacggcaaggagctgaaggtggagggccagattacctactacaacagatacaagagacagaacgtagtcaaggacctgtccgtcgagctggatagactgagcgaagaatctgtgaacaacgacatctcctcctggacaaagggcagaagcggagaagctctgagcctcctgaagaaaagattctcccatagacccgtgcaggagaagttcgtgtgcctgaactgcggcttcgagacacacgcagccgagcaagccgccctgaacatcgccagatcctggctgttcctgcggagccaggagtacaagaaataccagacaaacaagacaaccggcaacaccgataagagagccttcgtcgagacctggcagtccttttaccggaagaagcttaaggaggtgtggaaacctgccgtgcggtctggcggatctggcggaggctcctcaggagcccgtgaccttcgccgacgtggccgtgctgttcacccccgaggagtggatgttcctggacagcgcccagaggagcctgtacagggacgtgatgctggagaactacaggaacctggccagcgtgggcgccggcgaccagctgggcaagcccagcatgctgagcctgagcgagcccggcgaggagctgtgggcccccgagaggaggaccttccccggcaccaggcccgagccccagcacggatctggctccggcagcggccccaagaaaaagagaaaagtctaagctgccttctgcggggcttgccttctggccatgcccttcttctctcccttgcacctgtacctcttggtctttgaataaagcctgagtaggaaggctagcaaaaaaaaaaaaaaaaaaaaaaaaaaaaaaaaaaaaaaaaaaaaaaaaaaaaaaaaaaaaaaaaaaaaaaaaaaaaaaaa

SEQ ID NO: 16417 - RNA, 9485 nt, synthetic construct
  source 1..9485: mol_type = other RNA
aggaaataagagagaaaagaagagtaagaagaaatataagagccaccatggcccctaagaagaagcgtaaagtgagccggatggaacgcctcgtctacgaggtgcggcagaagtgcagaaacatcgaggacatctgcatctcctgcggatctctgaacgtgaccctggagcacccactgttcatcggcggcatgtgccagaactgtaaaaactgttttctggagtgtgcctatcaatacgacgatgacggctaccagagctactgcaccatctgttgcggcggaagagaggtgctgatgtgtggaaataacaactgctgccggtgcttctgcgtggaatgcgtggacctgctggtgggccccggcgccgcccaggccgctattaaggaagatccttggaactgctacatgtgcggccacaagggcacatacggcctgctgagacggagagaggactggcctagcagactgcagatgttcttcgccaataaccacgaccaggagttcgacccccctaaggtgtaccctcccgtccccgccgagaagagaaagcccatccgggtcctgagcctgttcgatggcatcgccaccggtctgctggtgctgaaggacctgggcatccaggtggataggtacattgcctccgaggtgtgcgaggactccatcaccgtgggaatggtgcgtcatcagggcaagatcatgtacgtgggcgacgtgcggagcgtgacacagaagcatatccaggagtggggccctttcgacctggtgatcggcggcagcccttgcaatgacctgagcatcgtgaacccagcccggaagggcctgtacgagggaaccggcagactgttcttcgagttttacagactgctgcacgacgcccggcctaaggaaggcgacgaccggcccttcttttggctgttcgagaatgtggtggccatgggagtcagcgacaagcgggatattagccggttcctggagagcaaccccgtgatgatcgatgccaaggaagtgagcgccgcccaccgggccagatacttctggggcaatctgcctggcatgaacagacccctggccagcaccgtgaacgacaagctggagctgcaggagtgcctggagcacggccggatcgccaagttcagcaaggtgagaaccatcaccacccgaagcaacagcatcaaacaaggcaaggaccagcactttcctgtgttcatgaacgagaaggaggacatcctgtggtgtaccgagatggagagagtgttcgggttcccagtccactacacagatgtcagcaacatgtctagactggccagacagagactgctgggaagaagctggtccgtccctgtgatcagacacctgttcgcccctctgaaggagtacttcgcctgcgtgagcagcggcaacagcaacgccaacagccggggccccagcttctctagcggcctggtgccactgtccctgagagggagccacatgggccccatggagatctacaaaaccgtgagcgcctggaagcggcagcctgtgcgcgtgctgagcctgtttcggaatatcgataaagtcctgaaaagcctgggattcctggagagcggctctggctccggcggtggcaccctgaagtacgtggaggatgtgacaaacgtggtcagacgggatgtggagaagtggggccccttcgatctggtgtacggcagcacccaacccctgggcagctcttgtgaccggtgccctggctggtacatgtttcagttccaccggatcctgcagtacgccctgccgagacaggagtcccagcggccattcttttggattttcatggacaacttgctgctgaccgaggatgaccaggaaactaccactcggttcctgcagaccgaagccgtgaccctgcaggacgtgagaggccgggactaccagaacgccatgcgggtgtggtccaacatccctggactgaaaagcaagcacgcacctctgacccctaaagaagaggagtacctgcaggcccaggtgcggagcagaagcaagctggacgcccctaaggtggatctgctggtgaagaattgcctcctgcccctgagagagtacttcaagtatttcagccagaatagtctgcccctgggaggcagcggcggcggcgccctggtgacatttgaggacgtcgccgtgcggttcacccaggaggaatgggctctgctggatccttctcagaaaatcctgtaccgggacgtgatgagagagacataccggaatctgacctccgtgggcatcaactgggaatgttgggaccttgaagcctgcttcagaagcctgggaagaaacctgagagtgcaggtggtgaagagaaagtgcgagctgaccaacagcggcccctgcgccgagggcggcccaagcagcggcgcccctcctcccagcggcggcagcccagccggctccccaacctctaccgaggagggcacctctgagtccgccacccccgagagcggccctggcacctccaccgagcccagcgagggcagcgcacccggcagccctgccggcagccccacctccacagaggagggaaccagcaccgagcccagcgaaggcagcgccccaggcaccagcaccgagcctagtgagcaggagattaaacggatcaacaagatcagaagaagacttgtgaaagacagcaacaccaagaaggccggcaagacaggccccatgaaaaccctgctggttagagtgatgacacccgatctgagagagcggctggaaaacctgagaaagaagcctgaaaatatcccccagcccatcagcaatacatctagagccaacctgaataagctgctgaccgattacaccgaaatgaagaaggcgatcctgcatgtgtactgggaagagttccagaaggaccctgtgggcctgatgagccgggtggcccagcctgccagcaagaagatcgatcagaacaagctgaaacctgagatggacgagaagggcaacctgaccaccgccggctttgcctgctctcagtgtggccagcccctgttcgtgtacaagctggagcaggtgtctgagaagggcaaggcttacaccaactacttcggacggtgcaatgtggccgagcacgaaaagctgatcctgctggcccagctgaagcccgagaaggatagcgacgaagccgtgacatatagcctgggaaagtttgggcagagggccctggatttctacagcattcatgtgaccaaggagtccacccaccccgtgaagcccctggcccagatcgccggaaacagatacgcctccggacctgtgggaaaggccctgagcgacgcatgtatgggcacaatcgcctccttcctgtctaagtaccaggacatcatcatcgaacaccagaaggtggtgaagggcaaccagaagagactggagagcctgcgggagctggccggcaaggaaaacctggaataccctagcgtgaccctgccacctcagcctcacaccaaggagggcgttgatgcctacaacgaagtgatcgcccgggtgcgaatgtgggtgaacctgaacctgtggcagaagctgaagctaagcagagatgatgccaagcctctgctgagactgaagggattcccttcctttcctctggtcgagagacaggccaacgaagtggactggtgggacatggtgtgtaacgtgaagaagctgatcaacgagaaaaaggaggatggcaaggtgttttggcagaatctggctggctacaagagacaggaagccctgagaccatacctgagcagcgaggaagatcggaagaagggaaagaaattcgctcggtaccagctgggcgacctgctgctgcacctggaaaagaagcacggcgaggactggggaaaggtgtacgacgaggcctgggagcggattgacaagaaagtggaaggcctgagcaagcacatcaagctggaagaggaacggagaagcgaggacgcccagagcaaggccgccctgaccgactggctgcgggctaaggccagcttcgtgatcgagggcctgaaggaggccgacaaggacgagttctgcagatgcgagctgaagctgcagaagtggtacggggacctgcggggaaagcccttcgccatcgaagccgagaacagcatcctggacatcagcggcttcagcaagcagtacaactgtgccttcatctggcagaaggacggcgtgaagaagctgaacctgtacctgatcatcaactacttcaagggcggcaagctgcggttcaagaagatcaaacctgaagccttcgaagccaacagattctacaccgtgatcaacaaaaagagcggcgagatcgtgcccatggaggtgaacttcaacttcgacgaccccaacctgatcatcctgcctctggcctttggcaagagacagggcagagaattcatctggaacgacctgctgtccctggaaaccggcagcctgaagctggccaacggaagagtgatcgagaagacactgtacaacagaagaacccggcaggatgagcctgccctgttcgtggccctgaccttcgagcggcgggaggtcctggactcctccaatatcaaaccaatgaacctgatcggcgtggcaagaggcgaaaacatccccgccgtgatcgccctgaccgaccccgagggctgcccactgagccggtttaaggatagcctgggaaacccaacccacatcctgagaatcggcgagagctataaggagaagcagcggaccatccaggccaagaaggaggtggagcagcggagagccggcggctacagccggaagtacgccagcaaagccaagaatctggcagacgatatggtgagaaacaccgctagagatctgctgtactacgccgtgacccaggatgccatgctgatcttcgccaacctgagccggggcttcggccggcagggcaagcggaccttcatggccgagagacagtacacacggatggaggactggctgaccgccaagctggcctacgagggcctgagcaagacctacctgtccaagacactggcccagtacacctccaagacatgcagcaactgtgggtttaccatcaccagcgccgactacgacagggtgctggagaagctgaagaagacagcaacaggctggatgaccacaattaacggcaaggagctgaaggtggagggccagattacctactacaacagatacaagagacagaacgtagtcaaggacctgtccgtcgagctggatagactgagcgaagaatctgtgaacaacgacatctcctcctggacaaagggcagaagcggagaagctctgagcctcctgaagaaaagattctcccatagacccgtgcaggagaagttcgtgtgcctgaactgcggcttcgagacacacgcagccgagcaagccgccctgaacatcgccagatcctggctgttcctgcggagccaggagtacaagaaataccagacaaacaagacaaccggcaacaccgataagagagccttcgtcgagacctggcagtccttttaccggaagaagcttaaggaggtgtggaaacctgccgtgcggtctggcggatctggcggaggctccatggcccagtgcctggtgaccttcgccgacgtggccatcgacttcagccaggaggagtgggcctgcctgaacagcgcccagagggacctgtactgggacgtgatgctggagaactacagcaacctggtgagcctggacctggagagcgcctacgagaacaagagcctgcccaccgagaagaacatccacgagatcagggccagcaagaggaacagcgacaggaggagcaagagcctgggcaggggcggcccaagcagcggcgcccctcctcccagcggcggcagcccagccggctccccaacctctaccgaggagggcacctctgagtccgccacccccgagagcggccctggcacctccaccgagcccagcgagggcagcgcacccggcagccctgccggcagccccacctccacagaggagggaaccagcaccgagcccagcgaaggcagcgccccaggcaccagcaccgagcctagtgagcaggagattaaacggatcaacaagatcagaagaagacttgtgaaagacagcaacaccaagaaggccggcaagacaggccccatgaaaaccctgctggttagagtgatgacacccgatctgagagagcggctggaaaacctgagaaagaagcctgaaaatatcccccagcccatcagcaatacatctagagccaacctgaataagctgctgaccgattacaccgaaatgaagaaggcgatcctgcatgtgtactgggaagagttccagaaggaccctgtgggcctgatgagccgggtggcccagcctgccagcaagaagatcgatcagaacaagctgaaacctgagatggacgagaagggcaacctgaccaccgccggctttgcctgctctcagtgtggccagcccctgttcgtgtacaagctggagcaggtgtctgagaagggcaaggcttacaccaactacttcggacggtgcaatgtggccgagcacgaaaagctgatcctgctggcccagctgaagcccgagaaggatagcgacgaagccgtgacatatagcctgggaaagtttgggcagagggccctggatttctacagcattcatgtgaccaaggagtccacccaccccgtgaagcccctggcccagatcgccggaaacagatacgcctccggacctgtgggaaaggccctgagcgacgcatgtatgggcacaatcgcctccttcctgtctaagtaccaggacatcatcatcgaacaccagaaggtggtgaagggcaaccagaagagactggagagcctgcgggagctggccggcaaggaaaacctggaataccctagcgtgaccctgccacctcagcctcacaccaaggagggcgttgatgcctacaacgaagtgatcgcccgggtgcgaatgtgggtgaacctgaacctgtggcagaagctgaagctaagcagagatgatgccaagcctctgctgagactgaagggattcccttcctttcctctggtcgagagacaggccaacgaagtggactggtgggacatggtgtgtaacgtgaagaagctgatcaacgagaaaaaggaggatggcaaggtgttttggcagaatctggctggctacaagagacaggaagccctgagaccatacctgagcagcgaggaagatcggaagaagggaaagaaattcgctcggtaccagctgggcgacctgctgctgcacctggaaaagaagcacggcgaggactggggaaaggtgtacgacgaggcctgggagcggattgacaagaaagtggaaggcctgagcaagcacatcaagctggaagaggaacggagaagcgaggacgcccagagcaaggccgccctgaccgactggctgcgggctaaggccagcttcgtgatcgagggcctgaaggaggccgacaaggacgagttctgcagatgcgagctgaagctgcagaagtggtacggggacctgcggggaaagcccttcgccatcgaagccgagaacagcatcctggacatcagcggcttcagcaagcagtacaactgtgccttcatctggcagaaggacggcgtgaagaagctgaacctgtacctgatcatcaactacttcaagggcggcaagctgcggttcaagaagatcaaacctgaagccttcgaagccaacagattctacaccgtgatcaacaaaaagagcggcgagatcgtgcccatggaggtgaacttcaacttcgacgaccccaacctgatcatcctgcctctggcctttggcaagagacagggcagagaattcatctggaacgacctgctgtccctggaaaccggcagcctgaagctggccaacggaagagtgatcgagaagacactgtacaacagaagaacccggcaggatgagcctgccctgttcgtggccctgaccttcgagcggcgggaggtcctggactcctccaatatcaaaccaatgaacctgatcggcgtggcaagaggcgaaaacatccccgccgtgatcgccctgaccgaccccgagggctgcccactgagccggtttaaggatagcctgggaaacccaacccacatcctgagaatcggcgagagctataaggagaagcagcggaccatccaggccaagaaggaggtggagcagcggagagccggcggctacagccggaagtacgccagcaaagccaagaatctggcagacgatatggtgagaaacaccgctagagatctgctgtactacgccgtgacccaggatgccatgctgatcttcgccaacctgagccggggcttcggccggcagggcaagcggaccttcatggccgagagacagtacacacggatggaggactggctgaccgccaagctggcctacgagggcctgagcaagacctacctgtccaagacactggcccagtacacctccaagacatgcagcaactgtgggtttaccatcaccagcgccgactacgacagggtgctggagaagctgaagaagacagcaacaggctggatgaccacaattaacggcaaggagctgaaggtggagggccagattacctactacaacagatacaagagacagaacgtagtcaaggacctgtccgtcgagctggatagactgagcgaagaatctgtgaacaacgacatctcctcctggacaaagggcagaagcggagaagctctgagcctcctgaagaaaagattctcccatagacccgtgcaggagaagttcgtgtgcctgaactgcggcttcgagacacacgcagccgagcaagccgccctgaacatcgccagatcctggctgttcctgcggagccaggagtacaagaaataccagacaaacaagacaaccggcaacaccgataagagagccttcgtcgagacctggcagtccttttaccggaagaagcttaaggaggtgtggaaacctgccgtgcggtctggcggatctggcggaggctcctatggcccagtgcctggtgaccttcgccgacgtggccatcgacttcagccaggaggagtgggcctgcctgaacagcgcccagagggacctgtactgggacgtgatgctggagaactacagcaacctggtgagcctggacctggagagcgcctacgagaacaagagcctgcccaccgagaagaacatccacgagatcagggccagcaagaggaacagcgacaggaggagcaagagcctgggcaggggatctggctccggcagcggccccaagaaaaagagaaaagtctaagctgccttctgcggggcttgccttctggccatgcccttcttctctcccttgcacctgtacctcttggtctttgaataaagcctgagtaggaaggctagcaaaaaaaaaaaaaaaaaaaaaaaaaaaaaaaaaaaaaaaaaaaaaaaaaaaaaaaaaaaaaaaaaaaaaaaaaaaaaaaa

SEQ ID NO: 16418 - RNA, 9485 nt, synthetic construct
  source 1..9485: mol_type = other RNA
aggaaataagagagaaaagaagagtaagaagaaatataagagccaccatggcccctaagaagaagcgtaaagtgagccggatggaacgcctcgtctacgaggtgcggcagaagtgcagaaacatcgaggacatctgcatctcctgcggatctctgaacgtgaccctggagcacccactgttcatcggcggcatgtgccagaactgtaaaaactgttttctggagtgtgcctatcaatacgacgatgacggctaccagagctactgcaccatctgttgcggcggaagagaggtgctgatgtgtggaaataacaactgctgccggtgcttctgcgtggaatgcgtggacctgctggtgggccccggcgccgcccaggccgctattaaggaagatccttggaactgctacatgtgcggccacaagggcacatacggcctgctgagacggagagaggactggcctagcagactgcagatgttcttcgccaataaccacgaccaggagttcgacccccctaaggtgtaccctcccgtccccgccgagaagagaaagcccatccgggtcctgagcctgttcgatggcatcgccaccggtctgctggtgctgaaggacctgggcatccaggtggataggtacattgcctccgaggtgtgcgaggactccatcaccgtgggaatggtgcgtcatcagggcaagatcatgtacgtgggcgacgtgcggagcgtgacacagaagcatatccaggagtggggccctttcgacctggtgatcggcggcagcccttgcaatgacctgagcatcgtgaacccagcccggaagggcctgtacgagggaaccggcagactgttcttcgagttttacagactgctgcacgacgcccggcctaaggaaggcgacgaccggcccttcttttggctgttcgagaatgtggtggccatgggagtcagcgacaagcgggatattagccggttcctggagagcaaccccgtgatgatcgatgccaaggaagtgagcgccgcccaccgggccagatacttctggggcaatctgcctggcatgaacagacccctggccagcaccgtgaacgacaagctggagctgcaggagtgcctggagcacggccggatcgccaagttcagcaaggtgagaaccatcaccacccgaagcaacagcatcaaacaaggcaaggaccagcactttcctgtgttcatgaacgagaaggaggacatcctgtggtgtaccgagatggagagagtgttcgggttcccagtccactacacagatgtcagcaacatgtctagactggccagacagagactgctgggaagaagctggtccgtccctgtgatcagacacctgttcgcccctctgaaggagtacttcgcctgcgtgagcagcggcaacagcaacgccaacagccggggccccagcttctctagcggcctggtgccactgtccctgagagggagccacatgggccccatggagatctacaaaaccgtgagcgcctggaagcggcagcctgtgcgcgtgctgagcctgtttcggaatatcgataaagtcctgaaaagcctgggattcctggagagcggctctggctccggcggtggcaccctgaagtacgtggaggatgtgacaaacgtggtcagacgggatgtggagaagtggggccccttcgatctggtgtacggcagcacccaacccctgggcagctcttgtgaccggtgccctggctggtacatgtttcagttccaccggatcctgcagtacgccctgccgagacaggagtcccagcggccattcttttggattttcatggacaacttgctgctgaccgaggatgaccaggaaactaccactcggttcctgcagaccgaagccgtgaccctgcaggacgtgagaggccgggactaccagaacgccatgcgggtgtggtccaacatccctggactgaaaagcaagcacgcacctctgacccctaaagaagaggagtacctgcaggcccaggtgcggagcagaagcaagctggacgcccctaaggtggatctgctggtgaagaattgcctcctgcccctgagagagtacttcaagtatttcagccagaatagtctgcccctgggaggcagcggcggcggcgccctggtgacatttgaggacgtcgccgtgcggttcacccaggaggaatgggctctgctggatccttctcagaaaatcctgtaccgggacgtgatgagagagacataccggaatctgacctccgtgggcatcaactgggaatgttgggaccttgaagcctgcttcagaagcctgggaagaaacctgagagtgcaggtggtgaagagaaagtgcgagctgaccaacagcggcccctgcgccgagggcggcccaagcagcggcgcccctcctcccagcggcggcagcccagccggctccccaacctctaccgaggagggcacctctgagtccgccacccccgagagcggccctggcacctccaccgagcccagcgagggcagcgcacccggcagccctgccggcagccccacctccacagaggagggaaccagcaccgagcccagcgaaggcagcgccccaggcaccagcaccgagcctagtgagcaggagattaaacggatcaacaagatcagaagaagacttgtgaaagacagcaacaccaagaaggccggcaagacaggccccatgaaaaccctgctggttagagtgatgacacccgatctgagagagcggctggaaaacctgagaaagaagcctgaaaatatcccccagcccatcagcaatacatctagagccaacctgaataagctgctgaccgattacaccgaaatgaagaaggcgatcctgcatgtgtactgggaagagttccagaaggaccctgtgggcctgatgagccgggtggcccagcctgccagcaagaagatcgatcagaacaagctgaaacctgagatggacgagaagggcaacctgaccaccgccggctttgcctgctctcagtgtggccagcccctgttcgtgtacaagctggagcaggtgtctgagaagggcaaggcttacaccaactacttcggacggtgcaatgtggccgagcacgaaaagctgatcctgctggcccagctgaagcccgagaaggatagcgacgaagccgtgacatatagcctgggaaagtttgggcagagggccctggatttctacagcattcatgtgaccaaggagtccacccaccccgtgaagcccctggcccagatcgccggaaacagatacgcctccggacctgtgggaaaggccctgagcgacgcatgtatgggcacaatcgcctccttcctgtctaagtaccaggacatcatcatcgaacaccagaaggtggtgaagggcaaccagaagagactggagagcctgcgggagctggccggcaaggaaaacctggaataccctagcgtgaccctgccacctcagcctcacaccaaggagggcgttgatgcctacaacgaagtgatcgcccgggtgcgaatgtgggtgaacctgaacctgtggcagaagctgaagctaagcagagatgatgccaagcctctgctgagactgaagggattcccttcctttcctctggtcgagagacaggccaacgaagtggactggtgggacatggtgtgtaacgtgaagaagctgatcaacgagaaaaaggaggatggcaaggtgttttggcagaatctggctggctacaagagacaggaagccctgagaccatacctgagcagcgaggaagatcggaagaagggaaagaaattcgctcggtaccagctgggcgacctgctgctgcacctggaaaagaagcacggcgaggactggggaaaggtgtacgacgaggcctgggagcggattgacaagaaagtggaaggcctgagcaagcacatcaagctggaagaggaacggagaagcgaggacgcccagagcaaggccgccctgaccgactggctgcgggctaaggccagcttcgtgatcgagggcctgaaggaggccgacaaggacgagttctgcagatgcgagctgaagctgcagaagtggtacggggacctgcggggaaagcccttcgccatcgaagccgagaacagcatcctggacatcagcggcttcagcaagcagtacaactgtgccttcatctggcagaaggacggcgtgaagaagctgaacctgtacctgatcatcaactacttcaagggcggcaagctgcggttcaagaagatcaaacctgaagccttcgaagccaacagattctacaccgtgatcaacaaaaagagcggcgagatcgtgcccatggaggtgaacttcaacttcgacgaccccaacctgatcatcctgcctctggcctttggcaagagacagggcagagaattcatctggaacgacctgctgtccctggaaaccggcagcctgaagctggccaacggaagagtgatcgagaagacactgtacaacagaagaacccggcaggatgagcctgccctgttcgtggccctgaccttcgagcggcgggaggtcctggactcctccaatatcaaaccaatgaacctgatcggcgtggcaagaggcgaaaacatccccgccgtgatcgccctgaccgaccccgagggctgcccactgagccggtttaaggatagcctgggaaacccaacccacatcctgagaatcggcgagagctataaggagaagcagcggaccatccaggccaagaaggaggtggagcagcggagagccggcggctacagccggaagtacgccagcaaagccaagaatctggcagacgatatggtgagaaacaccgctagagatctgctgtactacgccgtgacccaggatgccatgctgatcttcgccaacctgagccggggcttcggccggcagggcaagcggaccttcatggccgagagacagtacacacggatggaggactggctgaccgccaagctggcctacgagggcctgagcaagacctacctgtccaagacactggcccagtacacctccaagacatgcagcaactgtgggtttaccatcaccagcgccgactacgacagggtgctggagaagctgaagaagacagcaacaggctggatgaccacaattaacggcaaggagctgaaggtggagggccagattacctactacaacagatacaagagacagaacgtagtcaaggacctgtccgtcgagctggatagactgagcgaagaatctgtgaacaacgacatctcctcctggacaaagggcagaagcggagaagctctgagcctcctgaagaaaagattctcccatagacccgtgcaggagaagttcgtgtgcctgaactgcggcttcgagacacacgcagccgagcaagccgccctgaacatcgccagatcctggctgttcctgcggagccaggagtacaagaaataccagacaaacaagacaaccggcaacaccgataagagagccttcgtcgagacctggcagtccttttaccggaagaagcttaaggaggtgtggaaacctgccgtgcggtctggcggatctggcggaggctccgcccaggtgctggtgaccttcaaggacgtggccgtgaccttcaccagggaggagtggggccagctggacctggaccagaaggccctgtaccaggaggtgatgctggagacctacggcctgctggtgagcctgggccaccccgtgcccaagcccgagctgacccacctgctggagtgcggccaggagctgtggaagggcaagaggggcctgagccacagcacctgcagcggcgacgacaccaagggcggcccaagcagcggcgcccctcctcccagcggcggcagcccagccggctccccaacctctaccgaggagggcacctctgagtccgccacccccgagagcggccctggcacctccaccgagcccagcgagggcagcgcacccggcagccctgccggcagccccacctccacagaggagggaaccagcaccgagcccagcgaaggcagcgccccaggcaccagcaccgagcctagtgagcaggagattaaacggatcaacaagatcagaagaagacttgtgaaagacagcaacaccaagaaggccggcaagacaggccccatgaaaaccctgctggttagagtgatgacacccgatctgagagagcggctggaaaacctgagaaagaagcctgaaaatatcccccagcccatcagcaatacatctagagccaacctgaataagctgctgaccgattacaccgaaatgaagaaggcgatcctgcatgtgtactgggaagagttccagaaggaccctgtgggcctgatgagccgggtggcccagcctgccagcaagaagatcgatcagaacaagctgaaacctgagatggacgagaagggcaacctgaccaccgccggctttgcctgctctcagtgtggccagcccctgttcgtgtacaagctggagcaggtgtctgagaagggcaaggcttacaccaactacttcggacggtgcaatgtggccgagcacgaaaagctgatcctgctggcccagctgaagcccgagaaggatagcgacgaagccgtgacatatagcctgggaaagtttgggcagagggccctggatttctacagcattcatgtgaccaaggagtccacccaccccgtgaagcccctggcccagatcgccggaaacagatacgcctccggacctgtgggaaaggccctgagcgacgcatgtatgggcacaatcgcctccttcctgtctaagtaccaggacatcatcatcgaacaccagaaggtggtgaagggcaaccagaagagactggagagcctgcgggagctggccggcaaggaaaacctggaataccctagcgtgaccctgccacctcagcctcacaccaaggagggcgttgatgcctacaacgaagtgatcgcccgggtgcgaatgtgggtgaacctgaacctgtggcagaagctgaagctaagcagagatgatgccaagcctctgctgagactgaagggattcccttcctttcctctggtcgagagacaggccaacgaagtggactggtgggacatggtgtgtaacgtgaagaagctgatcaacgagaaaaaggaggatggcaaggtgttttggcagaatctggctggctacaagagacaggaagccctgagaccatacctgagcagcgaggaagatcggaagaagggaaagaaattcgctcggtaccagctgggcgacctgctgctgcacctggaaaagaagcacggcgaggactggggaaaggtgtacgacgaggcctgggagcggattgacaagaaagtggaaggcctgagcaagcacatcaagctggaagaggaacggagaagcgaggacgcccagagcaaggccgccctgaccgactggctgcgggctaaggccagcttcgtgatcgagggcctgaaggaggccgacaaggacgagttctgcagatgcgagctgaagctgcagaagtggtacggggacctgcggggaaagcccttcgccatcgaagccgagaacagcatcctggacatcagcggcttcagcaagcagtacaactgtgccttcatctggcagaaggacggcgtgaagaagctgaacctgtacctgatcatcaactacttcaagggcggcaagctgcggttcaagaagatcaaacctgaagccttcgaagccaacagattctacaccgtgatcaacaaaaagagcggcgagatcgtgcccatggaggtgaacttcaacttcgacgaccccaacctgatcatcctgcctctggcctttggcaagagacagggcagagaattcatctggaacgacctgctgtccctggaaaccggcagcctgaagctggccaacggaagagtgatcgagaagacactgtacaacagaagaacccggcaggatgagcctgccctgttcgtggccctgaccttcgagcggcgggaggtcctggactcctccaatatcaaaccaatgaacctgatcggcgtggcaagaggcgaaaacatccccgccgtgatcgccctgaccgaccccgagggctgcccactgagccggtttaaggatagcctgggaaacccaacccacatcctgagaatcggcgagagctataaggagaagcagcggaccatccaggccaagaaggaggtggagcagcggagagccggcggctacagccggaagtacgccagcaaagccaagaatctggcagacgatatggtgagaaacaccgctagagatctgctgtactacgccgtgacccaggatgccatgctgatcttcgccaacctgagccggggcttcggccggcagggcaagcggaccttcatggccgagagacagtacacacggatggaggactggctgaccgccaagctggcctacgagggcctgagcaagacctacctgtccaagacactggcccagtacacctccaagacatgcagcaactgtgggtttaccatcaccagcgccgactacgacagggtgctggagaagctgaagaagacagcaacaggctggatgaccacaattaacggcaaggagctgaaggtggagggccagattacctactacaacagatacaagagacagaacgtagtcaaggacctgtccgtcgagctggatagactgagcgaagaatctgtgaacaacgacatctcctcctggacaaagggcagaagcggagaagctctgagcctcctgaagaaaagattctcccatagacccgtgcaggagaagttcgtgtgcctgaactgcggcttcgagacacacgcagccgagcaagccgccctgaacatcgccagatcctggctgttcctgcggagccaggagtacaagaaataccagacaaacaagacaaccggcaacaccgataagagagccttcgtcgagacctggcagtccttttaccggaagaagcttaaggaggtgtggaaacctgccgtgcggtctggcggatctggcggaggctcctgcccaggtgctggtgaccttcaaggacgtggccgtgaccttcaccagggaggagtggggccagctggacctggaccagaaggccctgtaccaggaggtgatgctggagacctacggcctgctggtgagcctgggccaccccgtgcccaagcccgagctgacccacctgctggagtgcggccaggagctgtggaagggcaagaggggcctgagccacagcacctgcagcggcgacgacaccaagggatctggctccggcagcggccccaagaaaaagagaaaagtctaagctgccttctgcggggcttgccttctggccatgcccttcttctctcccttgcacctgtacctcttggtctttgaataaagcctgagtaggaaggctagcaaaaaaaaaaaaaaaaaaaaaaaaaaaaaaaaaaaaaaaaaaaaaaaaaaaaaaaaaaaaaaaaaaaaaaaaaaaaaaaa

SEQ ID NO: 16419 - RNA, 9485 nt, synthetic construct
  source 1..9485: mol_type = other RNA
aggaaataagagagaaaagaagagtaagaagaaatataagagccaccatggcccctaagaagaagcgtaaagtgagccggatggaacgcctcgtctacgaggtgcggcagaagtgcagaaacatcgaggacatctgcatctcctgcggatctctgaacgtgaccctggagcacccactgttcatcggcggcatgtgccagaactgtaaaaactgttttctggagtgtgcctatcaatacgacgatgacggctaccagagctactgcaccatctgttgcggcggaagagaggtgctgatgtgtggaaataacaactgctgccggtgcttctgcgtggaatgcgtggacctgctggtgggccccggcgccgcccaggccgctattaaggaagatccttggaactgctacatgtgcggccacaagggcacatacggcctgctgagacggagagaggactggcctagcagactgcagatgttcttcgccaataaccacgaccaggagttcgacccccctaaggtgtaccctcccgtccccgccgagaagagaaagcccatccgggtcctgagcctgttcgatggcatcgccaccggtctgctggtgctgaaggacctgggcatccaggtggataggtacattgcctccgaggtgtgcgaggactccatcaccgtgggaatggtgcgtcatcagggcaagatcatgtacgtgggcgacgtgcggagcgtgacacagaagcatatccaggagtggggccctttcgacctggtgatcggcggcagcccttgcaatgacctgagcatcgtgaacccagcccggaagggcctgtacgagggaaccggcagactgttcttcgagttttacagactgctgcacgacgcccggcctaaggaaggcgacgaccggcccttcttttggctgttcgagaatgtggtggccatgggagtcagcgacaagcgggatattagccggttcctggagagcaaccccgtgatgatcgatgccaaggaagtgagcgccgcccaccgggccagatacttctggggcaatctgcctggcatgaacagacccctggccagcaccgtgaacgacaagctggagctgcaggagtgcctggagcacggccggatcgccaagttcagcaaggtgagaaccatcaccacccgaagcaacagcatcaaacaaggcaaggaccagcactttcctgtgttcatgaacgagaaggaggacatcctgtggtgtaccgagatggagagagtgttcgggttcccagtccactacacagatgtcagcaacatgtctagactggccagacagagactgctgggaagaagctggtccgtccctgtgatcagacacctgttcgcccctctgaaggagtacttcgcctgcgtgagcagcggcaacagcaacgccaacagccggggccccagcttctctagcggcctggtgccactgtccctgagagggagccacatgggccccatggagatctacaaaaccgtgagcgcctggaagcggcagcctgtgcgcgtgctgagcctgtttcggaatatcgataaagtcctgaaaagcctgggattcctggagagcggctctggctccggcggtggcaccctgaagtacgtggaggatgtgacaaacgtggtcagacgggatgtggagaagtggggccccttcgatctggtgtacggcagcacccaacccctgggcagctcttgtgaccggtgccctggctggtacatgtttcagttccaccggatcctgcagtacgccctgccgagacaggagtcccagcggccattcttttggattttcatggacaacttgctgctgaccgaggatgaccaggaaactaccactcggttcctgcagaccgaagccgtgaccctgcaggacgtgagaggccgggactaccagaacgccatgcgggtgtggtccaacatccctggactgaaaagcaagcacgcacctctgacccctaaagaagaggagtacctgcaggcccaggtgcggagcagaagcaagctggacgcccctaaggtggatctgctggtgaagaattgcctcctgcccctgagagagtacttcaagtatttcagccagaatagtctgcccctgggaggcagcggcggcggcgccctggtgacatttgaggacgtcgccgtgcggttcacccaggaggaatgggctctgctggatccttctcagaaaatcctgtaccgggacgtgatgagagagacataccggaatctgacctccgtgggcatcaactgggaatgttgggaccttgaagcctgcttcagaagcctgggaagaaacctgagagtgcaggtggtgaagagaaagtgcgagctgaccaacagcggcccctgcgccgagggcggcccaagcagcggcgcccctcctcccagcggcggcagcccagccggctccccaacctctaccgaggagggcacctctgagtccgccacccccgagagcggccctggcacctccaccgagcccagcgagggcagcgcacccggcagccctgccggcagccccacctccacagaggagggaaccagcaccgagcccagcgaaggcagcgccccaggcaccagcaccgagcctagtgagcaggagattaaacggatcaacaagatcagaagaagacttgtgaaagacagcaacaccaagaaggccggcaagacaggccccatgaaaaccctgctggttagagtgatgacacccgatctgagagagcggctggaaaacctgagaaagaagcctgaaaatatcccccagcccatcagcaatacatctagagccaacctgaataagctgctgaccgattacaccgaaatgaagaaggcgatcctgcatgtgtactgggaagagttccagaaggaccctgtgggcctgatgagccgggtggcccagcctgccagcaagaagatcgatcagaacaagctgaaacctgagatggacgagaagggcaacctgaccaccgccggctttgcctgctctcagtgtggccagcccctgttcgtgtacaagctggagcaggtgtctgagaagggcaaggcttacaccaactacttcggacggtgcaatgtggccgagcacgaaaagctgatcctgctggcccagctgaagcccgagaaggatagcgacgaagccgtgacatatagcctgggaaagtttgggcagagggccctggatttctacagcattcatgtgaccaaggagtccacccaccccgtgaagcccctggcccagatcgccggaaacagatacgcctccggacctgtgggaaaggccctgagcgacgcatgtatgggcacaatcgcctccttcctgtctaagtaccaggacatcatcatcgaacaccagaaggtggtgaagggcaaccagaagagactggagagcctgcgggagctggccggcaaggaaaacctggaataccctagcgtgaccctgccacctcagcctcacaccaaggagggcgttgatgcctacaacgaagtgatcgcccgggtgcgaatgtgggtgaacctgaacctgtggcagaagctgaagctaagcagagatgatgccaagcctctgctgagactgaagggattcccttcctttcctctggtcgagagacaggccaacgaagtggactggtgggacatggtgtgtaacgtgaagaagctgatcaacgagaaaaaggaggatggcaaggtgttttggcagaatctggctggctacaagagacaggaagccctgagaccatacctgagcagcgaggaagatcggaagaagggaaagaaattcgctcggtaccagctgggcgacctgctgctgcacctggaaaagaagcacggcgaggactggggaaaggtgtacgacgaggcctgggagcggattgacaagaaagtggaaggcctgagcaagcacatcaagctggaagaggaacggagaagcgaggacgcccagagcaaggccgccctgaccgactggctgcgggctaaggccagcttcgtgatcgagggcctgaaggaggccgacaaggacgagttctgcagatgcgagctgaagctgcagaagtggtacggggacctgcggggaaagcccttcgccatcgaagccgagaacagcatcctggacatcagcggcttcagcaagcagtacaactgtgccttcatctggcagaaggacggcgtgaagaagctgaacctgtacctgatcatcaactacttcaagggcggcaagctgcggttcaagaagatcaaacctgaagccttcgaagccaacagattctacaccgtgatcaacaaaaagagcggcgagatcgtgcccatggaggtgaacttcaacttcgacgaccccaacctgatcatcctgcctctggcctttggcaagagacagggcagagaattcatctggaacgacctgctgtccctggaaaccggcagcctgaagctggccaacggaagagtgatcgagaagacactgtacaacagaagaacccggcaggatgagcctgccctgttcgtggccctgaccttcgagcggcgggaggtcctggactcctccaatatcaaaccaatgaacctgatcggcgtggcaagaggcgaaaacatccccgccgtgatcgccctgaccgaccccgagggctgcccactgagccggtttaaggatagcctgggaaacccaacccacatcctgagaatcggcgagagctataaggagaagcagcggaccatccaggccaagaaggaggtggagcagcggagagccggcggctacagccggaagtacgccagcaaagccaagaatctggcagacgatatggtgagaaacaccgctagagatctgctgtactacgccgtgacccaggatgccatgctgatcttcgccaacctgagccggggcttcggccggcagggcaagcggaccttcatggccgagagacagtacacacggatggaggactggctgaccgccaagctggcctacgagggcctgagcaagacctacctgtccaagacactggcccagtacacctccaagacatgcagcaactgtgggtttaccatcaccagcgccgactacgacagggtgctggagaagctgaagaagacagcaacaggctggatgaccacaattaacggcaaggagctgaaggtggagggccagattacctactacaacagatacaagagacagaacgtagtcaaggacctgtccgtcgagctggatagactgagcgaagaatctgtgaacaacgacatctcctcctggacaaagggcagaagcggagaagctctgagcctcctgaagaaaagattctcccatagacccgtgcaggagaagttcgtgtgcctgaactgcggcttcgagacacacgcagccgagcaagccgccctgaacatcgccagatcctggctgttcctgcggagccaggagtacaagaaataccagacaaacaagacaaccggcaacaccgataagagagccttcgtcgagacctggcagtccttttaccggaagaagcttaaggaggtgtggaaacctgccgtgcggtctggcggatctggcggaggctccagcctgggccccgtgagcttcaaggacgtggccgtgggcttcacccaggaggagtggaggcagctggagcccgcccagaggaggacctacagggaggtgatgctggagaactacagccacctggtggccgtgggctgccacttcatcaagcccgacgtgatcaccaagctggagaggggcgaggagccctggatcgagggcggcttcctgccccagggctgcgccggcgacgaggtgtggcagggcggcccaagcagcggcgcccctcctcccagcggcggcagcccagccggctccccaacctctaccgaggagggcacctctgagtccgccacccccgagagcggccctggcacctccaccgagcccagcgagggcagcgcacccggcagccctgccggcagccccacctccacagaggagggaaccagcaccgagcccagcgaaggcagcgccccaggcaccagcaccgagcctagtgagcaggagattaaacggatcaacaagatcagaagaagacttgtgaaagacagcaacaccaagaaggccggcaagacaggccccatgaaaaccctgctggttagagtgatgacacccgatctgagagagcggctggaaaacctgagaaagaagcctgaaaatatcccccagcccatcagcaatacatctagagccaacctgaataagctgctgaccgattacaccgaaatgaagaaggcgatcctgcatgtgtactgggaagagttccagaaggaccctgtgggcctgatgagccgggtggcccagcctgccagcaagaagatcgatcagaacaagctgaaacctgagatggacgagaagggcaacctgaccaccgccggctttgcctgctctcagtgtggccagcccctgttcgtgtacaagctggagcaggtgtctgagaagggcaaggcttacaccaactacttcggacggtgcaatgtggccgagcacgaaaagctgatcctgctggcccagctgaagcccgagaaggatagcgacgaagccgtgacatatagcctgggaaagtttgggcagagggccctggatttctacagcattcatgtgaccaaggagtccacccaccccgtgaagcccctggcccagatcgccggaaacagatacgcctccggacctgtgggaaaggccctgagcgacgcatgtatgggcacaatcgcctccttcctgtctaagtaccaggacatcatcatcgaacaccagaaggtggtgaagggcaaccagaagagactggagagcctgcgggagctggccggcaaggaaaacctggaataccctagcgtgaccctgccacctcagcctcacaccaaggagggcgttgatgcctacaacgaagtgatcgcccgggtgcgaatgtgggtgaacctgaacctgtggcagaagctgaagctaagcagagatgatgccaagcctctgctgagactgaagggattcccttcctttcctctggtcgagagacaggccaacgaagtggactggtgggacatggtgtgtaacgtgaagaagctgatcaacgagaaaaaggaggatggcaaggtgttttggcagaatctggctggctacaagagacaggaagccctgagaccatacctgagcagcgaggaagatcggaagaagggaaagaaattcgctcggtaccagctgggcgacctgctgctgcacctggaaaagaagcacggcgaggactggggaaaggtgtacgacgaggcctgggagcggattgacaagaaagtggaaggcctgagcaagcacatcaagctggaagaggaacggagaagcgaggacgcccagagcaaggccgccctgaccgactggctgcgggctaaggccagcttcgtgatcgagggcctgaaggaggccgacaaggacgagttctgcagatgcgagctgaagctgcagaagtggtacggggacctgcggggaaagcccttcgccatcgaagccgagaacagcatcctggacatcagcggcttcagcaagcagtacaactgtgccttcatctggcagaaggacggcgtgaagaagctgaacctgtacctgatcatcaactacttcaagggcggcaagctgcggttcaagaagatcaaacctgaagccttcgaagccaacagattctacaccgtgatcaacaaaaagagcggcgagatcgtgcccatggaggtgaacttcaacttcgacgaccccaacctgatcatcctgcctctggcctttggcaagagacagggcagagaattcatctggaacgacctgctgtccctggaaaccggcagcctgaagctggccaacggaagagtgatcgagaagacactgtacaacagaagaacccggcaggatgagcctgccctgttcgtggccctgaccttcgagcggcgggaggtcctggactcctccaatatcaaaccaatgaacctgatcggcgtggcaagaggcgaaaacatccccgccgtgatcgccctgaccgaccccgagggctgcccactgagccggtttaaggatagcctgggaaacccaacccacatcctgagaatcggcgagagctataaggagaagcagcggaccatccaggccaagaaggaggtggagcagcggagagccggcggctacagccggaagtacgccagcaaagccaagaatctggcagacgatatggtgagaaacaccgctagagatctgctgtactacgccgtgacccaggatgccatgctgatcttcgccaacctgagccggggcttcggccggcagggcaagcggaccttcatggccgagagacagtacacacggatggaggactggctgaccgccaagctggcctacgagggcctgagcaagacctacctgtccaagacactggcccagtacacctccaagacatgcagcaactgtgggtttaccatcaccagcgccgactacgacagggtgctggagaagctgaagaagacagcaacaggctggatgaccacaattaacggcaaggagctgaaggtggagggccagattacctactacaacagatacaagagacagaacgtagtcaaggacctgtccgtcgagctggatagactgagcgaagaatctgtgaacaacgacatctcctcctggacaaagggcagaagcggagaagctctgagcctcctgaagaaaagattctcccatagacccgtgcaggagaagttcgtgtgcctgaactgcggcttcgagacacacgcagccgagcaagccgccctgaacatcgccagatcctggctgttcctgcggagccaggagtacaagaaataccagacaaacaagacaaccggcaacaccgataagagagccttcgtcgagacctggcagtccttttaccggaagaagcttaaggaggtgtggaaacctgccgtgcggtctggcggatctggcggaggctcctagcctgggccccgtgagcttcaaggacgtggccgtgggcttcacccaggaggagtggaggcagctggagcccgcccagaggaggacctacagggaggtgatgctggagaactacagccacctggtggccgtgggctgccacttcatcaagcccgacgtgatcaccaagctggagaggggcgaggagccctggatcgagggcggcttcctgccccagggctgcgccggcgacgaggtgtggcagggatctggctccggcagcggccccaagaaaaagagaaaagtctaagctgccttctgcggggcttgccttctggccatgcccttcttctctcccttgcacctgtacctcttggtctttgaataaagcctgagtaggaaggctagcaaaaaaaaaaaaaaaaaaaaaaaaaaaaaaaaaaaaaaaaaaaaaaaaaaaaaaaaaaaaaaaaaaaaaaaaaaaaaaaa

SEQ ID NO: 16420 - RNA, 9485 nt, synthetic construct
  source 1..9485: mol_type = other RNA
aggaaataagagagaaaagaagagtaagaagaaatataagagccaccatggcccctaagaagaagcgtaaagtgagccggatggaacgcctcgtctacgaggtgcggcagaagtgcagaaacatcgaggacatctgcatctcctgcggatctctgaacgtgaccctggagcacccactgttcatcggcggcatgtgccagaactgtaaaaactgttttctggagtgtgcctatcaatacgacgatgacggctaccagagctactgcaccatctgttgcggcggaagagaggtgctgatgtgtggaaataacaactgctgccggtgcttctgcgtggaatgcgtggacctgctggtgggccccggcgccgcccaggccgctattaaggaagatccttggaactgctacatgtgcggccacaagggcacatacggcctgctgagacggagagaggactggcctagcagactgcagatgttcttcgccaataaccacgaccaggagttcgacccccctaaggtgtaccctcccgtccccgccgagaagagaaagcccatccgggtcctgagcctgttcgatggcatcgccaccggtctgctggtgctgaaggacctgggcatccaggtggataggtacattgcctccgaggtgtgcgaggactccatcaccgtgggaatggtgcgtcatcagggcaagatcatgtacgtgggcgacgtgcggagcgtgacacagaagcatatccaggagtggggccctttcgacctggtgatcggcggcagcccttgcaatgacctgagcatcgtgaacccagcccggaagggcctgtacgagggaaccggcagactgttcttcgagttttacagactgctgcacgacgcccggcctaaggaaggcgacgaccggcccttcttttggctgttcgagaatgtggtggccatgggagtcagcgacaagcgggatattagccggttcctggagagcaaccccgtgatgatcgatgccaaggaagtgagcgccgcccaccgggccagatacttctggggcaatctgcctggcatgaacagacccctggccagcaccgtgaacgacaagctggagctgcaggagtgcctggagcacggccggatcgccaagttcagcaaggtgagaaccatcaccacccgaagcaacagcatcaaacaaggcaaggaccagcactttcctgtgttcatgaacgagaaggaggacatcctgtggtgtaccgagatggagagagtgttcgggttcccagtccactacacagatgtcagcaacatgtctagactggccagacagagactgctgggaagaagctggtccgtccctgtgatcagacacctgttcgcccctctgaaggagtacttcgcctgcgtgagcagcggcaacagcaacgccaacagccggggccccagcttctctagcggcctggtgccactgtccctgagagggagccacatgggccccatggagatctacaaaaccgtgagcgcctggaagcggcagcctgtgcgcgtgctgagcctgtttcggaatatcgataaagtcctgaaaagcctgggattcctggagagcggctctggctccggcggtggcaccctgaagtacgtggaggatgtgacaaacgtggtcagacgggatgtggagaagtggggccccttcgatctggtgtacggcagcacccaacccctgggcagctcttgtgaccggtgccctggctggtacatgtttcagttccaccggatcctgcagtacgccctgccgagacaggagtcccagcggccattcttttggattttcatggacaacttgctgctgaccgaggatgaccaggaaactaccactcggttcctgcagaccgaagccgtgaccctgcaggacgtgagaggccgggactaccagaacgccatgcgggtgtggtccaacatccctggactgaaaagcaagcacgcacctctgacccctaaagaagaggagtacctgcaggcccaggtgcggagcagaagcaagctggacgcccctaaggtggatctgctggtgaagaattgcctcctgcccctgagagagtacttcaagtatttcagccagaatagtctgcccctgggaggcagcggcggcggcgccctggtgacatttgaggacgtcgccgtgcggttcacccaggaggaatgggctctgctggatccttctcagaaaatcctgtaccgggacgtgatgagagagacataccggaatctgacctccgtgggcatcaactgggaatgttgggaccttgaagcctgcttcagaagcctgggaagaaacctgagagtgcaggtggtgaagagaaagtgcgagctgaccaacagcggcccctgcgccgagggcggcccaagcagcggcgcccctcctcccagcggcggcagcccagccggctccccaacctctaccgaggagggcacctctgagtccgccacccccgagagcggccctggcacctccaccgagcccagcgagggcagcgcacccggcagccctgccggcagccccacctccacagaggagggaaccagcaccgagcccagcgaaggcagcgccccaggcaccagcaccgagcctagtgagcaggagattaaacggatcaacaagatcagaagaagacttgtgaaagacagcaacaccaagaaggccggcaagacaggccccatgaaaaccctgctggttagagtgatgacacccgatctgagagagcggctggaaaacctgagaaagaagcctgaaaatatcccccagcccatcagcaatacatctagagccaacctgaataagctgctgaccgattacaccgaaatgaagaaggcgatcctgcatgtgtactgggaagagttccagaaggaccctgtgggcctgatgagccgggtggcccagcctgccagcaagaagatcgatcagaacaagctgaaacctgagatggacgagaagggcaacctgaccaccgccggctttgcctgctctcagtgtggccagcccctgttcgtgtacaagctggagcaggtgtctgagaagggcaaggcttacaccaactacttcggacggtgcaatgtggccgagcacgaaaagctgatcctgctggcccagctgaagcccgagaaggatagcgacgaagccgtgacatatagcctgggaaagtttgggcagagggccctggatttctacagcattcatgtgaccaaggagtccacccaccccgtgaagcccctggcccagatcgccggaaacagatacgcctccggacctgtgggaaaggccctgagcgacgcatgtatgggcacaatcgcctccttcctgtctaagtaccaggacatcatcatcgaacaccagaaggtggtgaagggcaaccagaagagactggagagcctgcgggagctggccggcaaggaaaacctggaataccctagcgtgaccctgccacctcagcctcacaccaaggagggcgttgatgcctacaacgaagtgatcgcccgggtgcgaatgtgggtgaacctgaacctgtggcagaagctgaagctaagcagagatgatgccaagcctctgctgagactgaagggattcccttcctttcctctggtcgagagacaggccaacgaagtggactggtgggacatggtgtgtaacgtgaagaagctgatcaacgagaaaaaggaggatggcaaggtgttttggcagaatctggctggctacaagagacaggaagccctgagaccatacctgagcagcgaggaagatcggaagaagggaaagaaattcgctcggtaccagctgggcgacctgctgctgcacctggaaaagaagcacggcgaggactggggaaaggtgtacgacgaggcctgggagcggattgacaagaaagtggaaggcctgagcaagcacatcaagctggaagaggaacggagaagcgaggacgcccagagcaaggccgccctgaccgactggctgcgggctaaggccagcttcgtgatcgagggcctgaaggaggccgacaaggacgagttctgcagatgcgagctgaagctgcagaagtggtacggggacctgcggggaaagcccttcgccatcgaagccgagaacagcatcctggacatcagcggcttcagcaagcagtacaactgtgccttcatctggcagaaggacggcgtgaagaagctgaacctgtacctgatcatcaactacttcaagggcggcaagctgcggttcaagaagatcaaacctgaagccttcgaagccaacagattctacaccgtgatcaacaaaaagagcggcgagatcgtgcccatggaggtgaacttcaacttcgacgaccccaacctgatcatcctgcctctggcctttggcaagagacagggcagagaattcatctggaacgacctgctgtccctggaaaccggcagcctgaagctggccaacggaagagtgatcgagaagacactgtacaacagaagaacccggcaggatgagcctgccctgttcgtggccctgaccttcgagcggcgggaggtcctggactcctccaatatcaaaccaatgaacctgatcggcgtggcaagaggcgaaaacatccccgccgtgatcgccctgaccgaccccgagggctgcccactgagccggtttaaggatagcctgggaaacccaacccacatcctgagaatcggcgagagctataaggagaagcagcggaccatccaggccaagaaggaggtggagcagcggagagccggcggctacagccggaagtacgccagcaaagccaagaatctggcagacgatatggtgagaaacaccgctagagatctgctgtactacgccgtgacccaggatgccatgctgatcttcgccaacctgagccggggcttcggccggcagggcaagcggaccttcatggccgagagacagtacacacggatggaggactggctgaccgccaagctggcctacgagggcctgagcaagacctacctgtccaagacactggcccagtacacctccaagacatgcagcaactgtgggtttaccatcaccagcgccgactacgacagggtgctggagaagctgaagaagacagcaacaggctggatgaccacaattaacggcaaggagctgaaggtggagggccagattacctactacaacagatacaagagacagaacgtagtcaaggacctgtccgtcgagctggatagactgagcgaagaatctgtgaacaacgacatctcctcctggacaaagggcagaagcggagaagctctgagcctcctgaagaaaagattctcccatagacccgtgcaggagaagttcgtgtgcctgaactgcggcttcgagacacacgcagccgagcaagccgccctgaacatcgccagatcctggctgttcctgcggagccaggagtacaagaaataccagacaaacaagacaaccggcaacaccgataagagagccttcgtcgagacctggcagtccttttaccggaagaagcttaaggaggtgtggaaacctgccgtgcggtctggcggatctggcggaggctccgagcagggcctggtgagcttcgaggacgtggccgtggacttcacctggcaggagtggcaggagctggacgccgcccagaggaccctgtacagggacgtgatgctggagaactacagcagcctggtgagcctgggccactgcgtgaccaagcccgagctgatcttcaggctggagcacggcttcggcccctggagcatcggcgagaccagcctgtggaacctgcccggcgtgctggaggtgcccggcggcccaagcagcggcgcccctcctcccagcggcggcagcccagccggctccccaacctctaccgaggagggcacctctgagtccgccacccccgagagcggccctggcacctccaccgagcccagcgagggcagcgcacccggcagccctgccggcagccccacctccacagaggagggaaccagcaccgagcccagcgaaggcagcgccccaggcaccagcaccgagcctagtgagcaggagattaaacggatcaacaagatcagaagaagacttgtgaaagacagcaacaccaagaaggccggcaagacaggccccatgaaaaccctgctggttagagtgatgacacccgatctgagagagcggctggaaaacctgagaaagaagcctgaaaatatcccccagcccatcagcaatacatctagagccaacctgaataagctgctgaccgattacaccgaaatgaagaaggcgatcctgcatgtgtactgggaagagttccagaaggaccctgtgggcctgatgagccgggtggcccagcctgccagcaagaagatcgatcagaacaagctgaaacctgagatggacgagaagggcaacctgaccaccgccggctttgcctgctctcagtgtggccagcccctgttcgtgtacaagctggagcaggtgtctgagaagggcaaggcttacaccaactacttcggacggtgcaatgtggccgagcacgaaaagctgatcctgctggcccagctgaagcccgagaaggatagcgacgaagccgtgacatatagcctgggaaagtttgggcagagggccctggatttctacagcattcatgtgaccaaggagtccacccaccccgtgaagcccctggcccagatcgccggaaacagatacgcctccggacctgtgggaaaggccctgagcgacgcatgtatgggcacaatcgcctccttcctgtctaagtaccaggacatcatcatcgaacaccagaaggtggtgaagggcaaccagaagagactggagagcctgcgggagctggccggcaaggaaaacctggaataccctagcgtgaccctgccacctcagcctcacaccaaggagggcgttgatgcctacaacgaagtgatcgcccgggtgcgaatgtgggtgaacctgaacctgtggcagaagctgaagctaagcagagatgatgccaagcctctgctgagactgaagggattcccttcctttcctctggtcgagagacaggccaacgaagtggactggtgggacatggtgtgtaacgtgaagaagctgatcaacgagaaaaaggaggatggcaaggtgttttggcagaatctggctggctacaagagacaggaagccctgagaccatacctgagcagcgaggaagatcggaagaagggaaagaaattcgctcggtaccagctgggcgacctgctgctgcacctggaaaagaagcacggcgaggactggggaaaggtgtacgacgaggcctgggagcggattgacaagaaagtggaaggcctgagcaagcacatcaagctggaagaggaacggagaagcgaggacgcccagagcaaggccgccctgaccgactggctgcgggctaaggccagcttcgtgatcgagggcctgaaggaggccgacaaggacgagttctgcagatgcgagctgaagctgcagaagtggtacggggacctgcggggaaagcccttcgccatcgaagccgagaacagcatcctggacatcagcggcttcagcaagcagtacaactgtgccttcatctggcagaaggacggcgtgaagaagctgaacctgtacctgatcatcaactacttcaagggcggcaagctgcggttcaagaagatcaaacctgaagccttcgaagccaacagattctacaccgtgatcaacaaaaagagcggcgagatcgtgcccatggaggtgaacttcaacttcgacgaccccaacctgatcatcctgcctctggcctttggcaagagacagggcagagaattcatctggaacgacctgctgtccctggaaaccggcagcctgaagctggccaacggaagagtgatcgagaagacactgtacaacagaagaacccggcaggatgagcctgccctgttcgtggccctgaccttcgagcggcgggaggtcctggactcctccaatatcaaaccaatgaacctgatcggcgtggcaagaggcgaaaacatccccgccgtgatcgccctgaccgaccccgagggctgcccactgagccggtttaaggatagcctgggaaacccaacccacatcctgagaatcggcgagagctataaggagaagcagcggaccatccaggccaagaaggaggtggagcagcggagagccggcggctacagccggaagtacgccagcaaagccaagaatctggcagacgatatggtgagaaacaccgctagagatctgctgtactacgccgtgacccaggatgccatgctgatcttcgccaacctgagccggggcttcggccggcagggcaagcggaccttcatggccgagagacagtacacacggatggaggactggctgaccgccaagctggcctacgagggcctgagcaagacctacctgtccaagacactggcccagtacacctccaagacatgcagcaactgtgggtttaccatcaccagcgccgactacgacagggtgctggagaagctgaagaagacagcaacaggctggatgaccacaattaacggcaaggagctgaaggtggagggccagattacctactacaacagatacaagagacagaacgtagtcaaggacctgtccgtcgagctggatagactgagcgaagaatctgtgaacaacgacatctcctcctggacaaagggcagaagcggagaagctctgagcctcctgaagaaaagattctcccatagacccgtgcaggagaagttcgtgtgcctgaactgcggcttcgagacacacgcagccgagcaagccgccctgaacatcgccagatcctggctgttcctgcggagccaggagtacaagaaataccagacaaacaagacaaccggcaacaccgataagagagccttcgtcgagacctggcagtccttttaccggaagaagcttaaggaggtgtggaaacctgccgtgcggtctggcggatctggcggaggctcctgagcagggcctggtgagcttcgaggacgtggccgtggacttcacctggcaggagtggcaggagctggacgccgcccagaggaccctgtacagggacgtgatgctggagaactacagcagcctggtgagcctgggccactgcgtgaccaagcccgagctgatcttcaggctggagcacggcttcggcccctggagcatcggcgagaccagcctgtggaacctgcccggcgtgctggaggtgcccggatctggctccggcagcggccccaagaaaaagagaaaagtctaagctgccttctgcggggcttgccttctggccatgcccttcttctctcccttgcacctgtacctcttggtctttgaataaagcctgagtaggaaggctagcaaaaaaaaaaaaaaaaaaaaaaaaaaaaaaaaaaaaaaaaaaaaaaaaaaaaaaaaaaaaaaaaaaaaaaaaaaaaaaaa

SEQ ID NO: 16421 - RNA, 9485 nt, synthetic construct
  source 1..9485: mol_type = other RNA
aggaaataagagagaaaagaagagtaagaagaaatataagagccaccatggcccctaagaagaagcgtaaagtgagccggatggaacgcctcgtctacgaggtgcggcagaagtgcagaaacatcgaggacatctgcatctcctgcggatctctgaacgtgaccctggagcacccactgttcatcggcggcatgtgccagaactgtaaaaactgttttctggagtgtgcctatcaatacgacgatgacggctaccagagctactgcaccatctgttgcggcggaagagaggtgctgatgtgtggaaataacaactgctgccggtgcttctgcgtggaatgcgtggacctgctggtgggccccggcgccgcccaggccgctattaaggaagatccttggaactgctacatgtgcggccacaagggcacatacggcctgctgagacggagagaggactggcctagcagactgcagatgttcttcgccaataaccacgaccaggagttcgacccccctaaggtgtaccctcccgtccccgccgagaagagaaagcccatccgggtcctgagcctgttcgatggcatcgccaccggtctgctggtgctgaaggacctgggcatccaggtggataggtacattgcctccgaggtgtgcgaggactccatcaccgtgggaatggtgcgtcatcagggcaagatcatgtacgtgggcgacgtgcggagcgtgacacagaagcatatccaggagtggggccctttcgacctggtgatcggcggcagcccttgcaatgacctgagcatcgtgaacccagcccggaagggcctgtacgagggaaccggcagactgttcttcgagttttacagactgctgcacgacgcccggcctaaggaaggcgacgaccggcccttcttttggctgttcgagaatgtggtggccatgggagtcagcgacaagcgggatattagccggttcctggagagcaaccccgtgatgatcgatgccaaggaagtgagcgccgcccaccgggccagatacttctggggcaatctgcctggcatgaacagacccctggccagcaccgtgaacgacaagctggagctgcaggagtgcctggagcacggccggatcgccaagttcagcaaggtgagaaccatcaccacccgaagcaacagcatcaaacaaggcaaggaccagcactttcctgtgttcatgaacgagaaggaggacatcctgtggtgtaccgagatggagagagtgttcgggttcccagtccactacacagatgtcagcaacatgtctagactggccagacagagactgctgggaagaagctggtccgtccctgtgatcagacacctgttcgcccctctgaaggagtacttcgcctgcgtgagcagcggcaacagcaacgccaacagccggggccccagcttctctagcggcctggtgccactgtccctgagagggagccacatgggccccatggagatctacaaaaccgtgagcgcctggaagcggcagcctgtgcgcgtgctgagcctgtttcggaatatcgataaagtcctgaaaagcctgggattcctggagagcggctctggctccggcggtggcaccctgaagtacgtggaggatgtgacaaacgtggtcagacgggatgtggagaagtggggccccttcgatctggtgtacggcagcacccaacccctgggcagctcttgtgaccggtgccctggctggtacatgtttcagttccaccggatcctgcagtacgccctgccgagacaggagtcccagcggccattcttttggattttcatggacaacttgctgctgaccgaggatgaccaggaaactaccactcggttcctgcagaccgaagccgtgaccctgcaggacgtgagaggccgggactaccagaacgccatgcgggtgtggtccaacatccctggactgaaaagcaagcacgcacctctgacccctaaagaagaggagtacctgcaggcccaggtgcggagcagaagcaagctggacgcccctaaggtggatctgctggtgaagaattgcctcctgcccctgagagagtacttcaagtatttcagccagaatagtctgcccctgggaggcagcggcggcggcgccctggtgacatttgaggacgtcgccgtgcggttcacccaggaggaatgggctctgctggatccttctcagaaaatcctgtaccgggacgtgatgagagagacataccggaatctgacctccgtgggcatcaactgggaatgttgggaccttgaagcctgcttcagaagcctgggaagaaacctgagagtgcaggtggtgaagagaaagtgcgagctgaccaacagcggcccctgcgccgagggcggcccaagcagcggcgcccctcctcccagcggcggcagcccagccggctccccaacctctaccgaggagggcacctctgagtccgccacccccgagagcggccctggcacctccaccgagcccagcgagggcagcgcacccggcagccctgccggcagccccacctccacagaggagggaaccagcaccgagcccagcgaaggcagcgccccaggcaccagcaccgagcctagtgagcaggagattaaacggatcaacaagatcagaagaagacttgtgaaagacagcaacaccaagaaggccggcaagacaggccccatgaaaaccctgctggttagagtgatgacacccgatctgagagagcggctggaaaacctgagaaagaagcctgaaaatatcccccagcccatcagcaatacatctagagccaacctgaataagctgctgaccgattacaccgaaatgaagaaggcgatcctgcatgtgtactgggaagagttccagaaggaccctgtgggcctgatgagccgggtggcccagcctgccagcaagaagatcgatcagaacaagctgaaacctgagatggacgagaagggcaacctgaccaccgccggctttgcctgctctcagtgtggccagcccctgttcgtgtacaagctggagcaggtgtctgagaagggcaaggcttacaccaactacttcggacggtgcaatgtggccgagcacgaaaagctgatcctgctggcccagctgaagcccgagaaggatagcgacgaagccgtgacatatagcctgggaaagtttgggcagagggccctggatttctacagcattcatgtgaccaaggagtccacccaccccgtgaagcccctggcccagatcgccggaaacagatacgcctccggacctgtgggaaaggccctgagcgacgcatgtatgggcacaatcgcctccttcctgtctaagtaccaggacatcatcatcgaacaccagaaggtggtgaagggcaaccagaagagactggagagcctgcgggagctggccggcaaggaaaacctggaataccctagcgtgaccctgccacctcagcctcacaccaaggagggcgttgatgcctacaacgaagtgatcgcccgggtgcgaatgtgggtgaacctgaacctgtggcagaagctgaagctaagcagagatgatgccaagcctctgctgagactgaagggattcccttcctttcctctggtcgagagacaggccaacgaagtggactggtgggacatggtgtgtaacgtgaagaagctgatcaacgagaaaaaggaggatggcaaggtgttttggcagaatctggctggctacaagagacaggaagccctgagaccatacctgagcagcgaggaagatcggaagaagggaaagaaattcgctcggtaccagctgggcgacctgctgctgcacctggaaaagaagcacggcgaggactggggaaaggtgtacgacgaggcctgggagcggattgacaagaaagtggaaggcctgagcaagcacatcaagctggaagaggaacggagaagcgaggacgcccagagcaaggccgccctgaccgactggctgcgggctaaggccagcttcgtgatcgagggcctgaaggaggccgacaaggacgagttctgcagatgcgagctgaagctgcagaagtggtacggggacctgcggggaaagcccttcgccatcgaagccgagaacagcatcctggacatcagcggcttcagcaagcagtacaactgtgccttcatctggcagaaggacggcgtgaagaagctgaacctgtacctgatcatcaactacttcaagggcggcaagctgcggttcaagaagatcaaacctgaagccttcgaagccaacagattctacaccgtgatcaacaaaaagagcggcgagatcgtgcccatggaggtgaacttcaacttcgacgaccccaacctgatcatcctgcctctggcctttggcaagagacagggcagagaattcatctggaacgacctgctgtccctggaaaccggcagcctgaagctggccaacggaagagtgatcgagaagacactgtacaacagaagaacccggcaggatgagcctgccctgttcgtggccctgaccttcgagcggcgggaggtcctggactcctccaatatcaaaccaatgaacctgatcggcgtggcaagaggcgaaaacatccccgccgtgatcgccctgaccgaccccgagggctgcccactgagccggtttaaggatagcctgggaaacccaacccacatcctgagaatcggcgagagctataaggagaagcagcggaccatccaggccaagaaggaggtggagcagcggagagccggcggctacagccggaagtacgccagcaaagccaagaatctggcagacgatatggtgagaaacaccgctagagatctgctgtactacgccgtgacccaggatgccatgctgatcttcgccaacctgagccggggcttcggccggcagggcaagcggaccttcatggccgagagacagtacacacggatggaggactggctgaccgccaagctggcctacgagggcctgagcaagacctacctgtccaagacactggcccagtacacctccaagacatgcagcaactgtgggtttaccatcaccagcgccgactacgacagggtgctggagaagctgaagaagacagcaacaggctggatgaccacaattaacggcaaggagctgaaggtggagggccagattacctactacaacagatacaagagacagaacgtagtcaaggacctgtccgtcgagctggatagactgagcgaagaatctgtgaacaacgacatctcctcctggacaaagggcagaagcggagaagctctgagcctcctgaagaaaagattctcccatagacccgtgcaggagaagttcgtgtgcctgaactgcggcttcgagacacacgcagccgagcaagccgccctgaacatcgccagatcctggctgttcctgcggagccaggagtacaagaaataccagacaaacaagacaaccggcaacaccgataagagagccttcgtcgagacctggcagtccttttaccggaagaagcttaaggaggtgtggaaacctgccgtgcggtctggcggatctggcggaggctccgcccacggcagcgtgatgttcagcgacgtgagcatcgtgttcagccaggaggagtgggagtacctggacctgaagcagagggacctgtacagggacgtgatgctggagaactacagcaacctggtgagcctgggctgcttcatcagcaagcccgacgtgatcagcctgctggagcagggcaaggagccctggaaggtgatgaggaagggcaggggcaggtaccccgacctggagaccaggtacggcggcccaagcagcggcgcccctcctcccagcggcggcagcccagccggctccccaacctctaccgaggagggcacctctgagtccgccacccccgagagcggccctggcacctccaccgagcccagcgagggcagcgcacccggcagccctgccggcagccccacctccacagaggagggaaccagcaccgagcccagcgaaggcagcgccccaggcaccagcaccgagcctagtgagcaggagattaaacggatcaacaagatcagaagaagacttgtgaaagacagcaacaccaagaaggccggcaagacaggccccatgaaaaccctgctggttagagtgatgacacccgatctgagagagcggctggaaaacctgagaaagaagcctgaaaatatcccccagcccatcagcaatacatctagagccaacctgaataagctgctgaccgattacaccgaaatgaagaaggcgatcctgcatgtgtactgggaagagttccagaaggaccctgtgggcctgatgagccgggtggcccagcctgccagcaagaagatcgatcagaacaagctgaaacctgagatggacgagaagggcaacctgaccaccgccggctttgcctgctctcagtgtggccagcccctgttcgtgtacaagctggagcaggtgtctgagaagggcaaggcttacaccaactacttcggacggtgcaatgtggccgagcacgaaaagctgatcctgctggcccagctgaagcccgagaaggatagcgacgaagccgtgacatatagcctgggaaagtttgggcagagggccctggatttctacagcattcatgtgaccaaggagtccacccaccccgtgaagcccctggcccagatcgccggaaacagatacgcctccggacctgtgggaaaggccctgagcgacgcatgtatgggcacaatcgcctccttcctgtctaagtaccaggacatcatcatcgaacaccagaaggtggtgaagggcaaccagaagagactggagagcctgcgggagctggccggcaaggaaaacctggaataccctagcgtgaccctgccacctcagcctcacaccaaggagggcgttgatgcctacaacgaagtgatcgcccgggtgcgaatgtgggtgaacctgaacctgtggcagaagctgaagctaagcagagatgatgccaagcctctgctgagactgaagggattcccttcctttcctctggtcgagagacaggccaacgaagtggactggtgggacatggtgtgtaacgtgaagaagctgatcaacgagaaaaaggaggatggcaaggtgttttggcagaatctggctggctacaagagacaggaagccctgagaccatacctgagcagcgaggaagatcggaagaagggaaagaaattcgctcggtaccagctgggcgacctgctgctgcacctggaaaagaagcacggcgaggactggggaaaggtgtacgacgaggcctgggagcggattgacaagaaagtggaaggcctgagcaagcacatcaagctggaagaggaacggagaagcgaggacgcccagagcaaggccgccctgaccgactggctgcgggctaaggccagcttcgtgatcgagggcctgaaggaggccgacaaggacgagttctgcagatgcgagctgaagctgcagaagtggtacggggacctgcggggaaagcccttcgccatcgaagccgagaacagcatcctggacatcagcggcttcagcaagcagtacaactgtgccttcatctggcagaaggacggcgtgaagaagctgaacctgtacctgatcatcaactacttcaagggcggcaagctgcggttcaagaagatcaaacctgaagccttcgaagccaacagattctacaccgtgatcaacaaaaagagcggcgagatcgtgcccatggaggtgaacttcaacttcgacgaccccaacctgatcatcctgcctctggcctttggcaagagacagggcagagaattcatctggaacgacctgctgtccctggaaaccggcagcctgaagctggccaacggaagagtgatcgagaagacactgtacaacagaagaacccggcaggatgagcctgccctgttcgtggccctgaccttcgagcggcgggaggtcctggactcctccaatatcaaaccaatgaacctgatcggcgtggcaagaggcgaaaacatccccgccgtgatcgccctgaccgaccccgagggctgcccactgagccggtttaaggatagcctgggaaacccaacccacatcctgagaatcggcgagagctataaggagaagcagcggaccatccaggccaagaaggaggtggagcagcggagagccggcggctacagccggaagtacgccagcaaagccaagaatctggcagacgatatggtgagaaacaccgctagagatctgctgtactacgccgtgacccaggatgccatgctgatcttcgccaacctgagccggggcttcggccggcagggcaagcggaccttcatggccgagagacagtacacacggatggaggactggctgaccgccaagctggcctacgagggcctgagcaagacctacctgtccaagacactggcccagtacacctccaagacatgcagcaactgtgggtttaccatcaccagcgccgactacgacagggtgctggagaagctgaagaagacagcaacaggctggatgaccacaattaacggcaaggagctgaaggtggagggccagattacctactacaacagatacaagagacagaacgtagtcaaggacctgtccgtcgagctggatagactgagcgaagaatctgtgaacaacgacatctcctcctggacaaagggcagaagcggagaagctctgagcctcctgaagaaaagattctcccatagacccgtgcaggagaagttcgtgtgcctgaactgcggcttcgagacacacgcagccgagcaagccgccctgaacatcgccagatcctggctgttcctgcggagccaggagtacaagaaataccagacaaacaagacaaccggcaacaccgataagagagccttcgtcgagacctggcagtccttttaccggaagaagcttaaggaggtgtggaaacctgccgtgcggtctggcggatctggcggaggctcctgcccacggcagcgtgatgttcagcgacgtgagcatcgtgttcagccaggaggagtgggagtacctggacctgaagcagagggacctgtacagggacgtgatgctggagaactacagcaacctggtgagcctgggctgcttcatcagcaagcccgacgtgatcagcctgctggagcagggcaaggagccctggaaggtgatgaggaagggcaggggcaggtaccccgacctggagaccaggtacggatctggctccggcagcggccccaagaaaaagagaaaagtctaagctgccttctgcggggcttgccttctggccatgcccttcttctctcccttgcacctgtacctcttggtctttgaataaagcctgagtaggaaggctagcaaaaaaaaaaaaaaaaaaaaaaaaaaaaaaaaaaaaaaaaaaaaaaaaaaaaaaaaaaaaaaaaaaaaaaaaaaaaaaaa

SEQ ID NO: 16422 - RNA, 9485 nt, synthetic construct
  source 1..9485: mol_type = other RNA
aggaaataagagagaaaagaagagtaagaagaaatataagagccaccatggcccctaagaagaagcgtaaagtgagccggatggaacgcctcgtctacgaggtgcggcagaagtgcagaaacatcgaggacatctgcatctcctgcggatctctgaacgtgaccctggagcacccactgttcatcggcggcatgtgccagaactgtaaaaactgttttctggagtgtgcctatcaatacgacgatgacggctaccagagctactgcaccatctgttgcggcggaagagaggtgctgatgtgtggaaataacaactgctgccggtgcttctgcgtggaatgcgtggacctgctggtgggccccggcgccgcccaggccgctattaaggaagatccttggaactgctacatgtgcggccacaagggcacatacggcctgctgagacggagagaggactggcctagcagactgcagatgttcttcgccaataaccacgaccaggagttcgacccccctaaggtgtaccctcccgtccccgccgagaagagaaagcccatccgggtcctgagcctgttcgatggcatcgccaccggtctgctggtgctgaaggacctgggcatccaggtggataggtacattgcctccgaggtgtgcgaggactccatcaccgtgggaatggtgcgtcatcagggcaagatcatgtacgtgggcgacgtgcggagcgtgacacagaagcatatccaggagtggggccctttcgacctggtgatcggcggcagcccttgcaatgacctgagcatcgtgaacccagcccggaagggcctgtacgagggaaccggcagactgttcttcgagttttacagactgctgcacgacgcccggcctaaggaaggcgacgaccggcccttcttttggctgttcgagaatgtggtggccatgggagtcagcgacaagcgggatattagccggttcctggagagcaaccccgtgatgatcgatgccaaggaagtgagcgccgcccaccgggccagatacttctggggcaatctgcctggcatgaacagacccctggccagcaccgtgaacgacaagctggagctgcaggagtgcctggagcacggccggatcgccaagttcagcaaggtgagaaccatcaccacccgaagcaacagcatcaaacaaggcaaggaccagcactttcctgtgttcatgaacgagaaggaggacatcctgtggtgtaccgagatggagagagtgttcgggttcccagtccactacacagatgtcagcaacatgtctagactggccagacagagactgctgggaagaagctggtccgtccctgtgatcagacacctgttcgcccctctgaaggagtacttcgcctgcgtgagcagcggcaacagcaacgccaacagccggggccccagcttctctagcggcctggtgccactgtccctgagagggagccacatgggccccatggagatctacaaaaccgtgagcgcctggaagcggcagcctgtgcgcgtgctgagcctgtttcggaatatcgataaagtcctgaaaagcctgggattcctggagagcggctctggctccggcggtggcaccctgaagtacgtggaggatgtgacaaacgtggtcagacgggatgtggagaagtggggccccttcgatctggtgtacggcagcacccaacccctgggcagctcttgtgaccggtgccctggctggtacatgtttcagttccaccggatcctgcagtacgccctgccgagacaggagtcccagcggccattcttttggattttcatggacaacttgctgctgaccgaggatgaccaggaaactaccactcggttcctgcagaccgaagccgtgaccctgcaggacgtgagaggccgggactaccagaacgccatgcgggtgtggtccaacatccctggactgaaaagcaagcacgcacctctgacccctaaagaagaggagtacctgcaggcccaggtgcggagcagaagcaagctggacgcccctaaggtggatctgctggtgaagaattgcctcctgcccctgagagagtacttcaagtatttcagccagaatagtctgcccctgggaggcagcggcggcggcgccctggtgacatttgaggacgtcgccgtgcggttcacccaggaggaatgggctctgctggatccttctcagaaaatcctgtaccgggacgtgatgagagagacataccggaatctgacctccgtgggcatcaactgggaatgttgggaccttgaagcctgcttcagaagcctgggaagaaacctgagagtgcaggtggtgaagagaaagtgcgagctgaccaacagcggcccctgcgccgagggcggcccaagcagcggcgcccctcctcccagcggcggcagcccagccggctccccaacctctaccgaggagggcacctctgagtccgccacccccgagagcggccctggcacctccaccgagcccagcgagggcagcgcacccggcagccctgccggcagccccacctccacagaggagggaaccagcaccgagcccagcgaaggcagcgccccaggcaccagcaccgagcctagtgagcaggagattaaacggatcaacaagatcagaagaagacttgtgaaagacagcaacaccaagaaggccggcaagacaggccccatgaaaaccctgctggttagagtgatgacacccgatctgagagagcggctggaaaacctgagaaagaagcctgaaaatatcccccagcccatcagcaatacatctagagccaacctgaataagctgctgaccgattacaccgaaatgaagaaggcgatcctgcatgtgtactgggaagagttccagaaggaccctgtgggcctgatgagccgggtggcccagcctgccagcaagaagatcgatcagaacaagctgaaacctgagatggacgagaagggcaacctgaccaccgccggctttgcctgctctcagtgtggccagcccctgttcgtgtacaagctggagcaggtgtctgagaagggcaaggcttacaccaactacttcggacggtgcaatgtggccgagcacgaaaagctgatcctgctggcccagctgaagcccgagaaggatagcgacgaagccgtgacatatagcctgggaaagtttgggcagagggccctggatttctacagcattcatgtgaccaaggagtccacccaccccgtgaagcccctggcccagatcgccggaaacagatacgcctccggacctgtgggaaaggccctgagcgacgcatgtatgggcacaatcgcctccttcctgtctaagtaccaggacatcatcatcgaacaccagaaggtggtgaagggcaaccagaagagactggagagcctgcgggagctggccggcaaggaaaacctggaataccctagcgtgaccctgccacctcagcctcacaccaaggagggcgttgatgcctacaacgaagtgatcgcccgggtgcgaatgtgggtgaacctgaacctgtggcagaagctgaagctaagcagagatgatgccaagcctctgctgagactgaagggattcccttcctttcctctggtcgagagacaggccaacgaagtggactggtgggacatggtgtgtaacgtgaagaagctgatcaacgagaaaaaggaggatggcaaggtgttttggcagaatctggctggctacaagagacaggaagccctgagaccatacctgagcagcgaggaagatcggaagaagggaaagaaattcgctcggtaccagctgggcgacctgctgctgcacctggaaaagaagcacggcgaggactggggaaaggtgtacgacgaggcctgggagcggattgacaagaaagtggaaggcctgagcaagcacatcaagctggaagaggaacggagaagcgaggacgcccagagcaaggccgccctgaccgactggctgcgggctaaggccagcttcgtgatcgagggcctgaaggaggccgacaaggacgagttctgcagatgcgagctgaagctgcagaagtggtacggggacctgcggggaaagcccttcgccatcgaagccgagaacagcatcctggacatcagcggcttcagcaagcagtacaactgtgccttcatctggcagaaggacggcgtgaagaagctgaacctgtacctgatcatcaactacttcaagggcggcaagctgcggttcaagaagatcaaacctgaagccttcgaagccaacagattctacaccgtgatcaacaaaaagagcggcgagatcgtgcccatggaggtgaacttcaacttcgacgaccccaacctgatcatcctgcctctggcctttggcaagagacagggcagagaattcatctggaacgacctgctgtccctggaaaccggcagcctgaagctggccaacggaagagtgatcgagaagacactgtacaacagaagaacccggcaggatgagcctgccctgttcgtggccctgaccttcgagcggcgggaggtcctggactcctccaatatcaaaccaatgaacctgatcggcgtggcaagaggcgaaaacatccccgccgtgatcgccctgaccgaccccgagggctgcccactgagccggtttaaggatagcctgggaaacccaacccacatcctgagaatcggcgagagctataaggagaagcagcggaccatccaggccaagaaggaggtggagcagcggagagccggcggctacagccggaagtacgccagcaaagccaagaatctggcagacgatatggtgagaaacaccgctagagatctgctgtactacgccgtgacccaggatgccatgctgatcttcgccaacctgagccggggcttcggccggcagggcaagcggaccttcatggccgagagacagtacacacggatggaggactggctgaccgccaagctggcctacgagggcctgagcaagacctacctgtccaagacactggcccagtacacctccaagacatgcagcaactgtgggtttaccatcaccagcgccgactacgacagggtgctggagaagctgaagaagacagcaacaggctggatgaccacaattaacggcaaggagctgaaggtggagggccagattacctactacaacagatacaagagacagaacgtagtcaaggacctgtccgtcgagctggatagactgagcgaagaatctgtgaacaacgacatctcctcctggacaaagggcagaagcggagaagctctgagcctcctgaagaaaagattctcccatagacccgtgcaggagaagttcgtgtgcctgaactgcggcttcgagacacacgcagccgagcaagccgccctgaacatcgccagatcctggctgttcctgcggagccaggagtacaagaaataccagacaaacaagacaaccggcaacaccgataagagagccttcgtcgagacctggcagtccttttaccggaagaagcttaaggaggtgtggaaacctgccgtgcggtctggcggatctggcggaggctccccccaggagagcgtggccttcgaggacgtggccgtgtacttcaccaccaaggagtgggccatcatgatgcccgccgagagggccctgtacagggacgtgatgctggagaactacgaggccgtggccttcgtggtgccccccaccagcaagcccgccctggtgagccacctggagcagggcaaggagagctgcttcatccagccccagggcgtgctgagcaggagcgactggagggccggcctgggcggcccaagcagcggcgcccctcctcccagcggcggcagcccagccggctccccaacctctaccgaggagggcacctctgagtccgccacccccgagagcggccctggcacctccaccgagcccagcgagggcagcgcacccggcagccctgccggcagccccacctccacagaggagggaaccagcaccgagcccagcgaaggcagcgccccaggcaccagcaccgagcctagtgagcaggagattaaacggatcaacaagatcagaagaagacttgtgaaagacagcaacaccaagaaggccggcaagacaggccccatgaaaaccctgctggttagagtgatgacacccgatctgagagagcggctggaaaacctgagaaagaagcctgaaaatatcccccagcccatcagcaatacatctagagccaacctgaataagctgctgaccgattacaccgaaatgaagaaggcgatcctgcatgtgtactgggaagagttccagaaggaccctgtgggcctgatgagccgggtggcccagcctgccagcaagaagatcgatcagaacaagctgaaacctgagatggacgagaagggcaacctgaccaccgccggctttgcctgctctcagtgtggccagcccctgttcgtgtacaagctggagcaggtgtctgagaagggcaaggcttacaccaactacttcggacggtgcaatgtggccgagcacgaaaagctgatcctgctggcccagctgaagcccgagaaggatagcgacgaagccgtgacatatagcctgggaaagtttgggcagagggccctggatttctacagcattcatgtgaccaaggagtccacccaccccgtgaagcccctggcccagatcgccggaaacagatacgcctccggacctgtgggaaaggccctgagcgacgcatgtatgggcacaatcgcctccttcctgtctaagtaccaggacatcatcatcgaacaccagaaggtggtgaagggcaaccagaagagactggagagcctgcgggagctggccggcaaggaaaacctggaataccctagcgtgaccctgccacctcagcctcacaccaaggagggcgttgatgcctacaacgaagtgatcgcccgggtgcgaatgtgggtgaacctgaacctgtggcagaagctgaagctaagcagagatgatgccaagcctctgctgagactgaagggattcccttcctttcctctggtcgagagacaggccaacgaagtggactggtgggacatggtgtgtaacgtgaagaagctgatcaacgagaaaaaggaggatggcaaggtgttttggcagaatctggctggctacaagagacaggaagccctgagaccatacctgagcagcgaggaagatcggaagaagggaaagaaattcgctcggtaccagctgggcgacctgctgctgcacctggaaaagaagcacggcgaggactggggaaaggtgtacgacgaggcctgggagcggattgacaagaaagtggaaggcctgagcaagcacatcaagctggaagaggaacggagaagcgaggacgcccagagcaaggccgccctgaccgactggctgcgggctaaggccagcttcgtgatcgagggcctgaaggaggccgacaaggacgagttctgcagatgcgagctgaagctgcagaagtggtacggggacctgcggggaaagcccttcgccatcgaagccgagaacagcatcctggacatcagcggcttcagcaagcagtacaactgtgccttcatctggcagaaggacggcgtgaagaagctgaacctgtacctgatcatcaactacttcaagggcggcaagctgcggttcaagaagatcaaacctgaagccttcgaagccaacagattctacaccgtgatcaacaaaaagagcggcgagatcgtgcccatggaggtgaacttcaacttcgacgaccccaacctgatcatcctgcctctggcctttggcaagagacagggcagagaattcatctggaacgacctgctgtccctggaaaccggcagcctgaagctggccaacggaagagtgatcgagaagacactgtacaacagaagaacccggcaggatgagcctgccctgttcgtggccctgaccttcgagcggcgggaggtcctggactcctccaatatcaaaccaatgaacctgatcggcgtggcaagaggcgaaaacatccccgccgtgatcgccctgaccgaccccgagggctgcccactgagccggtttaaggatagcctgggaaacccaacccacatcctgagaatcggcgagagctataaggagaagcagcggaccatccaggccaagaaggaggtggagcagcggagagccggcggctacagccggaagtacgccagcaaagccaagaatctggcagacgatatggtgagaaacaccgctagagatctgctgtactacgccgtgacccaggatgccatgctgatcttcgccaacctgagccggggcttcggccggcagggcaagcggaccttcatggccgagagacagtacacacggatggaggactggctgaccgccaagctggcctacgagggcctgagcaagacctacctgtccaagacactggcccagtacacctccaagacatgcagcaactgtgggtttaccatcaccagcgccgactacgacagggtgctggagaagctgaagaagacagcaacaggctggatgaccacaattaacggcaaggagctgaaggtggagggccagattacctactacaacagatacaagagacagaacgtagtcaaggacctgtccgtcgagctggatagactgagcgaagaatctgtgaacaacgacatctcctcctggacaaagggcagaagcggagaagctctgagcctcctgaagaaaagattctcccatagacccgtgcaggagaagttcgtgtgcctgaactgcggcttcgagacacacgcagccgagcaagccgccctgaacatcgccagatcctggctgttcctgcggagccaggagtacaagaaataccagacaaacaagacaaccggcaacaccgataagagagccttcgtcgagacctggcagtccttttaccggaagaagcttaaggaggtgtggaaacctgccgtgcggtctggcggatctggcggaggctcctccccaggagagcgtggccttcgaggacgtggccgtgtacttcaccaccaaggagtgggccatcatgatgcccgccgagagggccctgtacagggacgtgatgctggagaactacgaggccgtggccttcgtggtgccccccaccagcaagcccgccctggtgagccacctggagcagggcaaggagagctgcttcatccagccccagggcgtgctgagcaggagcgactggagggccggcctgggatctggctccggcagcggccccaagaaaaagagaaaagtctaagctgccttctgcggggcttgccttctggccatgcccttcttctctcccttgcacctgtacctcttggtctttgaataaagcctgagtaggaaggctagcaaaaaaaaaaaaaaaaaaaaaaaaaaaaaaaaaaaaaaaaaaaaaaaaaaaaaaaaaaaaaaaaaaaaaaaaaaaaaaaa

SEQ ID NO: 16423 - RNA, 9485 nt, synthetic construct
  source 1..9485: mol_type = other RNA
aggaaataagagagaaaagaagagtaagaagaaatataagagccaccatggcccctaagaagaagcgtaaagtgagccggatggaacgcctcgtctacgaggtgcggcagaagtgcagaaacatcgaggacatctgcatctcctgcggatctctgaacgtgaccctggagcacccactgttcatcggcggcatgtgccagaactgtaaaaactgttttctggagtgtgcctatcaatacgacgatgacggctaccagagctactgcaccatctgttgcggcggaagagaggtgctgatgtgtggaaataacaactgctgccggtgcttctgcgtggaatgcgtggacctgctggtgggccccggcgccgcccaggccgctattaaggaagatccttggaactgctacatgtgcggccacaagggcacatacggcctgctgagacggagagaggactggcctagcagactgcagatgttcttcgccaataaccacgaccaggagttcgacccccctaaggtgtaccctcccgtccccgccgagaagagaaagcccatccgggtcctgagcctgttcgatggcatcgccaccggtctgctggtgctgaaggacctgggcatccaggtggataggtacattgcctccgaggtgtgcgaggactccatcaccgtgggaatggtgcgtcatcagggcaagatcatgtacgtgggcgacgtgcggagcgtgacacagaagcatatccaggagtggggccctttcgacctggtgatcggcggcagcccttgcaatgacctgagcatcgtgaacccagcccggaagggcctgtacgagggaaccggcagactgttcttcgagttttacagactgctgcacgacgcccggcctaaggaaggcgacgaccggcccttcttttggctgttcgagaatgtggtggccatgggagtcagcgacaagcgggatattagccggttcctggagagcaaccccgtgatgatcgatgccaaggaagtgagcgccgcccaccgggccagatacttctggggcaatctgcctggcatgaacagacccctggccagcaccgtgaacgacaagctggagctgcaggagtgcctggagcacggccggatcgccaagttcagcaaggtgagaaccatcaccacccgaagcaacagcatcaaacaaggcaaggaccagcactttcctgtgttcatgaacgagaaggaggacatcctgtggtgtaccgagatggagagagtgttcgggttcccagtccactacacagatgtcagcaacatgtctagactggccagacagagactgctgggaagaagctggtccgtccctgtgatcagacacctgttcgcccctctgaaggagtacttcgcctgcgtgagcagcggcaacagcaacgccaacagccggggccccagcttctctagcggcctggtgccactgtccctgagagggagccacatgggccccatggagatctacaaaaccgtgagcgcctggaagcggcagcctgtgcgcgtgctgagcctgtttcggaatatcgataaagtcctgaaaagcctgggattcctggagagcggctctggctccggcggtggcaccctgaagtacgtggaggatgtgacaaacgtggtcagacgggatgtggagaagtggggccccttcgatctggtgtacggcagcacccaacccctgggcagctcttgtgaccggtgccctggctggtacatgtttcagttccaccggatcctgcagtacgccctgccgagacaggagtcccagcggccattcttttggattttcatggacaacttgctgctgaccgaggatgaccaggaaactaccactcggttcctgcagaccgaagccgtgaccctgcaggacgtgagaggccgggactaccagaacgccatgcgggtgtggtccaacatccctggactgaaaagcaagcacgcacctctgacccctaaagaagaggagtacctgcaggcccaggtgcggagcagaagcaagctggacgcccctaaggtggatctgctggtgaagaattgcctcctgcccctgagagagtacttcaagtatttcagccagaatagtctgcccctgggaggcagcggcggcggcgccctggtgacatttgaggacgtcgccgtgcggttcacccaggaggaatgggctctgctggatccttctcagaaaatcctgtaccgggacgtgatgagagagacataccggaatctgacctccgtgggcatcaactgggaatgttgggaccttgaagcctgcttcagaagcctgggaagaaacctgagagtgcaggtggtgaagagaaagtgcgagctgaccaacagcggcccctgcgccgagggcggcccaagcagcggcgcccctcctcccagcggcggcagcccagccggctccccaacctctaccgaggagggcacctctgagtccgccacccccgagagcggccctggcacctccaccgagcccagcgagggcagcgcacccggcagccctgccggcagccccacctccacagaggagggaaccagcaccgagcccagcgaaggcagcgccccaggcaccagcaccgagcctagtgagcaggagattaaacggatcaacaagatcagaagaagacttgtgaaagacagcaacaccaagaaggccggcaagacaggccccatgaaaaccctgctggttagagtgatgacacccgatctgagagagcggctggaaaacctgagaaagaagcctgaaaatatcccccagcccatcagcaatacatctagagccaacctgaataagctgctgaccgattacaccgaaatgaagaaggcgatcctgcatgtgtactgggaagagttccagaaggaccctgtgggcctgatgagccgggtggcccagcctgccagcaagaagatcgatcagaacaagctgaaacctgagatggacgagaagggcaacctgaccaccgccggctttgcctgctctcagtgtggccagcccctgttcgtgtacaagctggagcaggtgtctgagaagggcaaggcttacaccaactacttcggacggtgcaatgtggccgagcacgaaaagctgatcctgctggcccagctgaagcccgagaaggatagcgacgaagccgtgacatatagcctgggaaagtttgggcagagggccctggatttctacagcattcatgtgaccaaggagtccacccaccccgtgaagcccctggcccagatcgccggaaacagatacgcctccggacctgtgggaaaggccctgagcgacgcatgtatgggcacaatcgcctccttcctgtctaagtaccaggacatcatcatcgaacaccagaaggtggtgaagggcaaccagaagagactggagagcctgcgggagctggccggcaaggaaaacctggaataccctagcgtgaccctgccacctcagcctcacaccaaggagggcgttgatgcctacaacgaagtgatcgcccgggtgcgaatgtgggtgaacctgaacctgtggcagaagctgaagctaagcagagatgatgccaagcctctgctgagactgaagggattcccttcctttcctctggtcgagagacaggccaacgaagtggactggtgggacatggtgtgtaacgtgaagaagctgatcaacgagaaaaaggaggatggcaaggtgttttggcagaatctggctggctacaagagacaggaagccctgagaccatacctgagcagcgaggaagatcggaagaagggaaagaaattcgctcggtaccagctgggcgacctgctgctgcacctggaaaagaagcacggcgaggactggggaaaggtgtacgacgaggcctgggagcggattgacaagaaagtggaaggcctgagcaagcacatcaagctggaagaggaacggagaagcgaggacgcccagagcaaggccgccctgaccgactggctgcgggctaaggccagcttcgtgatcgagggcctgaaggaggccgacaaggacgagttctgcagatgcgagctgaagctgcagaagtggtacggggacctgcggggaaagcccttcgccatcgaagccgagaacagcatcctggacatcagcggcttcagcaagcagtacaactgtgccttcatctggcagaaggacggcgtgaagaagctgaacctgtacctgatcatcaactacttcaagggcggcaagctgcggttcaagaagatcaaacctgaagccttcgaagccaacagattctacaccgtgatcaacaaaaagagcggcgagatcgtgcccatggaggtgaacttcaacttcgacgaccccaacctgatcatcctgcctctggcctttggcaagagacagggcagagaattcatctggaacgacctgctgtccctggaaaccggcagcctgaagctggccaacggaagagtgatcgagaagacactgtacaacagaagaacccggcaggatgagcctgccctgttcgtggccctgaccttcgagcggcgggaggtcctggactcctccaatatcaaaccaatgaacctgatcggcgtggcaagaggcgaaaacatccccgccgtgatcgccctgaccgaccccgagggctgcccactgagccggtttaaggatagcctgggaaacccaacccacatcctgagaatcggcgagagctataaggagaagcagcggaccatccaggccaagaaggaggtggagcagcggagagccggcggctacagccggaagtacgccagcaaagccaagaatctggcagacgatatggtgagaaacaccgctagagatctgctgtactacgccgtgacccaggatgccatgctgatcttcgccaacctgagccggggcttcggccggcagggcaagcggaccttcatggccgagagacagtacacacggatggaggactggctgaccgccaagctggcctacgagggcctgagcaagacctacctgtccaagacactggcccagtacacctccaagacatgcagcaactgtgggtttaccatcaccagcgccgactacgacagggtgctggagaagctgaagaagacagcaacaggctggatgaccacaattaacggcaaggagctgaaggtggagggccagattacctactacaacagatacaagagacagaacgtagtcaaggacctgtccgtcgagctggatagactgagcgaagaatctgtgaacaacgacatctcctcctggacaaagggcagaagcggagaagctctgagcctcctgaagaaaagattctcccatagacccgtgcaggagaagttcgtgtgcctgaactgcggcttcgagacacacgcagccgagcaagccgccctgaacatcgccagatcctggctgttcctgcggagccaggagtacaagaaataccagacaaacaagacaaccggcaacaccgataagagagccttcgtcgagacctggcagtccttttaccggaagaagcttaaggaggtgtggaaacctgccgtgcggtctggcggatctggcggaggctccacccaggacagcgtgaccttcaaggacgtggccgtggacttcaccagggaggagtgggagaggctgaacagcacccagagggacctgtacagggacgtgatgctggagaactacaggaacctggtgagcctgggcctggccgtgagcaagcccgacatcatcttccagctggagcaggagaaggagctgtggatgctgaagaggaaggtgctgaggagcaccaggcccgcccagaagaccgagggcggcccaagcagcggcgcccctcctcccagcggcggcagcccagccggctccccaacctctaccgaggagggcacctctgagtccgccacccccgagagcggccctggcacctccaccgagcccagcgagggcagcgcacccggcagccctgccggcagccccacctccacagaggagggaaccagcaccgagcccagcgaaggcagcgccccaggcaccagcaccgagcctagtgagcaggagattaaacggatcaacaagatcagaagaagacttgtgaaagacagcaacaccaagaaggccggcaagacaggccccatgaaaaccctgctggttagagtgatgacacccgatctgagagagcggctggaaaacctgagaaagaagcctgaaaatatcccccagcccatcagcaatacatctagagccaacctgaataagctgctgaccgattacaccgaaatgaagaaggcgatcctgcatgtgtactgggaagagttccagaaggaccctgtgggcctgatgagccgggtggcccagcctgccagcaagaagatcgatcagaacaagctgaaacctgagatggacgagaagggcaacctgaccaccgccggctttgcctgctctcagtgtggccagcccctgttcgtgtacaagctggagcaggtgtctgagaagggcaaggcttacaccaactacttcggacggtgcaatgtggccgagcacgaaaagctgatcctgctggcccagctgaagcccgagaaggatagcgacgaagccgtgacatatagcctgggaaagtttgggcagagggccctggatttctacagcattcatgtgaccaaggagtccacccaccccgtgaagcccctggcccagatcgccggaaacagatacgcctccggacctgtgggaaaggccctgagcgacgcatgtatgggcacaatcgcctccttcctgtctaagtaccaggacatcatcatcgaacaccagaaggtggtgaagggcaaccagaagagactggagagcctgcgggagctggccggcaaggaaaacctggaataccctagcgtgaccctgccacctcagcctcacaccaaggagggcgttgatgcctacaacgaagtgatcgcccgggtgcgaatgtgggtgaacctgaacctgtggcagaagctgaagctaagcagagatgatgccaagcctctgctgagactgaagggattcccttcctttcctctggtcgagagacaggccaacgaagtggactggtgggacatggtgtgtaacgtgaagaagctgatcaacgagaaaaaggaggatggcaaggtgttttggcagaatctggctggctacaagagacaggaagccctgagaccatacctgagcagcgaggaagatcggaagaagggaaagaaattcgctcggtaccagctgggcgacctgctgctgcacctggaaaagaagcacggcgaggactggggaaaggtgtacgacgaggcctgggagcggattgacaagaaagtggaaggcctgagcaagcacatcaagctggaagaggaacggagaagcgaggacgcccagagcaaggccgccctgaccgactggctgcgggctaaggccagcttcgtgatcgagggcctgaaggaggccgacaaggacgagttctgcagatgcgagctgaagctgcagaagtggtacggggacctgcggggaaagcccttcgccatcgaagccgagaacagcatcctggacatcagcggcttcagcaagcagtacaactgtgccttcatctggcagaaggacggcgtgaagaagctgaacctgtacctgatcatcaactacttcaagggcggcaagctgcggttcaagaagatcaaacctgaagccttcgaagccaacagattctacaccgtgatcaacaaaaagagcggcgagatcgtgcccatggaggtgaacttcaacttcgacgaccccaacctgatcatcctgcctctggcctttggcaagagacagggcagagaattcatctggaacgacctgctgtccctggaaaccggcagcctgaagctggccaacggaagagtgatcgagaagacactgtacaacagaagaacccggcaggatgagcctgccctgttcgtggccctgaccttcgagcggcgggaggtcctggactcctccaatatcaaaccaatgaacctgatcggcgtggcaagaggcgaaaacatccccgccgtgatcgccctgaccgaccccgagggctgcccactgagccggtttaaggatagcctgggaaacccaacccacatcctgagaatcggcgagagctataaggagaagcagcggaccatccaggccaagaaggaggtggagcagcggagagccggcggctacagccggaagtacgccagcaaagccaagaatctggcagacgatatggtgagaaacaccgctagagatctgctgtactacgccgtgacccaggatgccatgctgatcttcgccaacctgagccggggcttcggccggcagggcaagcggaccttcatggccgagagacagtacacacggatggaggactggctgaccgccaagctggcctacgagggcctgagcaagacctacctgtccaagacactggcccagtacacctccaagacatgcagcaactgtgggtttaccatcaccagcgccgactacgacagggtgctggagaagctgaagaagacagcaacaggctggatgaccacaattaacggcaaggagctgaaggtggagggccagattacctactacaacagatacaagagacagaacgtagtcaaggacctgtccgtcgagctggatagactgagcgaagaatctgtgaacaacgacatctcctcctggacaaagggcagaagcggagaagctctgagcctcctgaagaaaagattctcccatagacccgtgcaggagaagttcgtgtgcctgaactgcggcttcgagacacacgcagccgagcaagccgccctgaacatcgccagatcctggctgttcctgcggagccaggagtacaagaaataccagacaaacaagacaaccggcaacaccgataagagagccttcgtcgagacctggcagtccttttaccggaagaagcttaaggaggtgtggaaacctgccgtgcggtctggcggatctggcggaggctcctacccaggacagcgtgaccttcaaggacgtggccgtggacttcaccagggaggagtgggagaggctgaacagcacccagagggacctgtacagggacgtgatgctggagaactacaggaacctggtgagcctgggcctggccgtgagcaagcccgacatcatcttccagctggagcaggagaaggagctgtggatgctgaagaggaaggtgctgaggagcaccaggcccgcccagaagaccgagggatctggctccggcagcggccccaagaaaaagagaaaagtctaagctgccttctgcggggcttgccttctggccatgcccttcttctctcccttgcacctgtacctcttggtctttgaataaagcctgagtaggaaggctagcaaaaaaaaaaaaaaaaaaaaaaaaaaaaaaaaaaaaaaaaaaaaaaaaaaaaaaaaaaaaaaaaaaaaaaaaaaaaaaaa

SEQ ID NO: 16424 - RNA, 9485 nt, synthetic construct
  source 1..9485: mol_type = other RNA
aggaaataagagagaaaagaagagtaagaagaaatataagagccaccatggcccctaagaagaagcgtaaagtgagccggatggaacgcctcgtctacgaggtgcggcagaagtgcagaaacatcgaggacatctgcatctcctgcggatctctgaacgtgaccctggagcacccactgttcatcggcggcatgtgccagaactgtaaaaactgttttctggagtgtgcctatcaatacgacgatgacggctaccagagctactgcaccatctgttgcggcggaagagaggtgctgatgtgtggaaataacaactgctgccggtgcttctgcgtggaatgcgtggacctgctggtgggccccggcgccgcccaggccgctattaaggaagatccttggaactgctacatgtgcggccacaagggcacatacggcctgctgagacggagagaggactggcctagcagactgcagatgttcttcgccaataaccacgaccaggagttcgacccccctaaggtgtaccctcccgtccccgccgagaagagaaagcccatccgggtcctgagcctgttcgatggcatcgccaccggtctgctggtgctgaaggacctgggcatccaggtggataggtacattgcctccgaggtgtgcgaggactccatcaccgtgggaatggtgcgtcatcagggcaagatcatgtacgtgggcgacgtgcggagcgtgacacagaagcatatccaggagtggggccctttcgacctggtgatcggcggcagcccttgcaatgacctgagcatcgtgaacccagcccggaagggcctgtacgagggaaccggcagactgttcttcgagttttacagactgctgcacgacgcccggcctaaggaaggcgacgaccggcccttcttttggctgttcgagaatgtggtggccatgggagtcagcgacaagcgggatattagccggttcctggagagcaaccccgtgatgatcgatgccaaggaagtgagcgccgcccaccgggccagatacttctggggcaatctgcctggcatgaacagacccctggccagcaccgtgaacgacaagctggagctgcaggagtgcctggagcacggccggatcgccaagttcagcaaggtgagaaccatcaccacccgaagcaacagcatcaaacaaggcaaggaccagcactttcctgtgttcatgaacgagaaggaggacatcctgtggtgtaccgagatggagagagtgttcgggttcccagtccactacacagatgtcagcaacatgtctagactggccagacagagactgctgggaagaagctggtccgtccctgtgatcagacacctgttcgcccctctgaaggagtacttcgcctgcgtgagcagcggcaacagcaacgccaacagccggggccccagcttctctagcggcctggtgccactgtccctgagagggagccacatgggccccatggagatctacaaaaccgtgagcgcctggaagcggcagcctgtgcgcgtgctgagcctgtttcggaatatcgataaagtcctgaaaagcctgggattcctggagagcggctctggctccggcggtggcaccctgaagtacgtggaggatgtgacaaacgtggtcagacgggatgtggagaagtggggccccttcgatctggtgtacggcagcacccaacccctgggcagctcttgtgaccggtgccctggctggtacatgtttcagttccaccggatcctgcagtacgccctgccgagacaggagtcccagcggccattcttttggattttcatggacaacttgctgctgaccgaggatgaccaggaaactaccactcggttcctgcagaccgaagccgtgaccctgcaggacgtgagaggccgggactaccagaacgccatgcgggtgtggtccaacatccctggactgaaaagcaagcacgcacctctgacccctaaagaagaggagtacctgcaggcccaggtgcggagcagaagcaagctggacgcccctaaggtggatctgctggtgaagaattgcctcctgcccctgagagagtacttcaagtatttcagccagaatagtctgcccctgggaggcagcggcggcggcgccctggtgacatttgaggacgtcgccgtgcggttcacccaggaggaatgggctctgctggatccttctcagaaaatcctgtaccgggacgtgatgagagagacataccggaatctgacctccgtgggcatcaactgggaatgttgggaccttgaagcctgcttcagaagcctgggaagaaacctgagagtgcaggtggtgaagagaaagtgcgagctgaccaacagcggcccctgcgccgagggcggcccaagcagcggcgcccctcctcccagcggcggcagcccagccggctccccaacctctaccgaggagggcacctctgagtccgccacccccgagagcggccctggcacctccaccgagcccagcgagggcagcgcacccggcagccctgccggcagccccacctccacagaggagggaaccagcaccgagcccagcgaaggcagcgccccaggcaccagcaccgagcctagtgagcaggagattaaacggatcaacaagatcagaagaagacttgtgaaagacagcaacaccaagaaggccggcaagacaggccccatgaaaaccctgctggttagagtgatgacacccgatctgagagagcggctggaaaacctgagaaagaagcctgaaaatatcccccagcccatcagcaatacatctagagccaacctgaataagctgctgaccgattacaccgaaatgaagaaggcgatcctgcatgtgtactgggaagagttccagaaggaccctgtgggcctgatgagccgggtggcccagcctgccagcaagaagatcgatcagaacaagctgaaacctgagatggacgagaagggcaacctgaccaccgccggctttgcctgctctcagtgtggccagcccctgttcgtgtacaagctggagcaggtgtctgagaagggcaaggcttacaccaactacttcggacggtgcaatgtggccgagcacgaaaagctgatcctgctggcccagctgaagcccgagaaggatagcgacgaagccgtgacatatagcctgggaaagtttgggcagagggccctggatttctacagcattcatgtgaccaaggagtccacccaccccgtgaagcccctggcccagatcgccggaaacagatacgcctccggacctgtgggaaaggccctgagcgacgcatgtatgggcacaatcgcctccttcctgtctaagtaccaggacatcatcatcgaacaccagaaggtggtgaagggcaaccagaagagactggagagcctgcgggagctggccggcaaggaaaacctggaataccctagcgtgaccctgccacctcagcctcacaccaaggagggcgttgatgcctacaacgaagtgatcgcccgggtgcgaatgtgggtgaacctgaacctgtggcagaagctgaagctaagcagagatgatgccaagcctctgctgagactgaagggattcccttcctttcctctggtcgagagacaggccaacgaagtggactggtgggacatggtgtgtaacgtgaagaagctgatcaacgagaaaaaggaggatggcaaggtgttttggcagaatctggctggctacaagagacaggaagccctgagaccatacctgagcagcgaggaagatcggaagaagggaaagaaattcgctcggtaccagctgggcgacctgctgctgcacctggaaaagaagcacggcgaggactggggaaaggtgtacgacgaggcctgggagcggattgacaagaaagtggaaggcctgagcaagcacatcaagctggaagaggaacggagaagcgaggacgcccagagcaaggccgccctgaccgactggctgcgggctaaggccagcttcgtgatcgagggcctgaaggaggccgacaaggacgagttctgcagatgcgagctgaagctgcagaagtggtacggggacctgcggggaaagcccttcgccatcgaagccgagaacagcatcctggacatcagcggcttcagcaagcagtacaactgtgccttcatctggcagaaggacggcgtgaagaagctgaacctgtacctgatcatcaactacttcaagggcggcaagctgcggttcaagaagatcaaacctgaagccttcgaagccaacagattctacaccgtgatcaacaaaaagagcggcgagatcgtgcccatggaggtgaacttcaacttcgacgaccccaacctgatcatcctgcctctggcctttggcaagagacagggcagagaattcatctggaacgacctgctgtccctggaaaccggcagcctgaagctggccaacggaagagtgatcgagaagacactgtacaacagaagaacccggcaggatgagcctgccctgttcgtggccctgaccttcgagcggcgggaggtcctggactcctccaatatcaaaccaatgaacctgatcggcgtggcaagaggcgaaaacatccccgccgtgatcgccctgaccgaccccgagggctgcccactgagccggtttaaggatagcctgggaaacccaacccacatcctgagaatcggcgagagctataaggagaagcagcggaccatccaggccaagaaggaggtggagcagcggagagccggcggctacagccggaagtacgccagcaaagccaagaatctggcagacgatatggtgagaaacaccgctagagatctgctgtactacgccgtgacccaggatgccatgctgatcttcgccaacctgagccggggcttcggccggcagggcaagcggaccttcatggccgagagacagtacacacggatggaggactggctgaccgccaagctggcctacgagggcctgagcaagacctacctgtccaagacactggcccagtacacctccaagacatgcagcaactgtgggtttaccatcaccagcgccgactacgacagggtgctggagaagctgaagaagacagcaacaggctggatgaccacaattaacggcaaggagctgaaggtggagggccagattacctactacaacagatacaagagacagaacgtagtcaaggacctgtccgtcgagctggatagactgagcgaagaatctgtgaacaacgacatctcctcctggacaaagggcagaagcggagaagctctgagcctcctgaagaaaagattctcccatagacccgtgcaggagaagttcgtgtgcctgaactgcggcttcgagacacacgcagccgagcaagccgccctgaacatcgccagatcctggctgttcctgcggagccaggagtacaagaaataccagacaaacaagacaaccggcaacaccgataagagagccttcgtcgagacctggcagtccttttaccggaagaagcttaaggaggtgtggaaacctgccgtgcggtctggcggatctggcggaggctccaggcaggagcccgtgaccttcgaggacgtggccgtgtacttcacccagaacgagtgggtgatcctggaccccgcccagagggccctgtacagggaggtgatgctggagaactacgccaacgtggccagcctggccttcagcttcaccaggcccgtgctggtgagccagctggagaggggcgagctgccccccggcctggacccctgggagagggccagccccgaggccctgaggggcatctgcggcggcccaagcagcggcgcccctcctcccagcggcggcagcccagccggctccccaacctctaccgaggagggcacctctgagtccgccacccccgagagcggccctggcacctccaccgagcccagcgagggcagcgcacccggcagccctgccggcagccccacctccacagaggagggaaccagcaccgagcccagcgaaggcagcgccccaggcaccagcaccgagcctagtgagcaggagattaaacggatcaacaagatcagaagaagacttgtgaaagacagcaacaccaagaaggccggcaagacaggccccatgaaaaccctgctggttagagtgatgacacccgatctgagagagcggctggaaaacctgagaaagaagcctgaaaatatcccccagcccatcagcaatacatctagagccaacctgaataagctgctgaccgattacaccgaaatgaagaaggcgatcctgcatgtgtactgggaagagttccagaaggaccctgtgggcctgatgagccgggtggcccagcctgccagcaagaagatcgatcagaacaagctgaaacctgagatggacgagaagggcaacctgaccaccgccggctttgcctgctctcagtgtggccagcccctgttcgtgtacaagctggagcaggtgtctgagaagggcaaggcttacaccaactacttcggacggtgcaatgtggccgagcacgaaaagctgatcctgctggcccagctgaagcccgagaaggatagcgacgaagccgtgacatatagcctgggaaagtttgggcagagggccctggatttctacagcattcatgtgaccaaggagtccacccaccccgtgaagcccctggcccagatcgccggaaacagatacgcctccggacctgtgggaaaggccctgagcgacgcatgtatgggcacaatcgcctccttcctgtctaagtaccaggacatcatcatcgaacaccagaaggtggtgaagggcaaccagaagagactggagagcctgcgggagctggccggcaaggaaaacctggaataccctagcgtgaccctgccacctcagcctcacaccaaggagggcgttgatgcctacaacgaagtgatcgcccgggtgcgaatgtgggtgaacctgaacctgtggcagaagctgaagctaagcagagatgatgccaagcctctgctgagactgaagggattcccttcctttcctctggtcgagagacaggccaacgaagtggactggtgggacatggtgtgtaacgtgaagaagctgatcaacgagaaaaaggaggatggcaaggtgttttggcagaatctggctggctacaagagacaggaagccctgagaccatacctgagcagcgaggaagatcggaagaagggaaagaaattcgctcggtaccagctgggcgacctgctgctgcacctggaaaagaagcacggcgaggactggggaaaggtgtacgacgaggcctgggagcggattgacaagaaagtggaaggcctgagcaagcacatcaagctggaagaggaacggagaagcgaggacgcccagagcaaggccgccctgaccgactggctgcgggctaaggccagcttcgtgatcgagggcctgaaggaggccgacaaggacgagttctgcagatgcgagctgaagctgcagaagtggtacggggacctgcggggaaagcccttcgccatcgaagccgagaacagcatcctggacatcagcggcttcagcaagcagtacaactgtgccttcatctggcagaaggacggcgtgaagaagctgaacctgtacctgatcatcaactacttcaagggcggcaagctgcggttcaagaagatcaaacctgaagccttcgaagccaacagattctacaccgtgatcaacaaaaagagcggcgagatcgtgcccatggaggtgaacttcaacttcgacgaccccaacctgatcatcctgcctctggcctttggcaagagacagggcagagaattcatctggaacgacctgctgtccctggaaaccggcagcctgaagctggccaacggaagagtgatcgagaagacactgtacaacagaagaacccggcaggatgagcctgccctgttcgtggccctgaccttcgagcggcgggaggtcctggactcctccaatatcaaaccaatgaacctgatcggcgtggcaagaggcgaaaacatccccgccgtgatcgccctgaccgaccccgagggctgcccactgagccggtttaaggatagcctgggaaacccaacccacatcctgagaatcggcgagagctataaggagaagcagcggaccatccaggccaagaaggaggtggagcagcggagagccggcggctacagccggaagtacgccagcaaagccaagaatctggcagacgatatggtgagaaacaccgctagagatctgctgtactacgccgtgacccaggatgccatgctgatcttcgccaacctgagccggggcttcggccggcagggcaagcggaccttcatggccgagagacagtacacacggatggaggactggctgaccgccaagctggcctacgagggcctgagcaagacctacctgtccaagacactggcccagtacacctccaagacatgcagcaactgtgggtttaccatcaccagcgccgactacgacagggtgctggagaagctgaagaagacagcaacaggctggatgaccacaattaacggcaaggagctgaaggtggagggccagattacctactacaacagatacaagagacagaacgtagtcaaggacctgtccgtcgagctggatagactgagcgaagaatctgtgaacaacgacatctcctcctggacaaagggcagaagcggagaagctctgagcctcctgaagaaaagattctcccatagacccgtgcaggagaagttcgtgtgcctgaactgcggcttcgagacacacgcagccgagcaagccgccctgaacatcgccagatcctggctgttcctgcggagccaggagtacaagaaataccagacaaacaagacaaccggcaacaccgataagagagccttcgtcgagacctggcagtccttttaccggaagaagcttaaggaggtgtggaaacctgccgtgcggtctggcggatctggcggaggctcctaggcaggagcccgtgaccttcgaggacgtggccgtgtacttcacccagaacgagtgggtgatcctggaccccgcccagagggccctgtacagggaggtgatgctggagaactacgccaacgtggccagcctggccttcagcttcaccaggcccgtgctggtgagccagctggagaggggcgagctgccccccggcctggacccctgggagagggccagccccgaggccctgaggggcatctgcggatctggctccggcagcggccccaagaaaaagagaaaagtctaagctgccttctgcggggcttgccttctggccatgcccttcttctctcccttgcacctgtacctcttggtctttgaataaagcctgagtaggaaggctagcaaaaaaaaaaaaaaaaaaaaaaaaaaaaaaaaaaaaaaaaaaaaaaaaaaaaaaaaaaaaaaaaaaaaaaaaaaaaaaaa

SEQ ID NO: 16425 - RNA, 9485 nt, synthetic construct
  source 1..9485: mol_type = other RNA
aggaaataagagagaaaagaagagtaagaagaaatataagagccaccatggcccctaagaagaagcgtaaagtgagccggatggaacgcctcgtctacgaggtgcggcagaagtgcagaaacatcgaggacatctgcatctcctgcggatctctgaacgtgaccctggagcacccactgttcatcggcggcatgtgccagaactgtaaaaactgttttctggagtgtgcctatcaatacgacgatgacggctaccagagctactgcaccatctgttgcggcggaagagaggtgctgatgtgtggaaataacaactgctgccggtgcttctgcgtggaatgcgtggacctgctggtgggccccggcgccgcccaggccgctattaaggaagatccttggaactgctacatgtgcggccacaagggcacatacggcctgctgagacggagagaggactggcctagcagactgcagatgttcttcgccaataaccacgaccaggagttcgacccccctaaggtgtaccctcccgtccccgccgagaagagaaagcccatccgggtcctgagcctgttcgatggcatcgccaccggtctgctggtgctgaaggacctgggcatccaggtggataggtacattgcctccgaggtgtgcgaggactccatcaccgtgggaatggtgcgtcatcagggcaagatcatgtacgtgggcgacgtgcggagcgtgacacagaagcatatccaggagtggggccctttcgacctggtgatcggcggcagcccttgcaatgacctgagcatcgtgaacccagcccggaagggcctgtacgagggaaccggcagactgttcttcgagttttacagactgctgcacgacgcccggcctaaggaaggcgacgaccggcccttcttttggctgttcgagaatgtggtggccatgggagtcagcgacaagcgggatattagccggttcctggagagcaaccccgtgatgatcgatgccaaggaagtgagcgccgcccaccgggccagatacttctggggcaatctgcctggcatgaacagacccctggccagcaccgtgaacgacaagctggagctgcaggagtgcctggagcacggccggatcgccaagttcagcaaggtgagaaccatcaccacccgaagcaacagcatcaaacaaggcaaggaccagcactttcctgtgttcatgaacgagaaggaggacatcctgtggtgtaccgagatggagagagtgttcgggttcccagtccactacacagatgtcagcaacatgtctagactggccagacagagactgctgggaagaagctggtccgtccctgtgatcagacacctgttcgcccctctgaaggagtacttcgcctgcgtgagcagcggcaacagcaacgccaacagccggggccccagcttctctagcggcctggtgccactgtccctgagagggagccacatgggccccatggagatctacaaaaccgtgagcgcctggaagcggcagcctgtgcgcgtgctgagcctgtttcggaatatcgataaagtcctgaaaagcctgggattcctggagagcggctctggctccggcggtggcaccctgaagtacgtggaggatgtgacaaacgtggtcagacgggatgtggagaagtggggccccttcgatctggtgtacggcagcacccaacccctgggcagctcttgtgaccggtgccctggctggtacatgtttcagttccaccggatcctgcagtacgccctgccgagacaggagtcccagcggccattcttttggattttcatggacaacttgctgctgaccgaggatgaccaggaaactaccactcggttcctgcagaccgaagccgtgaccctgcaggacgtgagaggccgggactaccagaacgccatgcgggtgtggtccaacatccctggactgaaaagcaagcacgcacctctgacccctaaagaagaggagtacctgcaggcccaggtgcggagcagaagcaagctggacgcccctaaggtggatctgctggtgaagaattgcctcctgcccctgagagagtacttcaagtatttcagccagaatagtctgcccctgggaggcagcggcggcggcgccctggtgacatttgaggacgtcgccgtgcggttcacccaggaggaatgggctctgctggatccttctcagaaaatcctgtaccgggacgtgatgagagagacataccggaatctgacctccgtgggcatcaactgggaatgttgggaccttgaagcctgcttcagaagcctgggaagaaacctgagagtgcaggtggtgaagagaaagtgcgagctgaccaacagcggcccctgcgccgagggcggcccaagcagcggcgcccctcctcccagcggcggcagcccagccggctccccaacctctaccgaggagggcacctctgagtccgccacccccgagagcggccctggcacctccaccgagcccagcgagggcagcgcacccggcagccctgccggcagccccacctccacagaggagggaaccagcaccgagcccagcgaaggcagcgccccaggcaccagcaccgagcctagtgagcaggagattaaacggatcaacaagatcagaagaagacttgtgaaagacagcaacaccaagaaggccggcaagacaggccccatgaaaaccctgctggttagagtgatgacacccgatctgagagagcggctggaaaacctgagaaagaagcctgaaaatatcccccagcccatcagcaatacatctagagccaacctgaataagctgctgaccgattacaccgaaatgaagaaggcgatcctgcatgtgtactgggaagagttccagaaggaccctgtgggcctgatgagccgggtggcccagcctgccagcaagaagatcgatcagaacaagctgaaacctgagatggacgagaagggcaacctgaccaccgccggctttgcctgctctcagtgtggccagcccctgttcgtgtacaagctggagcaggtgtctgagaagggcaaggcttacaccaactacttcggacggtgcaatgtggccgagcacgaaaagctgatcctgctggcccagctgaagcccgagaaggatagcgacgaagccgtgacatatagcctgggaaagtttgggcagagggccctggatttctacagcattcatgtgaccaaggagtccacccaccccgtgaagcccctggcccagatcgccggaaacagatacgcctccggacctgtgggaaaggccctgagcgacgcatgtatgggcacaatcgcctccttcctgtctaagtaccaggacatcatcatcgaacaccagaaggtggtgaagggcaaccagaagagactggagagcctgcgggagctggccggcaaggaaaacctggaataccctagcgtgaccctgccacctcagcctcacaccaaggagggcgttgatgcctacaacgaagtgatcgcccgggtgcgaatgtgggtgaacctgaacctgtggcagaagctgaagctaagcagagatgatgccaagcctctgctgagactgaagggattcccttcctttcctctggtcgagagacaggccaacgaagtggactggtgggacatggtgtgtaacgtgaagaagctgatcaacgagaaaaaggaggatggcaaggtgttttggcagaatctggctggctacaagagacaggaagccctgagaccatacctgagcagcgaggaagatcggaagaagggaaagaaattcgctcggtaccagctgggcgacctgctgctgcacctggaaaagaagcacggcgaggactggggaaaggtgtacgacgaggcctgggagcggattgacaagaaagtggaaggcctgagcaagcacatcaagctggaagaggaacggagaagcgaggacgcccagagcaaggccgccctgaccgactggctgcgggctaaggccagcttcgtgatcgagggcctgaaggaggccgacaaggacgagttctgcagatgcgagctgaagctgcagaagtggtacggggacctgcggggaaagcccttcgccatcgaagccgagaacagcatcctggacatcagcggcttcagcaagcagtacaactgtgccttcatctggcagaaggacggcgtgaagaagctgaacctgtacctgatcatcaactacttcaagggcggcaagctgcggttcaagaagatcaaacctgaagccttcgaagccaacagattctacaccgtgatcaacaaaaagagcggcgagatcgtgcccatggaggtgaacttcaacttcgacgaccccaacctgatcatcctgcctctggcctttggcaagagacagggcagagaattcatctggaacgacctgctgtccctggaaaccggcagcctgaagctggccaacggaagagtgatcgagaagacactgtacaacagaagaacccggcaggatgagcctgccctgttcgtggccctgaccttcgagcggcgggaggtcctggactcctccaatatcaaaccaatgaacctgatcggcgtggcaagaggcgaaaacatccccgccgtgatcgccctgaccgaccccgagggctgcccactgagccggtttaaggatagcctgggaaacccaacccacatcctgagaatcggcgagagctataaggagaagcagcggaccatccaggccaagaaggaggtggagcagcggagagccggcggctacagccggaagtacgccagcaaagccaagaatctggcagacgatatggtgagaaacaccgctagagatctgctgtactacgccgtgacccaggatgccatgctgatcttcgccaacctgagccggggcttcggccggcagggcaagcggaccttcatggccgagagacagtacacacggatggaggactggctgaccgccaagctggcctacgagggcctgagcaagacctacctgtccaagacactggcccagtacacctccaagacatgcagcaactgtgggtttaccatcaccagcgccgactacgacagggtgctggagaagctgaagaagacagcaacaggctggatgaccacaattaacggcaaggagctgaaggtggagggccagattacctactacaacagatacaagagacagaacgtagtcaaggacctgtccgtcgagctggatagactgagcgaagaatctgtgaacaacgacatctcctcctggacaaagggcagaagcggagaagctctgagcctcctgaagaaaagattctcccatagacccgtgcaggagaagttcgtgtgcctgaactgcggcttcgagacacacgcagccgagcaagccgccctgaacatcgccagatcctggctgttcctgcggagccaggagtacaagaaataccagacaaacaagacaaccggcaacaccgataagagagccttcgtcgagacctggcagtccttttaccggaagaagcttaaggaggtgtggaaacctgccgtgcggtctggcggatctggcggaggctccaagcccgagctggtgagcttcgccgacgtggccgtgtacttcagcccccaggagtggggctgcctgaggcccgcccagagggccctgtacagggaggtgatgagggagacctacggcctgctgggcgccctgggcttccccggccccaagcccgccctgatcagctggatggagcaggagagcgaggcctggagccccgccgcccaggaccccgaggagggcgagagcctgggcggcgcccccggcggcccaagcagcggcgcccctcctcccagcggcggcagcccagccggctccccaacctctaccgaggagggcacctctgagtccgccacccccgagagcggccctggcacctccaccgagcccagcgagggcagcgcacccggcagccctgccggcagccccacctccacagaggagggaaccagcaccgagcccagcgaaggcagcgccccaggcaccagcaccgagcctagtgagcaggagattaaacggatcaacaagatcagaagaagacttgtgaaagacagcaacaccaagaaggccggcaagacaggccccatgaaaaccctgctggttagagtgatgacacccgatctgagagagcggctggaaaacctgagaaagaagcctgaaaatatcccccagcccatcagcaatacatctagagccaacctgaataagctgctgaccgattacaccgaaatgaagaaggcgatcctgcatgtgtactgggaagagttccagaaggaccctgtgggcctgatgagccgggtggcccagcctgccagcaagaagatcgatcagaacaagctgaaacctgagatggacgagaagggcaacctgaccaccgccggctttgcctgctctcagtgtggccagcccctgttcgtgtacaagctggagcaggtgtctgagaagggcaaggcttacaccaactacttcggacggtgcaatgtggccgagcacgaaaagctgatcctgctggcccagctgaagcccgagaaggatagcgacgaagccgtgacatatagcctgggaaagtttgggcagagggccctggatttctacagcattcatgtgaccaaggagtccacccaccccgtgaagcccctggcccagatcgccggaaacagatacgcctccggacctgtgggaaaggccctgagcgacgcatgtatgggcacaatcgcctccttcctgtctaagtaccaggacatcatcatcgaacaccagaaggtggtgaagggcaaccagaagagactggagagcctgcgggagctggccggcaaggaaaacctggaataccctagcgtgaccctgccacctcagcctcacaccaaggagggcgttgatgcctacaacgaagtgatcgcccgggtgcgaatgtgggtgaacctgaacctgtggcagaagctgaagctaagcagagatgatgccaagcctctgctgagactgaagggattcccttcctttcctctggtcgagagacaggccaacgaagtggactggtgggacatggtgtgtaacgtgaagaagctgatcaacgagaaaaaggaggatggcaaggtgttttggcagaatctggctggctacaagagacaggaagccctgagaccatacctgagcagcgaggaagatcggaagaagggaaagaaattcgctcggtaccagctgggcgacctgctgctgcacctggaaaagaagcacggcgaggactggggaaaggtgtacgacgaggcctgggagcggattgacaagaaagtggaaggcctgagcaagcacatcaagctggaagaggaacggagaagcgaggacgcccagagcaaggccgccctgaccgactggctgcgggctaaggccagcttcgtgatcgagggcctgaaggaggccgacaaggacgagttctgcagatgcgagctgaagctgcagaagtggtacggggacctgcggggaaagcccttcgccatcgaagccgagaacagcatcctggacatcagcggcttcagcaagcagtacaactgtgccttcatctggcagaaggacggcgtgaagaagctgaacctgtacctgatcatcaactacttcaagggcggcaagctgcggttcaagaagatcaaacctgaagccttcgaagccaacagattctacaccgtgatcaacaaaaagagcggcgagatcgtgcccatggaggtgaacttcaacttcgacgaccccaacctgatcatcctgcctctggcctttggcaagagacagggcagagaattcatctggaacgacctgctgtccctggaaaccggcagcctgaagctggccaacggaagagtgatcgagaagacactgtacaacagaagaacccggcaggatgagcctgccctgttcgtggccctgaccttcgagcggcgggaggtcctggactcctccaatatcaaaccaatgaacctgatcggcgtggcaagaggcgaaaacatccccgccgtgatcgccctgaccgaccccgagggctgcccactgagccggtttaaggatagcctgggaaacccaacccacatcctgagaatcggcgagagctataaggagaagcagcggaccatccaggccaagaaggaggtggagcagcggagagccggcggctacagccggaagtacgccagcaaagccaagaatctggcagacgatatggtgagaaacaccgctagagatctgctgtactacgccgtgacccaggatgccatgctgatcttcgccaacctgagccggggcttcggccggcagggcaagcggaccttcatggccgagagacagtacacacggatggaggactggctgaccgccaagctggcctacgagggcctgagcaagacctacctgtccaagacactggcccagtacacctccaagacatgcagcaactgtgggtttaccatcaccagcgccgactacgacagggtgctggagaagctgaagaagacagcaacaggctggatgaccacaattaacggcaaggagctgaaggtggagggccagattacctactacaacagatacaagagacagaacgtagtcaaggacctgtccgtcgagctggatagactgagcgaagaatctgtgaacaacgacatctcctcctggacaaagggcagaagcggagaagctctgagcctcctgaagaaaagattctcccatagacccgtgcaggagaagttcgtgtgcctgaactgcggcttcgagacacacgcagccgagcaagccgccctgaacatcgccagatcctggctgttcctgcggagccaggagtacaagaaataccagacaaacaagacaaccggcaacaccgataagagagccttcgtcgagacctggcagtccttttaccggaagaagcttaaggaggtgtggaaacctgccgtgcggtctggcggatctggcggaggctcctaagcccgagctggtgagcttcgccgacgtggccgtgtacttcagcccccaggagtggggctgcctgaggcccgcccagagggccctgtacagggaggtgatgagggagacctacggcctgctgggcgccctgggcttccccggccccaagcccgccctgatcagctggatggagcaggagagcgaggcctggagccccgccgcccaggaccccgaggagggcgagagcctgggcggcgcccccggatctggctccggcagcggccccaagaaaaagagaaaagtctaagctgccttctgcggggcttgccttctggccatgcccttcttctctcccttgcacctgtacctcttggtctttgaataaagcctgagtaggaaggctagcaaaaaaaaaaaaaaaaaaaaaaaaaaaaaaaaaaaaaaaaaaaaaaaaaaaaaaaaaaaaaaaaaaaaaaaaaaaaaaaa

SEQ ID NO: 16426 - RNA, 9485 nt, synthetic construct
  source 1..9485: mol_type = other RNA
aggaaataagagagaaaagaagagtaagaagaaatataagagccaccatggcccctaagaagaagcgtaaagtgagccggatggaacgcctcgtctacgaggtgcggcagaagtgcagaaacatcgaggacatctgcatctcctgcggatctctgaacgtgaccctggagcacccactgttcatcggcggcatgtgccagaactgtaaaaactgttttctggagtgtgcctatcaatacgacgatgacggctaccagagctactgcaccatctgttgcggcggaagagaggtgctgatgtgtggaaataacaactgctgccggtgcttctgcgtggaatgcgtggacctgctggtgggccccggcgccgcccaggccgctattaaggaagatccttggaactgctacatgtgcggccacaagggcacatacggcctgctgagacggagagaggactggcctagcagactgcagatgttcttcgccaataaccacgaccaggagttcgacccccctaaggtgtaccctcccgtccccgccgagaagagaaagcccatccgggtcctgagcctgttcgatggcatcgccaccggtctgctggtgctgaaggacctgggcatccaggtggataggtacattgcctccgaggtgtgcgaggactccatcaccgtgggaatggtgcgtcatcagggcaagatcatgtacgtgggcgacgtgcggagcgtgacacagaagcatatccaggagtggggccctttcgacctggtgatcggcggcagcccttgcaatgacctgagcatcgtgaacccagcccggaagggcctgtacgagggaaccggcagactgttcttcgagttttacagactgctgcacgacgcccggcctaaggaaggcgacgaccggcccttcttttggctgttcgagaatgtggtggccatgggagtcagcgacaagcgggatattagccggttcctggagagcaaccccgtgatgatcgatgccaaggaagtgagcgccgcccaccgggccagatacttctggggcaatctgcctggcatgaacagacccctggccagcaccgtgaacgacaagctggagctgcaggagtgcctggagcacggccggatcgccaagttcagcaaggtgagaaccatcaccacccgaagcaacagcatcaaacaaggcaaggaccagcactttcctgtgttcatgaacgagaaggaggacatcctgtggtgtaccgagatggagagagtgttcgggttcccagtccactacacagatgtcagcaacatgtctagactggccagacagagactgctgggaagaagctggtccgtccctgtgatcagacacctgttcgcccctctgaaggagtacttcgcctgcgtgagcagcggcaacagcaacgccaacagccggggccccagcttctctagcggcctggtgccactgtccctgagagggagccacatgggccccatggagatctacaaaaccgtgagcgcctggaagcggcagcctgtgcgcgtgctgagcctgtttcggaatatcgataaagtcctgaaaagcctgggattcctggagagcggctctggctccggcggtggcaccctgaagtacgtggaggatgtgacaaacgtggtcagacgggatgtggagaagtggggccccttcgatctggtgtacggcagcacccaacccctgggcagctcttgtgaccggtgccctggctggtacatgtttcagttccaccggatcctgcagtacgccctgccgagacaggagtcccagcggccattcttttggattttcatggacaacttgctgctgaccgaggatgaccaggaaactaccactcggttcctgcagaccgaagccgtgaccctgcaggacgtgagaggccgggactaccagaacgccatgcgggtgtggtccaacatccctggactgaaaagcaagcacgcacctctgacccctaaagaagaggagtacctgcaggcccaggtgcggagcagaagcaagctggacgcccctaaggtggatctgctggtgaagaattgcctcctgcccctgagagagtacttcaagtatttcagccagaatagtctgcccctgggaggcagcggcggcggcgccctggtgacatttgaggacgtcgccgtgcggttcacccaggaggaatgggctctgctggatccttctcagaaaatcctgtaccgggacgtgatgagagagacataccggaatctgacctccgtgggcatcaactgggaatgttgggaccttgaagcctgcttcagaagcctgggaagaaacctgagagtgcaggtggtgaagagaaagtgcgagctgaccaacagcggcccctgcgccgagggcggcccaagcagcggcgcccctcctcccagcggcggcagcccagccggctccccaacctctaccgaggagggcacctctgagtccgccacccccgagagcggccctggcacctccaccgagcccagcgagggcagcgcacccggcagccctgccggcagccccacctccacagaggagggaaccagcaccgagcccagcgaaggcagcgccccaggcaccagcaccgagcctagtgagcaggagattaaacggatcaacaagatcagaagaagacttgtgaaagacagcaacaccaagaaggccggcaagacaggccccatgaaaaccctgctggttagagtgatgacacccgatctgagagagcggctggaaaacctgagaaagaagcctgaaaatatcccccagcccatcagcaatacatctagagccaacctgaataagctgctgaccgattacaccgaaatgaagaaggcgatcctgcatgtgtactgggaagagttccagaaggaccctgtgggcctgatgagccgggtggcccagcctgccagcaagaagatcgatcagaacaagctgaaacctgagatggacgagaagggcaacctgaccaccgccggctttgcctgctctcagtgtggccagcccctgttcgtgtacaagctggagcaggtgtctgagaagggcaaggcttacaccaactacttcggacggtgcaatgtggccgagcacgaaaagctgatcctgctggcccagctgaagcccgagaaggatagcgacgaagccgtgacatatagcctgggaaagtttgggcagagggccctggatttctacagcattcatgtgaccaaggagtccacccaccccgtgaagcccctggcccagatcgccggaaacagatacgcctccggacctgtgggaaaggccctgagcgacgcatgtatgggcacaatcgcctccttcctgtctaagtaccaggacatcatcatcgaacaccagaaggtggtgaagggcaaccagaagagactggagagcctgcgggagctggccggcaaggaaaacctggaataccctagcgtgaccctgccacctcagcctcacaccaaggagggcgttgatgcctacaacgaagtgatcgcccgggtgcgaatgtgggtgaacctgaacctgtggcagaagctgaagctaagcagagatgatgccaagcctctgctgagactgaagggattcccttcctttcctctggtcgagagacaggccaacgaagtggactggtgggacatggtgtgtaacgtgaagaagctgatcaacgagaaaaaggaggatggcaaggtgttttggcagaatctggctggctacaagagacaggaagccctgagaccatacctgagcagcgaggaagatcggaagaagggaaagaaattcgctcggtaccagctgggcgacctgctgctgcacctggaaaagaagcacggcgaggactggggaaaggtgtacgacgaggcctgggagcggattgacaagaaagtggaaggcctgagcaagcacatcaagctggaagaggaacggagaagcgaggacgcccagagcaaggccgccctgaccgactggctgcgggctaaggccagcttcgtgatcgagggcctgaaggaggccgacaaggacgagttctgcagatgcgagctgaagctgcagaagtggtacggggacctgcggggaaagcccttcgccatcgaagccgagaacagcatcctggacatcagcggcttcagcaagcagtacaactgtgccttcatctggcagaaggacggcgtgaagaagctgaacctgtacctgatcatcaactacttcaagggcggcaagctgcggttcaagaagatcaaacctgaagccttcgaagccaacagattctacaccgtgatcaacaaaaagagcggcgagatcgtgcccatggaggtgaacttcaacttcgacgaccccaacctgatcatcctgcctctggcctttggcaagagacagggcagagaattcatctggaacgacctgctgtccctggaaaccggcagcctgaagctggccaacggaagagtgatcgagaagacactgtacaacagaagaacccggcaggatgagcctgccctgttcgtggccctgaccttcgagcggcgggaggtcctggactcctccaatatcaaaccaatgaacctgatcggcgtggcaagaggcgaaaacatccccgccgtgatcgccctgaccgaccccgagggctgcccactgagccggtttaaggatagcctgggaaacccaacccacatcctgagaatcggcgagagctataaggagaagcagcggaccatccaggccaagaaggaggtggagcagcggagagccggcggctacagccggaagtacgccagcaaagccaagaatctggcagacgatatggtgagaaacaccgctagagatctgctgtactacgccgtgacccaggatgccatgctgatcttcgccaacctgagccggggcttcggccggcagggcaagcggaccttcatggccgagagacagtacacacggatggaggactggctgaccgccaagctggcctacgagggcctgagcaagacctacctgtccaagacactggcccagtacacctccaagacatgcagcaactgtgggtttaccatcaccagcgccgactacgacagggtgctggagaagctgaagaagacagcaacaggctggatgaccacaattaacggcaaggagctgaaggtggagggccagattacctactacaacagatacaagagacagaacgtagtcaaggacctgtccgtcgagctggatagactgagcgaagaatctgtgaacaacgacatctcctcctggacaaagggcagaagcggagaagctctgagcctcctgaagaaaagattctcccatagacccgtgcaggagaagttcgtgtgcctgaactgcggcttcgagacacacgcagccgagcaagccgccctgaacatcgccagatcctggctgttcctgcggagccaggagtacaagaaataccagacaaacaagacaaccggcaacaccgataagagagccttcgtcgagacctggcagtccttttaccggaagaagcttaaggaggtgtggaaacctgccgtgcggtctggcggatctggcggaggctccatccagggccaggtgaacttcgaggacgtgttcgtgtacttcagccaggaggagtgggtgctgctggacgaggcccagaggctgctgtacagggacgtgatgctggagaacttcgccctgatggccagcctgggccacaccagcttcaccagccacaccgtggccagcctggtgatgggccccgactgggtggacgtgacccccgccgtggccaccggcaccctgagcggcagcggccccggcggcggcccaagcagcggcgcccctcctcccagcggcggcagcccagccggctccccaacctctaccgaggagggcacctctgagtccgccacccccgagagcggccctggcacctccaccgagcccagcgagggcagcgcacccggcagccctgccggcagccccacctccacagaggagggaaccagcaccgagcccagcgaaggcagcgccccaggcaccagcaccgagcctagtgagcaggagattaaacggatcaacaagatcagaagaagacttgtgaaagacagcaacaccaagaaggccggcaagacaggccccatgaaaaccctgctggttagagtgatgacacccgatctgagagagcggctggaaaacctgagaaagaagcctgaaaatatcccccagcccatcagcaatacatctagagccaacctgaataagctgctgaccgattacaccgaaatgaagaaggcgatcctgcatgtgtactgggaagagttccagaaggaccctgtgggcctgatgagccgggtggcccagcctgccagcaagaagatcgatcagaacaagctgaaacctgagatggacgagaagggcaacctgaccaccgccggctttgcctgctctcagtgtggccagcccctgttcgtgtacaagctggagcaggtgtctgagaagggcaaggcttacaccaactacttcggacggtgcaatgtggccgagcacgaaaagctgatcctgctggcccagctgaagcccgagaaggatagcgacgaagccgtgacatatagcctgggaaagtttgggcagagggccctggatttctacagcattcatgtgaccaaggagtccacccaccccgtgaagcccctggcccagatcgccggaaacagatacgcctccggacctgtgggaaaggccctgagcgacgcatgtatgggcacaatcgcctccttcctgtctaagtaccaggacatcatcatcgaacaccagaaggtggtgaagggcaaccagaagagactggagagcctgcgggagctggccggcaaggaaaacctggaataccctagcgtgaccctgccacctcagcctcacaccaaggagggcgttgatgcctacaacgaagtgatcgcccgggtgcgaatgtgggtgaacctgaacctgtggcagaagctgaagctaagcagagatgatgccaagcctctgctgagactgaagggattcccttcctttcctctggtcgagagacaggccaacgaagtggactggtgggacatggtgtgtaacgtgaagaagctgatcaacgagaaaaaggaggatggcaaggtgttttggcagaatctggctggctacaagagacaggaagccctgagaccatacctgagcagcgaggaagatcggaagaagggaaagaaattcgctcggtaccagctgggcgacctgctgctgcacctggaaaagaagcacggcgaggactggggaaaggtgtacgacgaggcctgggagcggattgacaagaaagtggaaggcctgagcaagcacatcaagctggaagaggaacggagaagcgaggacgcccagagcaaggccgccctgaccgactggctgcgggctaaggccagcttcgtgatcgagggcctgaaggaggccgacaaggacgagttctgcagatgcgagctgaagctgcagaagtggtacggggacctgcggggaaagcccttcgccatcgaagccgagaacagcatcctggacatcagcggcttcagcaagcagtacaactgtgccttcatctggcagaaggacggcgtgaagaagctgaacctgtacctgatcatcaactacttcaagggcggcaagctgcggttcaagaagatcaaacctgaagccttcgaagccaacagattctacaccgtgatcaacaaaaagagcggcgagatcgtgcccatggaggtgaacttcaacttcgacgaccccaacctgatcatcctgcctctggcctttggcaagagacagggcagagaattcatctggaacgacctgctgtccctggaaaccggcagcctgaagctggccaacggaagagtgatcgagaagacactgtacaacagaagaacccggcaggatgagcctgccctgttcgtggccctgaccttcgagcggcgggaggtcctggactcctccaatatcaaaccaatgaacctgatcggcgtggcaagaggcgaaaacatccccgccgtgatcgccctgaccgaccccgagggctgcccactgagccggtttaaggatagcctgggaaacccaacccacatcctgagaatcggcgagagctataaggagaagcagcggaccatccaggccaagaaggaggtggagcagcggagagccggcggctacagccggaagtacgccagcaaagccaagaatctggcagacgatatggtgagaaacaccgctagagatctgctgtactacgccgtgacccaggatgccatgctgatcttcgccaacctgagccggggcttcggccggcagggcaagcggaccttcatggccgagagacagtacacacggatggaggactggctgaccgccaagctggcctacgagggcctgagcaagacctacctgtccaagacactggcccagtacacctccaagacatgcagcaactgtgggtttaccatcaccagcgccgactacgacagggtgctggagaagctgaagaagacagcaacaggctggatgaccacaattaacggcaaggagctgaaggtggagggccagattacctactacaacagatacaagagacagaacgtagtcaaggacctgtccgtcgagctggatagactgagcgaagaatctgtgaacaacgacatctcctcctggacaaagggcagaagcggagaagctctgagcctcctgaagaaaagattctcccatagacccgtgcaggagaagttcgtgtgcctgaactgcggcttcgagacacacgcagccgagcaagccgccctgaacatcgccagatcctggctgttcctgcggagccaggagtacaagaaataccagacaaacaagacaaccggcaacaccgataagagagccttcgtcgagacctggcagtccttttaccggaagaagcttaaggaggtgtggaaacctgccgtgcggtctggcggatctggcggaggctcctatccagggccaggtgaacttcgaggacgtgttcgtgtacttcagccaggaggagtgggtgctgctggacgaggcccagaggctgctgtacagggacgtgatgctggagaacttcgccctgatggccagcctgggccacaccagcttcaccagccacaccgtggccagcctggtgatgggccccgactgggtggacgtgacccccgccgtggccaccggcaccctgagcggcagcggccccggcggatctggctccggcagcggccccaagaaaaagagaaaagtctaagctgccttctgcggggcttgccttctggccatgcccttcttctctcccttgcacctgtacctcttggtctttgaataaagcctgagtaggaaggctagcaaaaaaaaaaaaaaaaaaaaaaaaaaaaaaaaaaaaaaaaaaaaaaaaaaaaaaaaaaaaaaaaaaaaaaaaaaaaaaaa

SEQ ID NO: 16427 - RNA, 9485 nt, synthetic construct
  source 1..9485: mol_type = other RNA
aggaaataagagagaaaagaagagtaagaagaaatataagagccaccatggcccctaagaagaagcgtaaagtgagccggatggaacgcctcgtctacgaggtgcggcagaagtgcagaaacatcgaggacatctgcatctcctgcggatctctgaacgtgaccctggagcacccactgttcatcggcggcatgtgccagaactgtaaaaactgttttctggagtgtgcctatcaatacgacgatgacggctaccagagctactgcaccatctgttgcggcggaagagaggtgctgatgtgtggaaataacaactgctgccggtgcttctgcgtggaatgcgtggacctgctggtgggccccggcgccgcccaggccgctattaaggaagatccttggaactgctacatgtgcggccacaagggcacatacggcctgctgagacggagagaggactggcctagcagactgcagatgttcttcgccaataaccacgaccaggagttcgacccccctaaggtgtaccctcccgtccccgccgagaagagaaagcccatccgggtcctgagcctgttcgatggcatcgccaccggtctgctggtgctgaaggacctgggcatccaggtggataggtacattgcctccgaggtgtgcgaggactccatcaccgtgggaatggtgcgtcatcagggcaagatcatgtacgtgggcgacgtgcggagcgtgacacagaagcatatccaggagtggggccctttcgacctggtgatcggcggcagcccttgcaatgacctgagcatcgtgaacccagcccggaagggcctgtacgagggaaccggcagactgttcttcgagttttacagactgctgcacgacgcccggcctaaggaaggcgacgaccggcccttcttttggctgttcgagaatgtggtggccatgggagtcagcgacaagcgggatattagccggttcctggagagcaaccccgtgatgatcgatgccaaggaagtgagcgccgcccaccgggccagatacttctggggcaatctgcctggcatgaacagacccctggccagcaccgtgaacgacaagctggagctgcaggagtgcctggagcacggccggatcgccaagttcagcaaggtgagaaccatcaccacccgaagcaacagcatcaaacaaggcaaggaccagcactttcctgtgttcatgaacgagaaggaggacatcctgtggtgtaccgagatggagagagtgttcgggttcccagtccactacacagatgtcagcaacatgtctagactggccagacagagactgctgggaagaagctggtccgtccctgtgatcagacacctgttcgcccctctgaaggagtacttcgcctgcgtgagcagcggcaacagcaacgccaacagccggggccccagcttctctagcggcctggtgccactgtccctgagagggagccacatgggccccatggagatctacaaaaccgtgagcgcctggaagcggcagcctgtgcgcgtgctgagcctgtttcggaatatcgataaagtcctgaaaagcctgggattcctggagagcggctctggctccggcggtggcaccctgaagtacgtggaggatgtgacaaacgtggtcagacgggatgtggagaagtggggccccttcgatctggtgtacggcagcacccaacccctgggcagctcttgtgaccggtgccctggctggtacatgtttcagttccaccggatcctgcagtacgccctgccgagacaggagtcccagcggccattcttttggattttcatggacaacttgctgctgaccgaggatgaccaggaaactaccactcggttcctgcagaccgaagccgtgaccctgcaggacgtgagaggccgggactaccagaacgccatgcgggtgtggtccaacatccctggactgaaaagcaagcacgcacctctgacccctaaagaagaggagtacctgcaggcccaggtgcggagcagaagcaagctggacgcccctaaggtggatctgctggtgaagaattgcctcctgcccctgagagagtacttcaagtatttcagccagaatagtctgcccctgggaggcagcggcggcggcgccctggtgacatttgaggacgtcgccgtgcggttcacccaggaggaatgggctctgctggatccttctcagaaaatcctgtaccgggacgtgatgagagagacataccggaatctgacctccgtgggcatcaactgggaatgttgggaccttgaagcctgcttcagaagcctgggaagaaacctgagagtgcaggtggtgaagagaaagtgcgagctgaccaacagcggcccctgcgccgagggcggcccaagcagcggcgcccctcctcccagcggcggcagcccagccggctccccaacctctaccgaggagggcacctctgagtccgccacccccgagagcggccctggcacctccaccgagcccagcgagggcagcgcacccggcagccctgccggcagccccacctccacagaggagggaaccagcaccgagcccagcgaaggcagcgccccaggcaccagcaccgagcctagtgagcaggagattaaacggatcaacaagatcagaagaagacttgtgaaagacagcaacaccaagaaggccggcaagacaggccccatgaaaaccctgctggttagagtgatgacacccgatctgagagagcggctggaaaacctgagaaagaagcctgaaaatatcccccagcccatcagcaatacatctagagccaacctgaataagctgctgaccgattacaccgaaatgaagaaggcgatcctgcatgtgtactgggaagagttccagaaggaccctgtgggcctgatgagccgggtggcccagcctgccagcaagaagatcgatcagaacaagctgaaacctgagatggacgagaagggcaacctgaccaccgccggctttgcctgctctcagtgtggccagcccctgttcgtgtacaagctggagcaggtgtctgagaagggcaaggcttacaccaactacttcggacggtgcaatgtggccgagcacgaaaagctgatcctgctggcccagctgaagcccgagaaggatagcgacgaagccgtgacatatagcctgggaaagtttgggcagagggccctggatttctacagcattcatgtgaccaaggagtccacccaccccgtgaagcccctggcccagatcgccggaaacagatacgcctccggacctgtgggaaaggccctgagcgacgcatgtatgggcacaatcgcctccttcctgtctaagtaccaggacatcatcatcgaacaccagaaggtggtgaagggcaaccagaagagactggagagcctgcgggagctggccggcaaggaaaacctggaataccctagcgtgaccctgccacctcagcctcacaccaaggagggcgttgatgcctacaacgaagtgatcgcccgggtgcgaatgtgggtgaacctgaacctgtggcagaagctgaagctaagcagagatgatgccaagcctctgctgagactgaagggattcccttcctttcctctggtcgagagacaggccaacgaagtggactggtgggacatggtgtgtaacgtgaagaagctgatcaacgagaaaaaggaggatggcaaggtgttttggcagaatctggctggctacaagagacaggaagccctgagaccatacctgagcagcgaggaagatcggaagaagggaaagaaattcgctcggtaccagctgggcgacctgctgctgcacctggaaaagaagcacggcgaggactggggaaaggtgtacgacgaggcctgggagcggattgacaagaaagtggaaggcctgagcaagcacatcaagctggaagaggaacggagaagcgaggacgcccagagcaaggccgccctgaccgactggctgcgggctaaggccagcttcgtgatcgagggcctgaaggaggccgacaaggacgagttctgcagatgcgagctgaagctgcagaagtggtacggggacctgcggggaaagcccttcgccatcgaagccgagaacagcatcctggacatcagcggcttcagcaagcagtacaactgtgccttcatctggcagaaggacggcgtgaagaagctgaacctgtacctgatcatcaactacttcaagggcggcaagctgcggttcaagaagatcaaacctgaagccttcgaagccaacagattctacaccgtgatcaacaaaaagagcggcgagatcgtgcccatggaggtgaacttcaacttcgacgaccccaacctgatcatcctgcctctggcctttggcaagagacagggcagagaattcatctggaacgacctgctgtccctggaaaccggcagcctgaagctggccaacggaagagtgatcgagaagacactgtacaacagaagaacccggcaggatgagcctgccctgttcgtggccctgaccttcgagcggcgggaggtcctggactcctccaatatcaaaccaatgaacctgatcggcgtggcaagaggcgaaaacatccccgccgtgatcgccctgaccgaccccgagggctgcccactgagccggtttaaggatagcctgggaaacccaacccacatcctgagaatcggcgagagctataaggagaagcagcggaccatccaggccaagaaggaggtggagcagcggagagccggcggctacagccggaagtacgccagcaaagccaagaatctggcagacgatatggtgagaaacaccgctagagatctgctgtactacgccgtgacccaggatgccatgctgatcttcgccaacctgagccggggcttcggccggcagggcaagcggaccttcatggccgagagacagtacacacggatggaggactggctgaccgccaagctggcctacgagggcctgagcaagacctacctgtccaagacactggcccagtacacctccaagacatgcagcaactgtgggtttaccatcaccagcgccgactacgacagggtgctggagaagctgaagaagacagcaacaggctggatgaccacaattaacggcaaggagctgaaggtggagggccagattacctactacaacagatacaagagacagaacgtagtcaaggacctgtccgtcgagctggatagactgagcgaagaatctgtgaacaacgacatctcctcctggacaaagggcagaagcggagaagctctgagcctcctgaagaaaagattctcccatagacccgtgcaggagaagttcgtgtgcctgaactgcggcttcgagacacacgcagccgagcaagccgccctgaacatcgccagatcctggctgttcctgcggagccaggagtacaagaaataccagacaaacaagacaaccggcaacaccgataagagagccttcgtcgagacctggcagtccttttaccggaagaagcttaaggaggtgtggaaacctgccgtgcggtctggcggatctggcggaggctccgaggccctgcccgtggtgttcgaggacgtggccgtgtacttcaccagggaggagtggggcatgctggacaagaggcagaaggagctgtacagggacgtgatgaggatgaactacgagctgctggccagcctgggccccgccgccgccaagcccgacctgatcagcaagctggagaggaggaccgccccctggatcaaggaccccaacggccccaagctgggcaagggctgcccccccggcaagggcggcccaagcagcggcgcccctcctcccagcggcggcagcccagccggctccccaacctctaccgaggagggcacctctgagtccgccacccccgagagcggccctggcacctccaccgagcccagcgagggcagcgcacccggcagccctgccggcagccccacctccacagaggagggaaccagcaccgagcccagcgaaggcagcgccccaggcaccagcaccgagcctagtgagcaggagattaaacggatcaacaagatcagaagaagacttgtgaaagacagcaacaccaagaaggccggcaagacaggccccatgaaaaccctgctggttagagtgatgacacccgatctgagagagcggctggaaaacctgagaaagaagcctgaaaatatcccccagcccatcagcaatacatctagagccaacctgaataagctgctgaccgattacaccgaaatgaagaaggcgatcctgcatgtgtactgggaagagttccagaaggaccctgtgggcctgatgagccgggtggcccagcctgccagcaagaagatcgatcagaacaagctgaaacctgagatggacgagaagggcaacctgaccaccgccggctttgcctgctctcagtgtggccagcccctgttcgtgtacaagctggagcaggtgtctgagaagggcaaggcttacaccaactacttcggacggtgcaatgtggccgagcacgaaaagctgatcctgctggcccagctgaagcccgagaaggatagcgacgaagccgtgacatatagcctgggaaagtttgggcagagggccctggatttctacagcattcatgtgaccaaggagtccacccaccccgtgaagcccctggcccagatcgccggaaacagatacgcctccggacctgtgggaaaggccctgagcgacgcatgtatgggcacaatcgcctccttcctgtctaagtaccaggacatcatcatcgaacaccagaaggtggtgaagggcaaccagaagagactggagagcctgcgggagctggccggcaaggaaaacctggaataccctagcgtgaccctgccacctcagcctcacaccaaggagggcgttgatgcctacaacgaagtgatcgcccgggtgcgaatgtgggtgaacctgaacctgtggcagaagctgaagctaagcagagatgatgccaagcctctgctgagactgaagggattcccttcctttcctctggtcgagagacaggccaacgaagtggactggtgggacatggtgtgtaacgtgaagaagctgatcaacgagaaaaaggaggatggcaaggtgttttggcagaatctggctggctacaagagacaggaagccctgagaccatacctgagcagcgaggaagatcggaagaagggaaagaaattcgctcggtaccagctgggcgacctgctgctgcacctggaaaagaagcacggcgaggactggggaaaggtgtacgacgaggcctgggagcggattgacaagaaagtggaaggcctgagcaagcacatcaagctggaagaggaacggagaagcgaggacgcccagagcaaggccgccctgaccgactggctgcgggctaaggccagcttcgtgatcgagggcctgaaggaggccgacaaggacgagttctgcagatgcgagctgaagctgcagaagtggtacggggacctgcggggaaagcccttcgccatcgaagccgagaacagcatcctggacatcagcggcttcagcaagcagtacaactgtgccttcatctggcagaaggacggcgtgaagaagctgaacctgtacctgatcatcaactacttcaagggcggcaagctgcggttcaagaagatcaaacctgaagccttcgaagccaacagattctacaccgtgatcaacaaaaagagcggcgagatcgtgcccatggaggtgaacttcaacttcgacgaccccaacctgatcatcctgcctctggcctttggcaagagacagggcagagaattcatctggaacgacctgctgtccctggaaaccggcagcctgaagctggccaacggaagagtgatcgagaagacactgtacaacagaagaacccggcaggatgagcctgccctgttcgtggccctgaccttcgagcggcgggaggtcctggactcctccaatatcaaaccaatgaacctgatcggcgtggcaagaggcgaaaacatccccgccgtgatcgccctgaccgaccccgagggctgcccactgagccggtttaaggatagcctgggaaacccaacccacatcctgagaatcggcgagagctataaggagaagcagcggaccatccaggccaagaaggaggtggagcagcggagagccggcggctacagccggaagtacgccagcaaagccaagaatctggcagacgatatggtgagaaacaccgctagagatctgctgtactacgccgtgacccaggatgccatgctgatcttcgccaacctgagccggggcttcggccggcagggcaagcggaccttcatggccgagagacagtacacacggatggaggactggctgaccgccaagctggcctacgagggcctgagcaagacctacctgtccaagacactggcccagtacacctccaagacatgcagcaactgtgggtttaccatcaccagcgccgactacgacagggtgctggagaagctgaagaagacagcaacaggctggatgaccacaattaacggcaaggagctgaaggtggagggccagattacctactacaacagatacaagagacagaacgtagtcaaggacctgtccgtcgagctggatagactgagcgaagaatctgtgaacaacgacatctcctcctggacaaagggcagaagcggagaagctctgagcctcctgaagaaaagattctcccatagacccgtgcaggagaagttcgtgtgcctgaactgcggcttcgagacacacgcagccgagcaagccgccctgaacatcgccagatcctggctgttcctgcggagccaggagtacaagaaataccagacaaacaagacaaccggcaacaccgataagagagccttcgtcgagacctggcagtccttttaccggaagaagcttaaggaggtgtggaaacctgccgtgcggtctggcggatctggcggaggctcctgaggccctgcccgtggtgttcgaggacgtggccgtgtacttcaccagggaggagtggggcatgctggacaagaggcagaaggagctgtacagggacgtgatgaggatgaactacgagctgctggccagcctgggccccgccgccgccaagcccgacctgatcagcaagctggagaggaggaccgccccctggatcaaggaccccaacggccccaagctgggcaagggctgcccccccggcaagggatctggctccggcagcggccccaagaaaaagagaaaagtctaagctgccttctgcggggcttgccttctggccatgcccttcttctctcccttgcacctgtacctcttggtctttgaataaagcctgagtaggaaggctagcaaaaaaaaaaaaaaaaaaaaaaaaaaaaaaaaaaaaaaaaaaaaaaaaaaaaaaaaaaaaaaaaaaaaaaaaaaaaaaaa

SEQ ID NO: 16428 - RNA, 9485 nt, synthetic construct
  source 1..9485: mol_type = other RNA
aggaaataagagagaaaagaagagtaagaagaaatataagagccaccatggcccctaagaagaagcgtaaagtgagccggatggaacgcctcgtctacgaggtgcggcagaagtgcagaaacatcgaggacatctgcatctcctgcggatctctgaacgtgaccctggagcacccactgttcatcggcggcatgtgccagaactgtaaaaactgttttctggagtgtgcctatcaatacgacgatgacggctaccagagctactgcaccatctgttgcggcggaagagaggtgctgatgtgtggaaataacaactgctgccggtgcttctgcgtggaatgcgtggacctgctggtgggccccggcgccgcccaggccgctattaaggaagatccttggaactgctacatgtgcggccacaagggcacatacggcctgctgagacggagagaggactggcctagcagactgcagatgttcttcgccaataaccacgaccaggagttcgacccccctaaggtgtaccctcccgtccccgccgagaagagaaagcccatccgggtcctgagcctgttcgatggcatcgccaccggtctgctggtgctgaaggacctgggcatccaggtggataggtacattgcctccgaggtgtgcgaggactccatcaccgtgggaatggtgcgtcatcagggcaagatcatgtacgtgggcgacgtgcggagcgtgacacagaagcatatccaggagtggggccctttcgacctggtgatcggcggcagcccttgcaatgacctgagcatcgtgaacccagcccggaagggcctgtacgagggaaccggcagactgttcttcgagttttacagactgctgcacgacgcccggcctaaggaaggcgacgaccggcccttcttttggctgttcgagaatgtggtggccatgggagtcagcgacaagcgggatattagccggttcctggagagcaaccccgtgatgatcgatgccaaggaagtgagcgccgcccaccgggccagatacttctggggcaatctgcctggcatgaacagacccctggccagcaccgtgaacgacaagctggagctgcaggagtgcctggagcacggccggatcgccaagttcagcaaggtgagaaccatcaccacccgaagcaacagcatcaaacaaggcaaggaccagcactttcctgtgttcatgaacgagaaggaggacatcctgtggtgtaccgagatggagagagtgttcgggttcccagtccactacacagatgtcagcaacatgtctagactggccagacagagactgctgggaagaagctggtccgtccctgtgatcagacacctgttcgcccctctgaaggagtacttcgcctgcgtgagcagcggcaacagcaacgccaacagccggggccccagcttctctagcggcctggtgccactgtccctgagagggagccacatgggccccatggagatctacaaaaccgtgagcgcctggaagcggcagcctgtgcgcgtgctgagcctgtttcggaatatcgataaagtcctgaaaagcctgggattcctggagagcggctctggctccggcggtggcaccctgaagtacgtggaggatgtgacaaacgtggtcagacgggatgtggagaagtggggccccttcgatctggtgtacggcagcacccaacccctgggcagctcttgtgaccggtgccctggctggtacatgtttcagttccaccggatcctgcagtacgccctgccgagacaggagtcccagcggccattcttttggattttcatggacaacttgctgctgaccgaggatgaccaggaaactaccactcggttcctgcagaccgaagccgtgaccctgcaggacgtgagaggccgggactaccagaacgccatgcgggtgtggtccaacatccctggactgaaaagcaagcacgcacctctgacccctaaagaagaggagtacctgcaggcccaggtgcggagcagaagcaagctggacgcccctaaggtggatctgctggtgaagaattgcctcctgcccctgagagagtacttcaagtatttcagccagaatagtctgcccctgggaggcagcggcggcggcgccctggtgacatttgaggacgtcgccgtgcggttcacccaggaggaatgggctctgctggatccttctcagaaaatcctgtaccgggacgtgatgagagagacataccggaatctgacctccgtgggcatcaactgggaatgttgggaccttgaagcctgcttcagaagcctgggaagaaacctgagagtgcaggtggtgaagagaaagtgcgagctgaccaacagcggcccctgcgccgagggcggcccaagcagcggcgcccctcctcccagcggcggcagcccagccggctccccaacctctaccgaggagggcacctctgagtccgccacccccgagagcggccctggcacctccaccgagcccagcgagggcagcgcacccggcagccctgccggcagccccacctccacagaggagggaaccagcaccgagcccagcgaaggcagcgccccaggcaccagcaccgagcctagtgagcaggagattaaacggatcaacaagatcagaagaagacttgtgaaagacagcaacaccaagaaggccggcaagacaggccccatgaaaaccctgctggttagagtgatgacacccgatctgagagagcggctggaaaacctgagaaagaagcctgaaaatatcccccagcccatcagcaatacatctagagccaacctgaataagctgctgaccgattacaccgaaatgaagaaggcgatcctgcatgtgtactgggaagagttccagaaggaccctgtgggcctgatgagccgggtggcccagcctgccagcaagaagatcgatcagaacaagctgaaacctgagatggacgagaagggcaacctgaccaccgccggctttgcctgctctcagtgtggccagcccctgttcgtgtacaagctggagcaggtgtctgagaagggcaaggcttacaccaactacttcggacggtgcaatgtggccgagcacgaaaagctgatcctgctggcccagctgaagcccgagaaggatagcgacgaagccgtgacatatagcctgggaaagtttgggcagagggccctggatttctacagcattcatgtgaccaaggagtccacccaccccgtgaagcccctggcccagatcgccggaaacagatacgcctccggacctgtgggaaaggccctgagcgacgcatgtatgggcacaatcgcctccttcctgtctaagtaccaggacatcatcatcgaacaccagaaggtggtgaagggcaaccagaagagactggagagcctgcgggagctggccggcaaggaaaacctggaataccctagcgtgaccctgccacctcagcctcacaccaaggagggcgttgatgcctacaacgaagtgatcgcccgggtgcgaatgtgggtgaacctgaacctgtggcagaagctgaagctaagcagagatgatgccaagcctctgctgagactgaagggattcccttcctttcctctggtcgagagacaggccaacgaagtggactggtgggacatggtgtgtaacgtgaagaagctgatcaacgagaaaaaggaggatggcaaggtgttttggcagaatctggctggctacaagagacaggaagccctgagaccatacctgagcagcgaggaagatcggaagaagggaaagaaattcgctcggtaccagctgggcgacctgctgctgcacctggaaaagaagcacggcgaggactggggaaaggtgtacgacgaggcctgggagcggattgacaagaaagtggaaggcctgagcaagcacatcaagctggaagaggaacggagaagcgaggacgcccagagcaaggccgccctgaccgactggctgcgggctaaggccagcttcgtgatcgagggcctgaaggaggccgacaaggacgagttctgcagatgcgagctgaagctgcagaagtggtacggggacctgcggggaaagcccttcgccatcgaagccgagaacagcatcctggacatcagcggcttcagcaagcagtacaactgtgccttcatctggcagaaggacggcgtgaagaagctgaacctgtacctgatcatcaactacttcaagggcggcaagctgcggttcaagaagatcaaacctgaagccttcgaagccaacagattctacaccgtgatcaacaaaaagagcggcgagatcgtgcccatggaggtgaacttcaacttcgacgaccccaacctgatcatcctgcctctggcctttggcaagagacagggcagagaattcatctggaacgacctgctgtccctggaaaccggcagcctgaagctggccaacggaagagtgatcgagaagacactgtacaacagaagaacccggcaggatgagcctgccctgttcgtggccctgaccttcgagcggcgggaggtcctggactcctccaatatcaaaccaatgaacctgatcggcgtggcaagaggcgaaaacatccccgccgtgatcgccctgaccgaccccgagggctgcccactgagccggtttaaggatagcctgggaaacccaacccacatcctgagaatcggcgagagctataaggagaagcagcggaccatccaggccaagaaggaggtggagcagcggagagccggcggctacagccggaagtacgccagcaaagccaagaatctggcagacgatatggtgagaaacaccgctagagatctgctgtactacgccgtgacccaggatgccatgctgatcttcgccaacctgagccggggcttcggccggcagggcaagcggaccttcatggccgagagacagtacacacggatggaggactggctgaccgccaagctggcctacgagggcctgagcaagacctacctgtccaagacactggcccagtacacctccaagacatgcagcaactgtgggtttaccatcaccagcgccgactacgacagggtgctggagaagctgaagaagacagcaacaggctggatgaccacaattaacggcaaggagctgaaggtggagggccagattacctactacaacagatacaagagacagaacgtagtcaaggacctgtccgtcgagctggatagactgagcgaagaatctgtgaacaacgacatctcctcctggacaaagggcagaagcggagaagctctgagcctcctgaagaaaagattctcccatagacccgtgcaggagaagttcgtgtgcctgaactgcggcttcgagacacacgcagccgagcaagccgccctgaacatcgccagatcctggctgttcctgcggagccaggagtacaagaaataccagacaaacaagacaaccggcaacaccgataagagagccttcgtcgagacctggcagtccttttaccggaagaagcttaaggaggtgtggaaacctgccgtgcggtctggcggatctggcggaggctccaagcaggtgagcatcagcttcgaggacgtgaccgtggacttcagcagggaggagtggcagcacctggaccccgcccagaggtgcctgtacagggacgtgaccctggagaactacagccacctgctgagcgtgggctaccaggtgcccaagcccgagatcatcttccagctggagcagggcgagggcccctggatgctggagagggagaccccccaccagagctgcagcgacgaggacatcggcggcggcccaagcagcggcgcccctcctcccagcggcggcagcccagccggctccccaacctctaccgaggagggcacctctgagtccgccacccccgagagcggccctggcacctccaccgagcccagcgagggcagcgcacccggcagccctgccggcagccccacctccacagaggagggaaccagcaccgagcccagcgaaggcagcgccccaggcaccagcaccgagcctagtgagcaggagattaaacggatcaacaagatcagaagaagacttgtgaaagacagcaacaccaagaaggccggcaagacaggccccatgaaaaccctgctggttagagtgatgacacccgatctgagagagcggctggaaaacctgagaaagaagcctgaaaatatcccccagcccatcagcaatacatctagagccaacctgaataagctgctgaccgattacaccgaaatgaagaaggcgatcctgcatgtgtactgggaagagttccagaaggaccctgtgggcctgatgagccgggtggcccagcctgccagcaagaagatcgatcagaacaagctgaaacctgagatggacgagaagggcaacctgaccaccgccggctttgcctgctctcagtgtggccagcccctgttcgtgtacaagctggagcaggtgtctgagaagggcaaggcttacaccaactacttcggacggtgcaatgtggccgagcacgaaaagctgatcctgctggcccagctgaagcccgagaaggatagcgacgaagccgtgacatatagcctgggaaagtttgggcagagggccctggatttctacagcattcatgtgaccaaggagtccacccaccccgtgaagcccctggcccagatcgccggaaacagatacgcctccggacctgtgggaaaggccctgagcgacgcatgtatgggcacaatcgcctccttcctgtctaagtaccaggacatcatcatcgaacaccagaaggtggtgaagggcaaccagaagagactggagagcctgcgggagctggccggcaaggaaaacctggaataccctagcgtgaccctgccacctcagcctcacaccaaggagggcgttgatgcctacaacgaagtgatcgcccgggtgcgaatgtgggtgaacctgaacctgtggcagaagctgaagctaagcagagatgatgccaagcctctgctgagactgaagggattcccttcctttcctctggtcgagagacaggccaacgaagtggactggtgggacatggtgtgtaacgtgaagaagctgatcaacgagaaaaaggaggatggcaaggtgttttggcagaatctggctggctacaagagacaggaagccctgagaccatacctgagcagcgaggaagatcggaagaagggaaagaaattcgctcggtaccagctgggcgacctgctgctgcacctggaaaagaagcacggcgaggactggggaaaggtgtacgacgaggcctgggagcggattgacaagaaagtggaaggcctgagcaagcacatcaagctggaagaggaacggagaagcgaggacgcccagagcaaggccgccctgaccgactggctgcgggctaaggccagcttcgtgatcgagggcctgaaggaggccgacaaggacgagttctgcagatgcgagctgaagctgcagaagtggtacggggacctgcggggaaagcccttcgccatcgaagccgagaacagcatcctggacatcagcggcttcagcaagcagtacaactgtgccttcatctggcagaaggacggcgtgaagaagctgaacctgtacctgatcatcaactacttcaagggcggcaagctgcggttcaagaagatcaaacctgaagccttcgaagccaacagattctacaccgtgatcaacaaaaagagcggcgagatcgtgcccatggaggtgaacttcaacttcgacgaccccaacctgatcatcctgcctctggcctttggcaagagacagggcagagaattcatctggaacgacctgctgtccctggaaaccggcagcctgaagctggccaacggaagagtgatcgagaagacactgtacaacagaagaacccggcaggatgagcctgccctgttcgtggccctgaccttcgagcggcgggaggtcctggactcctccaatatcaaaccaatgaacctgatcggcgtggcaagaggcgaaaacatccccgccgtgatcgccctgaccgaccccgagggctgcccactgagccggtttaaggatagcctgggaaacccaacccacatcctgagaatcggcgagagctataaggagaagcagcggaccatccaggccaagaaggaggtggagcagcggagagccggcggctacagccggaagtacgccagcaaagccaagaatctggcagacgatatggtgagaaacaccgctagagatctgctgtactacgccgtgacccaggatgccatgctgatcttcgccaacctgagccggggcttcggccggcagggcaagcggaccttcatggccgagagacagtacacacggatggaggactggctgaccgccaagctggcctacgagggcctgagcaagacctacctgtccaagacactggcccagtacacctccaagacatgcagcaactgtgggtttaccatcaccagcgccgactacgacagggtgctggagaagctgaagaagacagcaacaggctggatgaccacaattaacggcaaggagctgaaggtggagggccagattacctactacaacagatacaagagacagaacgtagtcaaggacctgtccgtcgagctggatagactgagcgaagaatctgtgaacaacgacatctcctcctggacaaagggcagaagcggagaagctctgagcctcctgaagaaaagattctcccatagacccgtgcaggagaagttcgtgtgcctgaactgcggcttcgagacacacgcagccgagcaagccgccctgaacatcgccagatcctggctgttcctgcggagccaggagtacaagaaataccagacaaacaagacaaccggcaacaccgataagagagccttcgtcgagacctggcagtccttttaccggaagaagcttaaggaggtgtggaaacctgccgtgcggtctggcggatctggcggaggctcctaagcaggtgagcatcagcttcgaggacgtgaccgtggacttcagcagggaggagtggcagcacctggaccccgcccagaggtgcctgtacagggacgtgaccctggagaactacagccacctgctgagcgtgggctaccaggtgcccaagcccgagatcatcttccagctggagcagggcgagggcccctggatgctggagagggagaccccccaccagagctgcagcgacgaggacatcggcggatctggctccggcagcggccccaagaaaaagagaaaagtctaagctgccttctgcggggcttgccttctggccatgcccttcttctctcccttgcacctgtacctcttggtctttgaataaagcctgagtaggaaggctagcaaaaaaaaaaaaaaaaaaaaaaaaaaaaaaaaaaaaaaaaaaaaaaaaaaaaaaaaaaaaaaaaaaaaaaaaaaaaaaaa

SEQ ID NO: 16429 - RNA, 9485 nt, synthetic construct
  source 1..9485: mol_type = other RNA
aggaaataagagagaaaagaagagtaagaagaaatataagagccaccatggcccctaagaagaagcgtaaagtgagccggatggaacgcctcgtctacgaggtgcggcagaagtgcagaaacatcgaggacatctgcatctcctgcggatctctgaacgtgaccctggagcacccactgttcatcggcggcatgtgccagaactgtaaaaactgttttctggagtgtgcctatcaatacgacgatgacggctaccagagctactgcaccatctgttgcggcggaagagaggtgctgatgtgtggaaataacaactgctgccggtgcttctgcgtggaatgcgtggacctgctggtgggccccggcgccgcccaggccgctattaaggaagatccttggaactgctacatgtgcggccacaagggcacatacggcctgctgagacggagagaggactggcctagcagactgcagatgttcttcgccaataaccacgaccaggagttcgacccccctaaggtgtaccctcccgtccccgccgagaagagaaagcccatccgggtcctgagcctgttcgatggcatcgccaccggtctgctggtgctgaaggacctgggcatccaggtggataggtacattgcctccgaggtgtgcgaggactccatcaccgtgggaatggtgcgtcatcagggcaagatcatgtacgtgggcgacgtgcggagcgtgacacagaagcatatccaggagtggggccctttcgacctggtgatcggcggcagcccttgcaatgacctgagcatcgtgaacccagcccggaagggcctgtacgagggaaccggcagactgttcttcgagttttacagactgctgcacgacgcccggcctaaggaaggcgacgaccggcccttcttttggctgttcgagaatgtggtggccatgggagtcagcgacaagcgggatattagccggttcctggagagcaaccccgtgatgatcgatgccaaggaagtgagcgccgcccaccgggccagatacttctggggcaatctgcctggcatgaacagacccctggccagcaccgtgaacgacaagctggagctgcaggagtgcctggagcacggccggatcgccaagttcagcaaggtgagaaccatcaccacccgaagcaacagcatcaaacaaggcaaggaccagcactttcctgtgttcatgaacgagaaggaggacatcctgtggtgtaccgagatggagagagtgttcgggttcccagtccactacacagatgtcagcaacatgtctagactggccagacagagactgctgggaagaagctggtccgtccctgtgatcagacacctgttcgcccctctgaaggagtacttcgcctgcgtgagcagcggcaacagcaacgccaacagccggggccccagcttctctagcggcctggtgccactgtccctgagagggagccacatgggccccatggagatctacaaaaccgtgagcgcctggaagcggcagcctgtgcgcgtgctgagcctgtttcggaatatcgataaagtcctgaaaagcctgggattcctggagagcggctctggctccggcggtggcaccctgaagtacgtggaggatgtgacaaacgtggtcagacgggatgtggagaagtggggccccttcgatctggtgtacggcagcacccaacccctgggcagctcttgtgaccggtgccctggctggtacatgtttcagttccaccggatcctgcagtacgccctgccgagacaggagtcccagcggccattcttttggattttcatggacaacttgctgctgaccgaggatgaccaggaaactaccactcggttcctgcagaccgaagccgtgaccctgcaggacgtgagaggccgggactaccagaacgccatgcgggtgtggtccaacatccctggactgaaaagcaagcacgcacctctgacccctaaagaagaggagtacctgcaggcccaggtgcggagcagaagcaagctggacgcccctaaggtggatctgctggtgaagaattgcctcctgcccctgagagagtacttcaagtatttcagccagaatagtctgcccctgggaggcagcggcggcggcgccctggtgacatttgaggacgtcgccgtgcggttcacccaggaggaatgggctctgctggatccttctcagaaaatcctgtaccgggacgtgatgagagagacataccggaatctgacctccgtgggcatcaactgggaatgttgggaccttgaagcctgcttcagaagcctgggaagaaacctgagagtgcaggtggtgaagagaaagtgcgagctgaccaacagcggcccctgcgccgagggcggcccaagcagcggcgcccctcctcccagcggcggcagcccagccggctccccaacctctaccgaggagggcacctctgagtccgccacccccgagagcggccctggcacctccaccgagcccagcgagggcagcgcacccggcagccctgccggcagccccacctccacagaggagggaaccagcaccgagcccagcgaaggcagcgccccaggcaccagcaccgagcctagtgagcaggagattaaacggatcaacaagatcagaagaagacttgtgaaagacagcaacaccaagaaggccggcaagacaggccccatgaaaaccctgctggttagagtgatgacacccgatctgagagagcggctggaaaacctgagaaagaagcctgaaaatatcccccagcccatcagcaatacatctagagccaacctgaataagctgctgaccgattacaccgaaatgaagaaggcgatcctgcatgtgtactgggaagagttccagaaggaccctgtgggcctgatgagccgggtggcccagcctgccagcaagaagatcgatcagaacaagctgaaacctgagatggacgagaagggcaacctgaccaccgccggctttgcctgctctcagtgtggccagcccctgttcgtgtacaagctggagcaggtgtctgagaagggcaaggcttacaccaactacttcggacggtgcaatgtggccgagcacgaaaagctgatcctgctggcccagctgaagcccgagaaggatagcgacgaagccgtgacatatagcctgggaaagtttgggcagagggccctggatttctacagcattcatgtgaccaaggagtccacccaccccgtgaagcccctggcccagatcgccggaaacagatacgcctccggacctgtgggaaaggccctgagcgacgcatgtatgggcacaatcgcctccttcctgtctaagtaccaggacatcatcatcgaacaccagaaggtggtgaagggcaaccagaagagactggagagcctgcgggagctggccggcaaggaaaacctggaataccctagcgtgaccctgccacctcagcctcacaccaaggagggcgttgatgcctacaacgaagtgatcgcccgggtgcgaatgtgggtgaacctgaacctgtggcagaagctgaagctaagcagagatgatgccaagcctctgctgagactgaagggattcccttcctttcctctggtcgagagacaggccaacgaagtggactggtgggacatggtgtgtaacgtgaagaagctgatcaacgagaaaaaggaggatggcaaggtgttttggcagaatctggctggctacaagagacaggaagccctgagaccatacctgagcagcgaggaagatcggaagaagggaaagaaattcgctcggtaccagctgggcgacctgctgctgcacctggaaaagaagcacggcgaggactggggaaaggtgtacgacgaggcctgggagcggattgacaagaaagtggaaggcctgagcaagcacatcaagctggaagaggaacggagaagcgaggacgcccagagcaaggccgccctgaccgactggctgcgggctaaggccagcttcgtgatcgagggcctgaaggaggccgacaaggacgagttctgcagatgcgagctgaagctgcagaagtggtacggggacctgcggggaaagcccttcgccatcgaagccgagaacagcatcctggacatcagcggcttcagcaagcagtacaactgtgccttcatctggcagaaggacggcgtgaagaagctgaacctgtacctgatcatcaactacttcaagggcggcaagctgcggttcaagaagatcaaacctgaagccttcgaagccaacagattctacaccgtgatcaacaaaaagagcggcgagatcgtgcccatggaggtgaacttcaacttcgacgaccccaacctgatcatcctgcctctggcctttggcaagagacagggcagagaattcatctggaacgacctgctgtccctggaaaccggcagcctgaagctggccaacggaagagtgatcgagaagacactgtacaacagaagaacccggcaggatgagcctgccctgttcgtggccctgaccttcgagcggcgggaggtcctggactcctccaatatcaaaccaatgaacctgatcggcgtggcaagaggcgaaaacatccccgccgtgatcgccctgaccgaccccgagggctgcccactgagccggtttaaggatagcctgggaaacccaacccacatcctgagaatcggcgagagctataaggagaagcagcggaccatccaggccaagaaggaggtggagcagcggagagccggcggctacagccggaagtacgccagcaaagccaagaatctggcagacgatatggtgagaaacaccgctagagatctgctgtactacgccgtgacccaggatgccatgctgatcttcgccaacctgagccggggcttcggccggcagggcaagcggaccttcatggccgagagacagtacacacggatggaggactggctgaccgccaagctggcctacgagggcctgagcaagacctacctgtccaagacactggcccagtacacctccaagacatgcagcaactgtgggtttaccatcaccagcgccgactacgacagggtgctggagaagctgaagaagacagcaacaggctggatgaccacaattaacggcaaggagctgaaggtggagggccagattacctactacaacagatacaagagacagaacgtagtcaaggacctgtccgtcgagctggatagactgagcgaagaatctgtgaacaacgacatctcctcctggacaaagggcagaagcggagaagctctgagcctcctgaagaaaagattctcccatagacccgtgcaggagaagttcgtgtgcctgaactgcggcttcgagacacacgcagccgagcaagccgccctgaacatcgccagatcctggctgttcctgcggagccaggagtacaagaaataccagacaaacaagacaaccggcaacaccgataagagagccttcgtcgagacctggcagtccttttaccggaagaagcttaaggaggtgtggaaacctgccgtgcggtctggcggatctggcggaggctccagccagtgcctgctgaccttcggcgacgtgagcgtggacttcagccaggaggagtgggagtgcctggacagcgcccagagggccctgtacatcgacgtgatgctggagaactacagcaacctggtgagcgtggagaactacagcacctgcgacaccgtgcaccagcacgtgaacaccggcaaggagagctgccagaggaacaacctgggcgagatgctgaggaaccccagccacgacgccctgggcggcccaagcagcggcgcccctcctcccagcggcggcagcccagccggctccccaacctctaccgaggagggcacctctgagtccgccacccccgagagcggccctggcacctccaccgagcccagcgagggcagcgcacccggcagccctgccggcagccccacctccacagaggagggaaccagcaccgagcccagcgaaggcagcgccccaggcaccagcaccgagcctagtgagcaggagattaaacggatcaacaagatcagaagaagacttgtgaaagacagcaacaccaagaaggccggcaagacaggccccatgaaaaccctgctggttagagtgatgacacccgatctgagagagcggctggaaaacctgagaaagaagcctgaaaatatcccccagcccatcagcaatacatctagagccaacctgaataagctgctgaccgattacaccgaaatgaagaaggcgatcctgcatgtgtactgggaagagttccagaaggaccctgtgggcctgatgagccgggtggcccagcctgccagcaagaagatcgatcagaacaagctgaaacctgagatggacgagaagggcaacctgaccaccgccggctttgcctgctctcagtgtggccagcccctgttcgtgtacaagctggagcaggtgtctgagaagggcaaggcttacaccaactacttcggacggtgcaatgtggccgagcacgaaaagctgatcctgctggcccagctgaagcccgagaaggatagcgacgaagccgtgacatatagcctgggaaagtttgggcagagggccctggatttctacagcattcatgtgaccaaggagtccacccaccccgtgaagcccctggcccagatcgccggaaacagatacgcctccggacctgtgggaaaggccctgagcgacgcatgtatgggcacaatcgcctccttcctgtctaagtaccaggacatcatcatcgaacaccagaaggtggtgaagggcaaccagaagagactggagagcctgcgggagctggccggcaaggaaaacctggaataccctagcgtgaccctgccacctcagcctcacaccaaggagggcgttgatgcctacaacgaagtgatcgcccgggtgcgaatgtgggtgaacctgaacctgtggcagaagctgaagctaagcagagatgatgccaagcctctgctgagactgaagggattcccttcctttcctctggtcgagagacaggccaacgaagtggactggtgggacatggtgtgtaacgtgaagaagctgatcaacgagaaaaaggaggatggcaaggtgttttggcagaatctggctggctacaagagacaggaagccctgagaccatacctgagcagcgaggaagatcggaagaagggaaagaaattcgctcggtaccagctgggcgacctgctgctgcacctggaaaagaagcacggcgaggactggggaaaggtgtacgacgaggcctgggagcggattgacaagaaagtggaaggcctgagcaagcacatcaagctggaagaggaacggagaagcgaggacgcccagagcaaggccgccctgaccgactggctgcgggctaaggccagcttcgtgatcgagggcctgaaggaggccgacaaggacgagttctgcagatgcgagctgaagctgcagaagtggtacggggacctgcggggaaagcccttcgccatcgaagccgagaacagcatcctggacatcagcggcttcagcaagcagtacaactgtgccttcatctggcagaaggacggcgtgaagaagctgaacctgtacctgatcatcaactacttcaagggcggcaagctgcggttcaagaagatcaaacctgaagccttcgaagccaacagattctacaccgtgatcaacaaaaagagcggcgagatcgtgcccatggaggtgaacttcaacttcgacgaccccaacctgatcatcctgcctctggcctttggcaagagacagggcagagaattcatctggaacgacctgctgtccctggaaaccggcagcctgaagctggccaacggaagagtgatcgagaagacactgtacaacagaagaacccggcaggatgagcctgccctgttcgtggccctgaccttcgagcggcgggaggtcctggactcctccaatatcaaaccaatgaacctgatcggcgtggcaagaggcgaaaacatccccgccgtgatcgccctgaccgaccccgagggctgcccactgagccggtttaaggatagcctgggaaacccaacccacatcctgagaatcggcgagagctataaggagaagcagcggaccatccaggccaagaaggaggtggagcagcggagagccggcggctacagccggaagtacgccagcaaagccaagaatctggcagacgatatggtgagaaacaccgctagagatctgctgtactacgccgtgacccaggatgccatgctgatcttcgccaacctgagccggggcttcggccggcagggcaagcggaccttcatggccgagagacagtacacacggatggaggactggctgaccgccaagctggcctacgagggcctgagcaagacctacctgtccaagacactggcccagtacacctccaagacatgcagcaactgtgggtttaccatcaccagcgccgactacgacagggtgctggagaagctgaagaagacagcaacaggctggatgaccacaattaacggcaaggagctgaaggtggagggccagattacctactacaacagatacaagagacagaacgtagtcaaggacctgtccgtcgagctggatagactgagcgaagaatctgtgaacaacgacatctcctcctggacaaagggcagaagcggagaagctctgagcctcctgaagaaaagattctcccatagacccgtgcaggagaagttcgtgtgcctgaactgcggcttcgagacacacgcagccgagcaagccgccctgaacatcgccagatcctggctgttcctgcggagccaggagtacaagaaataccagacaaacaagacaaccggcaacaccgataagagagccttcgtcgagacctggcagtccttttaccggaagaagcttaaggaggtgtggaaacctgccgtgcggtctggcggatctggcggaggctcctagccagtgcctgctgaccttcggcgacgtgagcgtggacttcagccaggaggagtgggagtgcctggacagcgcccagagggccctgtacatcgacgtgatgctggagaactacagcaacctggtgagcgtggagaactacagcacctgcgacaccgtgcaccagcacgtgaacaccggcaaggagagctgccagaggaacaacctgggcgagatgctgaggaaccccagccacgacgccctgggatctggctccggcagcggccccaagaaaaagagaaaagtctaagctgccttctgcggggcttgccttctggccatgcccttcttctctcccttgcacctgtacctcttggtctttgaataaagcctgagtaggaaggctagcaaaaaaaaaaaaaaaaaaaaaaaaaaaaaaaaaaaaaaaaaaaaaaaaaaaaaaaaaaaaaaaaaaaaaaaaaaaaaaaa

SEQ ID NO: 16430 - RNA, 9485 nt, synthetic construct
  source 1..9485: mol_type = other RNA
aggaaataagagagaaaagaagagtaagaagaaatataagagccaccatggcccctaagaagaagcgtaaagtgagccggatggaacgcctcgtctacgaggtgcggcagaagtgcagaaacatcgaggacatctgcatctcctgcggatctctgaacgtgaccctggagcacccactgttcatcggcggcatgtgccagaactgtaaaaactgttttctggagtgtgcctatcaatacgacgatgacggctaccagagctactgcaccatctgttgcggcggaagagaggtgctgatgtgtggaaataacaactgctgccggtgcttctgcgtggaatgcgtggacctgctggtgggccccggcgccgcccaggccgctattaaggaagatccttggaactgctacatgtgcggccacaagggcacatacggcctgctgagacggagagaggactggcctagcagactgcagatgttcttcgccaataaccacgaccaggagttcgacccccctaaggtgtaccctcccgtccccgccgagaagagaaagcccatccgggtcctgagcctgttcgatggcatcgccaccggtctgctggtgctgaaggacctgggcatccaggtggataggtacattgcctccgaggtgtgcgaggactccatcaccgtgggaatggtgcgtcatcagggcaagatcatgtacgtgggcgacgtgcggagcgtgacacagaagcatatccaggagtggggccctttcgacctggtgatcggcggcagcccttgcaatgacctgagcatcgtgaacccagcccggaagggcctgtacgagggaaccggcagactgttcttcgagttttacagactgctgcacgacgcccggcctaaggaaggcgacgaccggcccttcttttggctgttcgagaatgtggtggccatgggagtcagcgacaagcgggatattagccggttcctggagagcaaccccgtgatgatcgatgccaaggaagtgagcgccgcccaccgggccagatacttctggggcaatctgcctggcatgaacagacccctggccagcaccgtgaacgacaagctggagctgcaggagtgcctggagcacggccggatcgccaagttcagcaaggtgagaaccatcaccacccgaagcaacagcatcaaacaaggcaaggaccagcactttcctgtgttcatgaacgagaaggaggacatcctgtggtgtaccgagatggagagagtgttcgggttcccagtccactacacagatgtcagcaacatgtctagactggccagacagagactgctgggaagaagctggtccgtccctgtgatcagacacctgttcgcccctctgaaggagtacttcgcctgcgtgagcagcggcaacagcaacgccaacagccggggccccagcttctctagcggcctggtgccactgtccctgagagggagccacatgggccccatggagatctacaaaaccgtgagcgcctggaagcggcagcctgtgcgcgtgctgagcctgtttcggaatatcgataaagtcctgaaaagcctgggattcctggagagcggctctggctccggcggtggcaccctgaagtacgtggaggatgtgacaaacgtggtcagacgggatgtggagaagtggggccccttcgatctggtgtacggcagcacccaacccctgggcagctcttgtgaccggtgccctggctggtacatgtttcagttccaccggatcctgcagtacgccctgccgagacaggagtcccagcggccattcttttggattttcatggacaacttgctgctgaccgaggatgaccaggaaactaccactcggttcctgcagaccgaagccgtgaccctgcaggacgtgagaggccgggactaccagaacgccatgcgggtgtggtccaacatccctggactgaaaagcaagcacgcacctctgacccctaaagaagaggagtacctgcaggcccaggtgcggagcagaagcaagctggacgcccctaaggtggatctgctggtgaagaattgcctcctgcccctgagagagtacttcaagtatttcagccagaatagtctgcccctgggaggcagcggcggcggcgccctggtgacatttgaggacgtcgccgtgcggttcacccaggaggaatgggctctgctggatccttctcagaaaatcctgtaccgggacgtgatgagagagacataccggaatctgacctccgtgggcatcaactgggaatgttgggaccttgaagcctgcttcagaagcctgggaagaaacctgagagtgcaggtggtgaagagaaagtgcgagctgaccaacagcggcccctgcgccgagggcggcccaagcagcggcgcccctcctcccagcggcggcagcccagccggctccccaacctctaccgaggagggcacctctgagtccgccacccccgagagcggccctggcacctccaccgagcccagcgagggcagcgcacccggcagccctgccggcagccccacctccacagaggagggaaccagcaccgagcccagcgaaggcagcgccccaggcaccagcaccgagcctagtgagcaggagattaaacggatcaacaagatcagaagaagacttgtgaaagacagcaacaccaagaaggccggcaagacaggccccatgaaaaccctgctggttagagtgatgacacccgatctgagagagcggctggaaaacctgagaaagaagcctgaaaatatcccccagcccatcagcaatacatctagagccaacctgaataagctgctgaccgattacaccgaaatgaagaaggcgatcctgcatgtgtactgggaagagttccagaaggaccctgtgggcctgatgagccgggtggcccagcctgccagcaagaagatcgatcagaacaagctgaaacctgagatggacgagaagggcaacctgaccaccgccggctttgcctgctctcagtgtggccagcccctgttcgtgtacaagctggagcaggtgtctgagaagggcaaggcttacaccaactacttcggacggtgcaatgtggccgagcacgaaaagctgatcctgctggcccagctgaagcccgagaaggatagcgacgaagccgtgacatatagcctgggaaagtttgggcagagggccctggatttctacagcattcatgtgaccaaggagtccacccaccccgtgaagcccctggcccagatcgccggaaacagatacgcctccggacctgtgggaaaggccctgagcgacgcatgtatgggcacaatcgcctccttcctgtctaagtaccaggacatcatcatcgaacaccagaaggtggtgaagggcaaccagaagagactggagagcctgcgggagctggccggcaaggaaaacctggaataccctagcgtgaccctgccacctcagcctcacaccaaggagggcgttgatgcctacaacgaagtgatcgcccgggtgcgaatgtgggtgaacctgaacctgtggcagaagctgaagctaagcagagatgatgccaagcctctgctgagactgaagggattcccttcctttcctctggtcgagagacaggccaacgaagtggactggtgggacatggtgtgtaacgtgaagaagctgatcaacgagaaaaaggaggatggcaaggtgttttggcagaatctggctggctacaagagacaggaagccctgagaccatacctgagcagcgaggaagatcggaagaagggaaagaaattcgctcggtaccagctgggcgacctgctgctgcacctggaaaagaagcacggcgaggactggggaaaggtgtacgacgaggcctgggagcggattgacaagaaagtggaaggcctgagcaagcacatcaagctggaagaggaacggagaagcgaggacgcccagagcaaggccgccctgaccgactggctgcgggctaaggccagcttcgtgatcgagggcctgaaggaggccgacaaggacgagttctgcagatgcgagctgaagctgcagaagtggtacggggacctgcggggaaagcccttcgccatcgaagccgagaacagcatcctggacatcagcggcttcagcaagcagtacaactgtgccttcatctggcagaaggacggcgtgaagaagctgaacctgtacctgatcatcaactacttcaagggcggcaagctgcggttcaagaagatcaaacctgaagccttcgaagccaacagattctacaccgtgatcaacaaaaagagcggcgagatcgtgcccatggaggtgaacttcaacttcgacgaccccaacctgatcatcctgcctctggcctttggcaagagacagggcagagaattcatctggaacgacctgctgtccctggaaaccggcagcctgaagctggccaacggaagagtgatcgagaagacactgtacaacagaagaacccggcaggatgagcctgccctgttcgtggccctgaccttcgagcggcgggaggtcctggactcctccaatatcaaaccaatgaacctgatcggcgtggcaagaggcgaaaacatccccgccgtgatcgccctgaccgaccccgagggctgcccactgagccggtttaaggatagcctgggaaacccaacccacatcctgagaatcggcgagagctataaggagaagcagcggaccatccaggccaagaaggaggtggagcagcggagagccggcggctacagccggaagtacgccagcaaagccaagaatctggcagacgatatggtgagaaacaccgctagagatctgctgtactacgccgtgacccaggatgccatgctgatcttcgccaacctgagccggggcttcggccggcagggcaagcggaccttcatggccgagagacagtacacacggatggaggactggctgaccgccaagctggcctacgagggcctgagcaagacctacctgtccaagacactggcccagtacacctccaagacatgcagcaactgtgggtttaccatcaccagcgccgactacgacagggtgctggagaagctgaagaagacagcaacaggctggatgaccacaattaacggcaaggagctgaaggtggagggccagattacctactacaacagatacaagagacagaacgtagtcaaggacctgtccgtcgagctggatagactgagcgaagaatctgtgaacaacgacatctcctcctggacaaagggcagaagcggagaagctctgagcctcctgaagaaaagattctcccatagacccgtgcaggagaagttcgtgtgcctgaactgcggcttcgagacacacgcagccgagcaagccgccctgaacatcgccagatcctggctgttcctgcggagccaggagtacaagaaataccagacaaacaagacaaccggcaacaccgataagagagccttcgtcgagacctggcagtccttttaccggaagaagcttaaggaggtgtggaaacctgccgtgcggtctggcggatctggcggaggctcccagcagggcagcgtgaccttccaggacgtggccgtggacttcagctgggaggagtggggccacctgggccccacccagaaggagctgtacagggaggtgatgctggagaactacggcaacctggtgtgcctgggcctggccgtgagcagccccgacgtggtgtgccagctggagaggggcgagggcccctggatgcccgagggcgacgcccccggcagcagcagggccggcagcagcaagcacggcggcccaagcagcggcgcccctcctcccagcggcggcagcccagccggctccccaacctctaccgaggagggcacctctgagtccgccacccccgagagcggccctggcacctccaccgagcccagcgagggcagcgcacccggcagccctgccggcagccccacctccacagaggagggaaccagcaccgagcccagcgaaggcagcgccccaggcaccagcaccgagcctagtgagcaggagattaaacggatcaacaagatcagaagaagacttgtgaaagacagcaacaccaagaaggccggcaagacaggccccatgaaaaccctgctggttagagtgatgacacccgatctgagagagcggctggaaaacctgagaaagaagcctgaaaatatcccccagcccatcagcaatacatctagagccaacctgaataagctgctgaccgattacaccgaaatgaagaaggcgatcctgcatgtgtactgggaagagttccagaaggaccctgtgggcctgatgagccgggtggcccagcctgccagcaagaagatcgatcagaacaagctgaaacctgagatggacgagaagggcaacctgaccaccgccggctttgcctgctctcagtgtggccagcccctgttcgtgtacaagctggagcaggtgtctgagaagggcaaggcttacaccaactacttcggacggtgcaatgtggccgagcacgaaaagctgatcctgctggcccagctgaagcccgagaaggatagcgacgaagccgtgacatatagcctgggaaagtttgggcagagggccctggatttctacagcattcatgtgaccaaggagtccacccaccccgtgaagcccctggcccagatcgccggaaacagatacgcctccggacctgtgggaaaggccctgagcgacgcatgtatgggcacaatcgcctccttcctgtctaagtaccaggacatcatcatcgaacaccagaaggtggtgaagggcaaccagaagagactggagagcctgcgggagctggccggcaaggaaaacctggaataccctagcgtgaccctgccacctcagcctcacaccaaggagggcgttgatgcctacaacgaagtgatcgcccgggtgcgaatgtgggtgaacctgaacctgtggcagaagctgaagctaagcagagatgatgccaagcctctgctgagactgaagggattcccttcctttcctctggtcgagagacaggccaacgaagtggactggtgggacatggtgtgtaacgtgaagaagctgatcaacgagaaaaaggaggatggcaaggtgttttggcagaatctggctggctacaagagacaggaagccctgagaccatacctgagcagcgaggaagatcggaagaagggaaagaaattcgctcggtaccagctgggcgacctgctgctgcacctggaaaagaagcacggcgaggactggggaaaggtgtacgacgaggcctgggagcggattgacaagaaagtggaaggcctgagcaagcacatcaagctggaagaggaacggagaagcgaggacgcccagagcaaggccgccctgaccgactggctgcgggctaaggccagcttcgtgatcgagggcctgaaggaggccgacaaggacgagttctgcagatgcgagctgaagctgcagaagtggtacggggacctgcggggaaagcccttcgccatcgaagccgagaacagcatcctggacatcagcggcttcagcaagcagtacaactgtgccttcatctggcagaaggacggcgtgaagaagctgaacctgtacctgatcatcaactacttcaagggcggcaagctgcggttcaagaagatcaaacctgaagccttcgaagccaacagattctacaccgtgatcaacaaaaagagcggcgagatcgtgcccatggaggtgaacttcaacttcgacgaccccaacctgatcatcctgcctctggcctttggcaagagacagggcagagaattcatctggaacgacctgctgtccctggaaaccggcagcctgaagctggccaacggaagagtgatcgagaagacactgtacaacagaagaacccggcaggatgagcctgccctgttcgtggccctgaccttcgagcggcgggaggtcctggactcctccaatatcaaaccaatgaacctgatcggcgtggcaagaggcgaaaacatccccgccgtgatcgccctgaccgaccccgagggctgcccactgagccggtttaaggatagcctgggaaacccaacccacatcctgagaatcggcgagagctataaggagaagcagcggaccatccaggccaagaaggaggtggagcagcggagagccggcggctacagccggaagtacgccagcaaagccaagaatctggcagacgatatggtgagaaacaccgctagagatctgctgtactacgccgtgacccaggatgccatgctgatcttcgccaacctgagccggggcttcggccggcagggcaagcggaccttcatggccgagagacagtacacacggatggaggactggctgaccgccaagctggcctacgagggcctgagcaagacctacctgtccaagacactggcccagtacacctccaagacatgcagcaactgtgggtttaccatcaccagcgccgactacgacagggtgctggagaagctgaagaagacagcaacaggctggatgaccacaattaacggcaaggagctgaaggtggagggccagattacctactacaacagatacaagagacagaacgtagtcaaggacctgtccgtcgagctggatagactgagcgaagaatctgtgaacaacgacatctcctcctggacaaagggcagaagcggagaagctctgagcctcctgaagaaaagattctcccatagacccgtgcaggagaagttcgtgtgcctgaactgcggcttcgagacacacgcagccgagcaagccgccctgaacatcgccagatcctggctgttcctgcggagccaggagtacaagaaataccagacaaacaagacaaccggcaacaccgataagagagccttcgtcgagacctggcagtccttttaccggaagaagcttaaggaggtgtggaaacctgccgtgcggtctggcggatctggcggaggctcctcagcagggcagcgtgaccttccaggacgtggccgtggacttcagctgggaggagtggggccacctgggccccacccagaaggagctgtacagggaggtgatgctggagaactacggcaacctggtgtgcctgggcctggccgtgagcagccccgacgtggtgtgccagctggagaggggcgagggcccctggatgcccgagggcgacgcccccggcagcagcagggccggcagcagcaagcacggatctggctccggcagcggccccaagaaaaagagaaaagtctaagctgccttctgcggggcttgccttctggccatgcccttcttctctcccttgcacctgtacctcttggtctttgaataaagcctgagtaggaaggctagcaaaaaaaaaaaaaaaaaaaaaaaaaaaaaaaaaaaaaaaaaaaaaaaaaaaaaaaaaaaaaaaaaaaaaaaaaaaaaaaa

SEQ ID NO: 16431 - RNA, 9485 nt, synthetic construct
  source 1..9485: mol_type = other RNA
aggaaataagagagaaaagaagagtaagaagaaatataagagccaccatggcccctaagaagaagcgtaaagtgagccggatggaacgcctcgtctacgaggtgcggcagaagtgcagaaacatcgaggacatctgcatctcctgcggatctctgaacgtgaccctggagcacccactgttcatcggcggcatgtgccagaactgtaaaaactgttttctggagtgtgcctatcaatacgacgatgacggctaccagagctactgcaccatctgttgcggcggaagagaggtgctgatgtgtggaaataacaactgctgccggtgcttctgcgtggaatgcgtggacctgctggtgggccccggcgccgcccaggccgctattaaggaagatccttggaactgctacatgtgcggccacaagggcacatacggcctgctgagacggagagaggactggcctagcagactgcagatgttcttcgccaataaccacgaccaggagttcgacccccctaaggtgtaccctcccgtccccgccgagaagagaaagcccatccgggtcctgagcctgttcgatggcatcgccaccggtctgctggtgctgaaggacctgggcatccaggtggataggtacattgcctccgaggtgtgcgaggactccatcaccgtgggaatggtgcgtcatcagggcaagatcatgtacgtgggcgacgtgcggagcgtgacacagaagcatatccaggagtggggccctttcgacctggtgatcggcggcagcccttgcaatgacctgagcatcgtgaacccagcccggaagggcctgtacgagggaaccggcagactgttcttcgagttttacagactgctgcacgacgcccggcctaaggaaggcgacgaccggcccttcttttggctgttcgagaatgtggtggccatgggagtcagcgacaagcgggatattagccggttcctggagagcaaccccgtgatgatcgatgccaaggaagtgagcgccgcccaccgggccagatacttctggggcaatctgcctggcatgaacagacccctggccagcaccgtgaacgacaagctggagctgcaggagtgcctggagcacggccggatcgccaagttcagcaaggtgagaaccatcaccacccgaagcaacagcatcaaacaaggcaaggaccagcactttcctgtgttcatgaacgagaaggaggacatcctgtggtgtaccgagatggagagagtgttcgggttcccagtccactacacagatgtcagcaacatgtctagactggccagacagagactgctgggaagaagctggtccgtccctgtgatcagacacctgttcgcccctctgaaggagtacttcgcctgcgtgagcagcggcaacagcaacgccaacagccggggccccagcttctctagcggcctggtgccactgtccctgagagggagccacatgggccccatggagatctacaaaaccgtgagcgcctggaagcggcagcctgtgcgcgtgctgagcctgtttcggaatatcgataaagtcctgaaaagcctgggattcctggagagcggctctggctccggcggtggcaccctgaagtacgtggaggatgtgacaaacgtggtcagacgggatgtggagaagtggggccccttcgatctggtgtacggcagcacccaacccctgggcagctcttgtgaccggtgccctggctggtacatgtttcagttccaccggatcctgcagtacgccctgccgagacaggagtcccagcggccattcttttggattttcatggacaacttgctgctgaccgaggatgaccaggaaactaccactcggttcctgcagaccgaagccgtgaccctgcaggacgtgagaggccgggactaccagaacgccatgcgggtgtggtccaacatccctggactgaaaagcaagcacgcacctctgacccctaaagaagaggagtacctgcaggcccaggtgcggagcagaagcaagctggacgcccctaaggtggatctgctggtgaagaattgcctcctgcccctgagagagtacttcaagtatttcagccagaatagtctgcccctgggaggcagcggcggcggcgccctggtgacatttgaggacgtcgccgtgcggttcacccaggaggaatgggctctgctggatccttctcagaaaatcctgtaccgggacgtgatgagagagacataccggaatctgacctccgtgggcatcaactgggaatgttgggaccttgaagcctgcttcagaagcctgggaagaaacctgagagtgcaggtggtgaagagaaagtgcgagctgaccaacagcggcccctgcgccgagggcggcccaagcagcggcgcccctcctcccagcggcggcagcccagccggctccccaacctctaccgaggagggcacctctgagtccgccacccccgagagcggccctggcacctccaccgagcccagcgagggcagcgcacccggcagccctgccggcagccccacctccacagaggagggaaccagcaccgagcccagcgaaggcagcgccccaggcaccagcaccgagcctagtgagcaggagattaaacggatcaacaagatcagaagaagacttgtgaaagacagcaacaccaagaaggccggcaagacaggccccatgaaaaccctgctggttagagtgatgacacccgatctgagagagcggctggaaaacctgagaaagaagcctgaaaatatcccccagcccatcagcaatacatctagagccaacctgaataagctgctgaccgattacaccgaaatgaagaaggcgatcctgcatgtgtactgggaagagttccagaaggaccctgtgggcctgatgagccgggtggcccagcctgccagcaagaagatcgatcagaacaagctgaaacctgagatggacgagaagggcaacctgaccaccgccggctttgcctgctctcagtgtggccagcccctgttcgtgtacaagctggagcaggtgtctgagaagggcaaggcttacaccaactacttcggacggtgcaatgtggccgagcacgaaaagctgatcctgctggcccagctgaagcccgagaaggatagcgacgaagccgtgacatatagcctgggaaagtttgggcagagggccctggatttctacagcattcatgtgaccaaggagtccacccaccccgtgaagcccctggcccagatcgccggaaacagatacgcctccggacctgtgggaaaggccctgagcgacgcatgtatgggcacaatcgcctccttcctgtctaagtaccaggacatcatcatcgaacaccagaaggtggtgaagggcaaccagaagagactggagagcctgcgggagctggccggcaaggaaaacctggaataccctagcgtgaccctgccacctcagcctcacaccaaggagggcgttgatgcctacaacgaagtgatcgcccgggtgcgaatgtgggtgaacctgaacctgtggcagaagctgaagctaagcagagatgatgccaagcctctgctgagactgaagggattcccttcctttcctctggtcgagagacaggccaacgaagtggactggtgggacatggtgtgtaacgtgaagaagctgatcaacgagaaaaaggaggatggcaaggtgttttggcagaatctggctggctacaagagacaggaagccctgagaccatacctgagcagcgaggaagatcggaagaagggaaagaaattcgctcggtaccagctgggcgacctgctgctgcacctggaaaagaagcacggcgaggactggggaaaggtgtacgacgaggcctgggagcggattgacaagaaagtggaaggcctgagcaagcacatcaagctggaagaggaacggagaagcgaggacgcccagagcaaggccgccctgaccgactggctgcgggctaaggccagcttcgtgatcgagggcctgaaggaggccgacaaggacgagttctgcagatgcgagctgaagctgcagaagtggtacggggacctgcggggaaagcccttcgccatcgaagccgagaacagcatcctggacatcagcggcttcagcaagcagtacaactgtgccttcatctggcagaaggacggcgtgaagaagctgaacctgtacctgatcatcaactacttcaagggcggcaagctgcggttcaagaagatcaaacctgaagccttcgaagccaacagattctacaccgtgatcaacaaaaagagcggcgagatcgtgcccatggaggtgaacttcaacttcgacgaccccaacctgatcatcctgcctctggcctttggcaagagacagggcagagaattcatctggaacgacctgctgtccctggaaaccggcagcctgaagctggccaacggaagagtgatcgagaagacactgtacaacagaagaacccggcaggatgagcctgccctgttcgtggccctgaccttcgagcggcgggaggtcctggactcctccaatatcaaaccaatgaacctgatcggcgtggcaagaggcgaaaacatccccgccgtgatcgccctgaccgaccccgagggctgcccactgagccggtttaaggatagcctgggaaacccaacccacatcctgagaatcggcgagagctataaggagaagcagcggaccatccaggccaagaaggaggtggagcagcggagagccggcggctacagccggaagtacgccagcaaagccaagaatctggcagacgatatggtgagaaacaccgctagagatctgctgtactacgccgtgacccaggatgccatgctgatcttcgccaacctgagccggggcttcggccggcagggcaagcggaccttcatggccgagagacagtacacacggatggaggactggctgaccgccaagctggcctacgagggcctgagcaagacctacctgtccaagacactggcccagtacacctccaagacatgcagcaactgtgggtttaccatcaccagcgccgactacgacagggtgctggagaagctgaagaagacagcaacaggctggatgaccacaattaacggcaaggagctgaaggtggagggccagattacctactacaacagatacaagagacagaacgtagtcaaggacctgtccgtcgagctggatagactgagcgaagaatctgtgaacaacgacatctcctcctggacaaagggcagaagcggagaagctctgagcctcctgaagaaaagattctcccatagacccgtgcaggagaagttcgtgtgcctgaactgcggcttcgagacacacgcagccgagcaagccgccctgaacatcgccagatcctggctgttcctgcggagccaggagtacaagaaataccagacaaacaagacaaccggcaacaccgataagagagccttcgtcgagacctggcagtccttttaccggaagaagcttaaggaggtgtggaaacctgccgtgcggtctggcggatctggcggaggctccgccctggagagcgtgaccttcagggacgtggccgtgttcttcagcagggacgagtggctgcacctgaaccccgcccagagggccctgtacagggaggtgatgctggacaactacagcgccctgctgagcctgggcatcctgttcagcaagcccaaggtgatcctgcagctggagcagggcgaggacccctggatggtggagaacggcgtgagccagagcgcctgcctgggctgggagagcctgggcggcccaagcagcggcgcccctcctcccagcggcggcagcccagccggctccccaacctctaccgaggagggcacctctgagtccgccacccccgagagcggccctggcacctccaccgagcccagcgagggcagcgcacccggcagccctgccggcagccccacctccacagaggagggaaccagcaccgagcccagcgaaggcagcgccccaggcaccagcaccgagcctagtgagcaggagattaaacggatcaacaagatcagaagaagacttgtgaaagacagcaacaccaagaaggccggcaagacaggccccatgaaaaccctgctggttagagtgatgacacccgatctgagagagcggctggaaaacctgagaaagaagcctgaaaatatcccccagcccatcagcaatacatctagagccaacctgaataagctgctgaccgattacaccgaaatgaagaaggcgatcctgcatgtgtactgggaagagttccagaaggaccctgtgggcctgatgagccgggtggcccagcctgccagcaagaagatcgatcagaacaagctgaaacctgagatggacgagaagggcaacctgaccaccgccggctttgcctgctctcagtgtggccagcccctgttcgtgtacaagctggagcaggtgtctgagaagggcaaggcttacaccaactacttcggacggtgcaatgtggccgagcacgaaaagctgatcctgctggcccagctgaagcccgagaaggatagcgacgaagccgtgacatatagcctgggaaagtttgggcagagggccctggatttctacagcattcatgtgaccaaggagtccacccaccccgtgaagcccctggcccagatcgccggaaacagatacgcctccggacctgtgggaaaggccctgagcgacgcatgtatgggcacaatcgcctccttcctgtctaagtaccaggacatcatcatcgaacaccagaaggtggtgaagggcaaccagaagagactggagagcctgcgggagctggccggcaaggaaaacctggaataccctagcgtgaccctgccacctcagcctcacaccaaggagggcgttgatgcctacaacgaagtgatcgcccgggtgcgaatgtgggtgaacctgaacctgtggcagaagctgaagctaagcagagatgatgccaagcctctgctgagactgaagggattcccttcctttcctctggtcgagagacaggccaacgaagtggactggtgggacatggtgtgtaacgtgaagaagctgatcaacgagaaaaaggaggatggcaaggtgttttggcagaatctggctggctacaagagacaggaagccctgagaccatacctgagcagcgaggaagatcggaagaagggaaagaaattcgctcggtaccagctgggcgacctgctgctgcacctggaaaagaagcacggcgaggactggggaaaggtgtacgacgaggcctgggagcggattgacaagaaagtggaaggcctgagcaagcacatcaagctggaagaggaacggagaagcgaggacgcccagagcaaggccgccctgaccgactggctgcgggctaaggccagcttcgtgatcgagggcctgaaggaggccgacaaggacgagttctgcagatgcgagctgaagctgcagaagtggtacggggacctgcggggaaagcccttcgccatcgaagccgagaacagcatcctggacatcagcggcttcagcaagcagtacaactgtgccttcatctggcagaaggacggcgtgaagaagctgaacctgtacctgatcatcaactacttcaagggcggcaagctgcggttcaagaagatcaaacctgaagccttcgaagccaacagattctacaccgtgatcaacaaaaagagcggcgagatcgtgcccatggaggtgaacttcaacttcgacgaccccaacctgatcatcctgcctctggcctttggcaagagacagggcagagaattcatctggaacgacctgctgtccctggaaaccggcagcctgaagctggccaacggaagagtgatcgagaagacactgtacaacagaagaacccggcaggatgagcctgccctgttcgtggccctgaccttcgagcggcgggaggtcctggactcctccaatatcaaaccaatgaacctgatcggcgtggcaagaggcgaaaacatccccgccgtgatcgccctgaccgaccccgagggctgcccactgagccggtttaaggatagcctgggaaacccaacccacatcctgagaatcggcgagagctataaggagaagcagcggaccatccaggccaagaaggaggtggagcagcggagagccggcggctacagccggaagtacgccagcaaagccaagaatctggcagacgatatggtgagaaacaccgctagagatctgctgtactacgccgtgacccaggatgccatgctgatcttcgccaacctgagccggggcttcggccggcagggcaagcggaccttcatggccgagagacagtacacacggatggaggactggctgaccgccaagctggcctacgagggcctgagcaagacctacctgtccaagacactggcccagtacacctccaagacatgcagcaactgtgggtttaccatcaccagcgccgactacgacagggtgctggagaagctgaagaagacagcaacaggctggatgaccacaattaacggcaaggagctgaaggtggagggccagattacctactacaacagatacaagagacagaacgtagtcaaggacctgtccgtcgagctggatagactgagcgaagaatctgtgaacaacgacatctcctcctggacaaagggcagaagcggagaagctctgagcctcctgaagaaaagattctcccatagacccgtgcaggagaagttcgtgtgcctgaactgcggcttcgagacacacgcagccgagcaagccgccctgaacatcgccagatcctggctgttcctgcggagccaggagtacaagaaataccagacaaacaagacaaccggcaacaccgataagagagccttcgtcgagacctggcagtccttttaccggaagaagcttaaggaggtgtggaaacctgccgtgcggtctggcggatctggcggaggctcctgccctggagagcgtgaccttcagggacgtggccgtgttcttcagcagggacgagtggctgcacctgaaccccgcccagagggccctgtacagggaggtgatgctggacaactacagcgccctgctgagcctgggcatcctgttcagcaagcccaaggtgatcctgcagctggagcagggcgaggacccctggatggtggagaacggcgtgagccagagcgcctgcctgggctgggagagcctgggatctggctccggcagcggccccaagaaaaagagaaaagtctaagctgccttctgcggggcttgccttctggccatgcccttcttctctcccttgcacctgtacctcttggtctttgaataaagcctgagtaggaaggctagcaaaaaaaaaaaaaaaaaaaaaaaaaaaaaaaaaaaaaaaaaaaaaaaaaaaaaaaaaaaaaaaaaaaaaaaaaaaaaaaa

SEQ ID NO: 16432 - RNA, 9485 nt, synthetic construct
  source 1..9485: mol_type = other RNA
aggaaataagagagaaaagaagagtaagaagaaatataagagccaccatggcccctaagaagaagcgtaaagtgagccggatggaacgcctcgtctacgaggtgcggcagaagtgcagaaacatcgaggacatctgcatctcctgcggatctctgaacgtgaccctggagcacccactgttcatcggcggcatgtgccagaactgtaaaaactgttttctggagtgtgcctatcaatacgacgatgacggctaccagagctactgcaccatctgttgcggcggaagagaggtgctgatgtgtggaaataacaactgctgccggtgcttctgcgtggaatgcgtggacctgctggtgggccccggcgccgcccaggccgctattaaggaagatccttggaactgctacatgtgcggccacaagggcacatacggcctgctgagacggagagaggactggcctagcagactgcagatgttcttcgccaataaccacgaccaggagttcgacccccctaaggtgtaccctcccgtccccgccgagaagagaaagcccatccgggtcctgagcctgttcgatggcatcgccaccggtctgctggtgctgaaggacctgggcatccaggtggataggtacattgcctccgaggtgtgcgaggactccatcaccgtgggaatggtgcgtcatcagggcaagatcatgtacgtgggcgacgtgcggagcgtgacacagaagcatatccaggagtggggccctttcgacctggtgatcggcggcagcccttgcaatgacctgagcatcgtgaacccagcccggaagggcctgtacgagggaaccggcagactgttcttcgagttttacagactgctgcacgacgcccggcctaaggaaggcgacgaccggcccttcttttggctgttcgagaatgtggtggccatgggagtcagcgacaagcgggatattagccggttcctggagagcaaccccgtgatgatcgatgccaaggaagtgagcgccgcccaccgggccagatacttctggggcaatctgcctggcatgaacagacccctggccagcaccgtgaacgacaagctggagctgcaggagtgcctggagcacggccggatcgccaagttcagcaaggtgagaaccatcaccacccgaagcaacagcatcaaacaaggcaaggaccagcactttcctgtgttcatgaacgagaaggaggacatcctgtggtgtaccgagatggagagagtgttcgggttcccagtccactacacagatgtcagcaacatgtctagactggccagacagagactgctgggaagaagctggtccgtccctgtgatcagacacctgttcgcccctctgaaggagtacttcgcctgcgtgagcagcggcaacagcaacgccaacagccggggccccagcttctctagcggcctggtgccactgtccctgagagggagccacatgggccccatggagatctacaaaaccgtgagcgcctggaagcggcagcctgtgcgcgtgctgagcctgtttcggaatatcgataaagtcctgaaaagcctgggattcctggagagcggctctggctccggcggtggcaccctgaagtacgtggaggatgtgacaaacgtggtcagacgggatgtggagaagtggggccccttcgatctggtgtacggcagcacccaacccctgggcagctcttgtgaccggtgccctggctggtacatgtttcagttccaccggatcctgcagtacgccctgccgagacaggagtcccagcggccattcttttggattttcatggacaacttgctgctgaccgaggatgaccaggaaactaccactcggttcctgcagaccgaagccgtgaccctgcaggacgtgagaggccgggactaccagaacgccatgcgggtgtggtccaacatccctggactgaaaagcaagcacgcacctctgacccctaaagaagaggagtacctgcaggcccaggtgcggagcagaagcaagctggacgcccctaaggtggatctgctggtgaagaattgcctcctgcccctgagagagtacttcaagtatttcagccagaatagtctgcccctgggaggcagcggcggcggcgccctggtgacatttgaggacgtcgccgtgcggttcacccaggaggaatgggctctgctggatccttctcagaaaatcctgtaccgggacgtgatgagagagacataccggaatctgacctccgtgggcatcaactgggaatgttgggaccttgaagcctgcttcagaagcctgggaagaaacctgagagtgcaggtggtgaagagaaagtgcgagctgaccaacagcggcccctgcgccgagggcggcccaagcagcggcgcccctcctcccagcggcggcagcccagccggctccccaacctctaccgaggagggcacctctgagtccgccacccccgagagcggccctggcacctccaccgagcccagcgagggcagcgcacccggcagccctgccggcagccccacctccacagaggagggaaccagcaccgagcccagcgaaggcagcgccccaggcaccagcaccgagcctagtgagcaggagattaaacggatcaacaagatcagaagaagacttgtgaaagacagcaacaccaagaaggccggcaagacaggccccatgaaaaccctgctggttagagtgatgacacccgatctgagagagcggctggaaaacctgagaaagaagcctgaaaatatcccccagcccatcagcaatacatctagagccaacctgaataagctgctgaccgattacaccgaaatgaagaaggcgatcctgcatgtgtactgggaagagttccagaaggaccctgtgggcctgatgagccgggtggcccagcctgccagcaagaagatcgatcagaacaagctgaaacctgagatggacgagaagggcaacctgaccaccgccggctttgcctgctctcagtgtggccagcccctgttcgtgtacaagctggagcaggtgtctgagaagggcaaggcttacaccaactacttcggacggtgcaatgtggccgagcacgaaaagctgatcctgctggcccagctgaagcccgagaaggatagcgacgaagccgtgacatatagcctgggaaagtttgggcagagggccctggatttctacagcattcatgtgaccaaggagtccacccaccccgtgaagcccctggcccagatcgccggaaacagatacgcctccggacctgtgggaaaggccctgagcgacgcatgtatgggcacaatcgcctccttcctgtctaagtaccaggacatcatcatcgaacaccagaaggtggtgaagggcaaccagaagagactggagagcctgcgggagctggccggcaaggaaaacctggaataccctagcgtgaccctgccacctcagcctcacaccaaggagggcgttgatgcctacaacgaagtgatcgcccgggtgcgaatgtgggtgaacctgaacctgtggcagaagctgaagctaagcagagatgatgccaagcctctgctgagactgaagggattcccttcctttcctctggtcgagagacaggccaacgaagtggactggtgggacatggtgtgtaacgtgaagaagctgatcaacgagaaaaaggaggatggcaaggtgttttggcagaatctggctggctacaagagacaggaagccctgagaccatacctgagcagcgaggaagatcggaagaagggaaagaaattcgctcggtaccagctgggcgacctgctgctgcacctggaaaagaagcacggcgaggactggggaaaggtgtacgacgaggcctgggagcggattgacaagaaagtggaaggcctgagcaagcacatcaagctggaagaggaacggagaagcgaggacgcccagagcaaggccgccctgaccgactggctgcgggctaaggccagcttcgtgatcgagggcctgaaggaggccgacaaggacgagttctgcagatgcgagctgaagctgcagaagtggtacggggacctgcggggaaagcccttcgccatcgaagccgagaacagcatcctggacatcagcggcttcagcaagcagtacaactgtgccttcatctggcagaaggacggcgtgaagaagctgaacctgtacctgatcatcaactacttcaagggcggcaagctgcggttcaagaagatcaaacctgaagccttcgaagccaacagattctacaccgtgatcaacaaaaagagcggcgagatcgtgcccatggaggtgaacttcaacttcgacgaccccaacctgatcatcctgcctctggcctttggcaagagacagggcagagaattcatctggaacgacctgctgtccctggaaaccggcagcctgaagctggccaacggaagagtgatcgagaagacactgtacaacagaagaacccggcaggatgagcctgccctgttcgtggccctgaccttcgagcggcgggaggtcctggactcctccaatatcaaaccaatgaacctgatcggcgtggcaagaggcgaaaacatccccgccgtgatcgccctgaccgaccccgagggctgcccactgagccggtttaaggatagcctgggaaacccaacccacatcctgagaatcggcgagagctataaggagaagcagcggaccatccaggccaagaaggaggtggagcagcggagagccggcggctacagccggaagtacgccagcaaagccaagaatctggcagacgatatggtgagaaacaccgctagagatctgctgtactacgccgtgacccaggatgccatgctgatcttcgccaacctgagccggggcttcggccggcagggcaagcggaccttcatggccgagagacagtacacacggatggaggactggctgaccgccaagctggcctacgagggcctgagcaagacctacctgtccaagacactggcccagtacacctccaagacatgcagcaactgtgggtttaccatcaccagcgccgactacgacagggtgctggagaagctgaagaagacagcaacaggctggatgaccacaattaacggcaaggagctgaaggtggagggccagattacctactacaacagatacaagagacagaacgtagtcaaggacctgtccgtcgagctggatagactgagcgaagaatctgtgaacaacgacatctcctcctggacaaagggcagaagcggagaagctctgagcctcctgaagaaaagattctcccatagacccgtgcaggagaagttcgtgtgcctgaactgcggcttcgagacacacgcagccgagcaagccgccctgaacatcgccagatcctggctgttcctgcggagccaggagtacaagaaataccagacaaacaagacaaccggcaacaccgataagagagccttcgtcgagacctggcagtccttttaccggaagaagcttaaggaggtgtggaaacctgccgtgcggtctggcggatctggcggaggctccagccaggacctggtgaccttcaaggacgtggccatcgacttcagccaggaggagtgggagtggctgaaccccgcccagaggaacctgtacaagaacatgatgctggagaactaccagaacctggtgagcctgggcctgtgcatcagcaagccctacgtgatcagcctgctggagcagggcaagggcccctgggagatgaagaccgagatgaccaggagccccttccccgacagcggcagcgtgggcggcccaagcagcggcgcccctcctcccagcggcggcagcccagccggctccccaacctctaccgaggagggcacctctgagtccgccacccccgagagcggccctggcacctccaccgagcccagcgagggcagcgcacccggcagccctgccggcagccccacctccacagaggagggaaccagcaccgagcccagcgaaggcagcgccccaggcaccagcaccgagcctagtgagcaggagattaaacggatcaacaagatcagaagaagacttgtgaaagacagcaacaccaagaaggccggcaagacaggccccatgaaaaccctgctggttagagtgatgacacccgatctgagagagcggctggaaaacctgagaaagaagcctgaaaatatcccccagcccatcagcaatacatctagagccaacctgaataagctgctgaccgattacaccgaaatgaagaaggcgatcctgcatgtgtactgggaagagttccagaaggaccctgtgggcctgatgagccgggtggcccagcctgccagcaagaagatcgatcagaacaagctgaaacctgagatggacgagaagggcaacctgaccaccgccggctttgcctgctctcagtgtggccagcccctgttcgtgtacaagctggagcaggtgtctgagaagggcaaggcttacaccaactacttcggacggtgcaatgtggccgagcacgaaaagctgatcctgctggcccagctgaagcccgagaaggatagcgacgaagccgtgacatatagcctgggaaagtttgggcagagggccctggatttctacagcattcatgtgaccaaggagtccacccaccccgtgaagcccctggcccagatcgccggaaacagatacgcctccggacctgtgggaaaggccctgagcgacgcatgtatgggcacaatcgcctccttcctgtctaagtaccaggacatcatcatcgaacaccagaaggtggtgaagggcaaccagaagagactggagagcctgcgggagctggccggcaaggaaaacctggaataccctagcgtgaccctgccacctcagcctcacaccaaggagggcgttgatgcctacaacgaagtgatcgcccgggtgcgaatgtgggtgaacctgaacctgtggcagaagctgaagctaagcagagatgatgccaagcctctgctgagactgaagggattcccttcctttcctctggtcgagagacaggccaacgaagtggactggtgggacatggtgtgtaacgtgaagaagctgatcaacgagaaaaaggaggatggcaaggtgttttggcagaatctggctggctacaagagacaggaagccctgagaccatacctgagcagcgaggaagatcggaagaagggaaagaaattcgctcggtaccagctgggcgacctgctgctgcacctggaaaagaagcacggcgaggactggggaaaggtgtacgacgaggcctgggagcggattgacaagaaagtggaaggcctgagcaagcacatcaagctggaagaggaacggagaagcgaggacgcccagagcaaggccgccctgaccgactggctgcgggctaaggccagcttcgtgatcgagggcctgaaggaggccgacaaggacgagttctgcagatgcgagctgaagctgcagaagtggtacggggacctgcggggaaagcccttcgccatcgaagccgagaacagcatcctggacatcagcggcttcagcaagcagtacaactgtgccttcatctggcagaaggacggcgtgaagaagctgaacctgtacctgatcatcaactacttcaagggcggcaagctgcggttcaagaagatcaaacctgaagccttcgaagccaacagattctacaccgtgatcaacaaaaagagcggcgagatcgtgcccatggaggtgaacttcaacttcgacgaccccaacctgatcatcctgcctctggcctttggcaagagacagggcagagaattcatctggaacgacctgctgtccctggaaaccggcagcctgaagctggccaacggaagagtgatcgagaagacactgtacaacagaagaacccggcaggatgagcctgccctgttcgtggccctgaccttcgagcggcgggaggtcctggactcctccaatatcaaaccaatgaacctgatcggcgtggcaagaggcgaaaacatccccgccgtgatcgccctgaccgaccccgagggctgcccactgagccggtttaaggatagcctgggaaacccaacccacatcctgagaatcggcgagagctataaggagaagcagcggaccatccaggccaagaaggaggtggagcagcggagagccggcggctacagccggaagtacgccagcaaagccaagaatctggcagacgatatggtgagaaacaccgctagagatctgctgtactacgccgtgacccaggatgccatgctgatcttcgccaacctgagccggggcttcggccggcagggcaagcggaccttcatggccgagagacagtacacacggatggaggactggctgaccgccaagctggcctacgagggcctgagcaagacctacctgtccaagacactggcccagtacacctccaagacatgcagcaactgtgggtttaccatcaccagcgccgactacgacagggtgctggagaagctgaagaagacagcaacaggctggatgaccacaattaacggcaaggagctgaaggtggagggccagattacctactacaacagatacaagagacagaacgtagtcaaggacctgtccgtcgagctggatagactgagcgaagaatctgtgaacaacgacatctcctcctggacaaagggcagaagcggagaagctctgagcctcctgaagaaaagattctcccatagacccgtgcaggagaagttcgtgtgcctgaactgcggcttcgagacacacgcagccgagcaagccgccctgaacatcgccagatcctggctgttcctgcggagccaggagtacaagaaataccagacaaacaagacaaccggcaacaccgataagagagccttcgtcgagacctggcagtccttttaccggaagaagcttaaggaggtgtggaaacctgccgtgcggtctggcggatctggcggaggctcctagccaggacctggtgaccttcaaggacgtggccatcgacttcagccaggaggagtgggagtggctgaaccccgcccagaggaacctgtacaagaacatgatgctggagaactaccagaacctggtgagcctgggcctgtgcatcagcaagccctacgtgatcagcctgctggagcagggcaagggcccctgggagatgaagaccgagatgaccaggagccccttccccgacagcggcagcgtgggatctggctccggcagcggccccaagaaaaagagaaaagtctaagctgccttctgcggggcttgccttctggccatgcccttcttctctcccttgcacctgtacctcttggtctttgaataaagcctgagtaggaaggctagcaaaaaaaaaaaaaaaaaaaaaaaaaaaaaaaaaaaaaaaaaaaaaaaaaaaaaaaaaaaaaaaaaaaaaaaaaaaaaaaa

SEQ ID NO: 16433 - RNA, 9485 nt, synthetic construct
  source 1..9485: mol_type = other RNA
aggaaataagagagaaaagaagagtaagaagaaatataagagccaccatggcccctaagaagaagcgtaaagtgagccggatggaacgcctcgtctacgaggtgcggcagaagtgcagaaacatcgaggacatctgcatctcctgcggatctctgaacgtgaccctggagcacccactgttcatcggcggcatgtgccagaactgtaaaaactgttttctggagtgtgcctatcaatacgacgatgacggctaccagagctactgcaccatctgttgcggcggaagagaggtgctgatgtgtggaaataacaactgctgccggtgcttctgcgtggaatgcgtggacctgctggtgggccccggcgccgcccaggccgctattaaggaagatccttggaactgctacatgtgcggccacaagggcacatacggcctgctgagacggagagaggactggcctagcagactgcagatgttcttcgccaataaccacgaccaggagttcgacccccctaaggtgtaccctcccgtccccgccgagaagagaaagcccatccgggtcctgagcctgttcgatggcatcgccaccggtctgctggtgctgaaggacctgggcatccaggtggataggtacattgcctccgaggtgtgcgaggactccatcaccgtgggaatggtgcgtcatcagggcaagatcatgtacgtgggcgacgtgcggagcgtgacacagaagcatatccaggagtggggccctttcgacctggtgatcggcggcagcccttgcaatgacctgagcatcgtgaacccagcccggaagggcctgtacgagggaaccggcagactgttcttcgagttttacagactgctgcacgacgcccggcctaaggaaggcgacgaccggcccttcttttggctgttcgagaatgtggtggccatgggagtcagcgacaagcgggatattagccggttcctggagagcaaccccgtgatgatcgatgccaaggaagtgagcgccgcccaccgggccagatacttctggggcaatctgcctggcatgaacagacccctggccagcaccgtgaacgacaagctggagctgcaggagtgcctggagcacggccggatcgccaagttcagcaaggtgagaaccatcaccacccgaagcaacagcatcaaacaaggcaaggaccagcactttcctgtgttcatgaacgagaaggaggacatcctgtggtgtaccgagatggagagagtgttcgggttcccagtccactacacagatgtcagcaacatgtctagactggccagacagagactgctgggaagaagctggtccgtccctgtgatcagacacctgttcgcccctctgaaggagtacttcgcctgcgtgagcagcggcaacagcaacgccaacagccggggccccagcttctctagcggcctggtgccactgtccctgagagggagccacatgggccccatggagatctacaaaaccgtgagcgcctggaagcggcagcctgtgcgcgtgctgagcctgtttcggaatatcgataaagtcctgaaaagcctgggattcctggagagcggctctggctccggcggtggcaccctgaagtacgtggaggatgtgacaaacgtggtcagacgggatgtggagaagtggggccccttcgatctggtgtacggcagcacccaacccctgggcagctcttgtgaccggtgccctggctggtacatgtttcagttccaccggatcctgcagtacgccctgccgagacaggagtcccagcggccattcttttggattttcatggacaacttgctgctgaccgaggatgaccaggaaactaccactcggttcctgcagaccgaagccgtgaccctgcaggacgtgagaggccgggactaccagaacgccatgcgggtgtggtccaacatccctggactgaaaagcaagcacgcacctctgacccctaaagaagaggagtacctgcaggcccaggtgcggagcagaagcaagctggacgcccctaaggtggatctgctggtgaagaattgcctcctgcccctgagagagtacttcaagtatttcagccagaatagtctgcccctgggaggcagcggcggcggcgccctggtgacatttgaggacgtcgccgtgcggttcacccaggaggaatgggctctgctggatccttctcagaaaatcctgtaccgggacgtgatgagagagacataccggaatctgacctccgtgggcatcaactgggaatgttgggaccttgaagcctgcttcagaagcctgggaagaaacctgagagtgcaggtggtgaagagaaagtgcgagctgaccaacagcggcccctgcgccgagggcggcccaagcagcggcgcccctcctcccagcggcggcagcccagccggctccccaacctctaccgaggagggcacctctgagtccgccacccccgagagcggccctggcacctccaccgagcccagcgagggcagcgcacccggcagccctgccggcagccccacctccacagaggagggaaccagcaccgagcccagcgaaggcagcgccccaggcaccagcaccgagcctagtgagcaggagattaaacggatcaacaagatcagaagaagacttgtgaaagacagcaacaccaagaaggccggcaagacaggccccatgaaaaccctgctggttagagtgatgacacccgatctgagagagcggctggaaaacctgagaaagaagcctgaaaatatcccccagcccatcagcaatacatctagagccaacctgaataagctgctgaccgattacaccgaaatgaagaaggcgatcctgcatgtgtactgggaagagttccagaaggaccctgtgggcctgatgagccgggtggcccagcctgccagcaagaagatcgatcagaacaagctgaaacctgagatggacgagaagggcaacctgaccaccgccggctttgcctgctctcagtgtggccagcccctgttcgtgtacaagctggagcaggtgtctgagaagggcaaggcttacaccaactacttcggacggtgcaatgtggccgagcacgaaaagctgatcctgctggcccagctgaagcccgagaaggatagcgacgaagccgtgacatatagcctgggaaagtttgggcagagggccctggatttctacagcattcatgtgaccaaggagtccacccaccccgtgaagcccctggcccagatcgccggaaacagatacgcctccggacctgtgggaaaggccctgagcgacgcatgtatgggcacaatcgcctccttcctgtctaagtaccaggacatcatcatcgaacaccagaaggtggtgaagggcaaccagaagagactggagagcctgcgggagctggccggcaaggaaaacctggaataccctagcgtgaccctgccacctcagcctcacaccaaggagggcgttgatgcctacaacgaagtgatcgcccgggtgcgaatgtgggtgaacctgaacctgtggcagaagctgaagctaagcagagatgatgccaagcctctgctgagactgaagggattcccttcctttcctctggtcgagagacaggccaacgaagtggactggtgggacatggtgtgtaacgtgaagaagctgatcaacgagaaaaaggaggatggcaaggtgttttggcagaatctggctggctacaagagacaggaagccctgagaccatacctgagcagcgaggaagatcggaagaagggaaagaaattcgctcggtaccagctgggcgacctgctgctgcacctggaaaagaagcacggcgaggactggggaaaggtgtacgacgaggcctgggagcggattgacaagaaagtggaaggcctgagcaagcacatcaagctggaagaggaacggagaagcgaggacgcccagagcaaggccgccctgaccgactggctgcgggctaaggccagcttcgtgatcgagggcctgaaggaggccgacaaggacgagttctgcagatgcgagctgaagctgcagaagtggtacggggacctgcggggaaagcccttcgccatcgaagccgagaacagcatcctggacatcagcggcttcagcaagcagtacaactgtgccttcatctggcagaaggacggcgtgaagaagctgaacctgtacctgatcatcaactacttcaagggcggcaagctgcggttcaagaagatcaaacctgaagccttcgaagccaacagattctacaccgtgatcaacaaaaagagcggcgagatcgtgcccatggaggtgaacttcaacttcgacgaccccaacctgatcatcctgcctctggcctttggcaagagacagggcagagaattcatctggaacgacctgctgtccctggaaaccggcagcctgaagctggccaacggaagagtgatcgagaagacactgtacaacagaagaacccggcaggatgagcctgccctgttcgtggccctgaccttcgagcggcgggaggtcctggactcctccaatatcaaaccaatgaacctgatcggcgtggcaagaggcgaaaacatccccgccgtgatcgccctgaccgaccccgagggctgcccactgagccggtttaaggatagcctgggaaacccaacccacatcctgagaatcggcgagagctataaggagaagcagcggaccatccaggccaagaaggaggtggagcagcggagagccggcggctacagccggaagtacgccagcaaagccaagaatctggcagacgatatggtgagaaacaccgctagagatctgctgtactacgccgtgacccaggatgccatgctgatcttcgccaacctgagccggggcttcggccggcagggcaagcggaccttcatggccgagagacagtacacacggatggaggactggctgaccgccaagctggcctacgagggcctgagcaagacctacctgtccaagacactggcccagtacacctccaagacatgcagcaactgtgggtttaccatcaccagcgccgactacgacagggtgctggagaagctgaagaagacagcaacaggctggatgaccacaattaacggcaaggagctgaaggtggagggccagattacctactacaacagatacaagagacagaacgtagtcaaggacctgtccgtcgagctggatagactgagcgaagaatctgtgaacaacgacatctcctcctggacaaagggcagaagcggagaagctctgagcctcctgaagaaaagattctcccatagacccgtgcaggagaagttcgtgtgcctgaactgcggcttcgagacacacgcagccgagcaagccgccctgaacatcgccagatcctggctgttcctgcggagccaggagtacaagaaataccagacaaacaagacaaccggcaacaccgataagagagccttcgtcgagacctggcagtccttttaccggaagaagcttaaggaggtgtggaaacctgccgtgcggtctggcggatctggcggaggctcccagcaggtgcccgtgaccttcgaggacgtggccgtgagcttcagccaggaggagtggaagtacctggacgaggcccagaagaacctgtactgggaggtgatgaaggagaactacgagaccctgatcagcctggacagcgaggtgcaccaggaggaggagagggagaagaaccaggaggagtaccccatgctgtggggcctgatcagcaggcagagcaggaagaaccacgagaaggtgtactggggcggcccaagcagcggcgcccctcctcccagcggcggcagcccagccggctccccaacctctaccgaggagggcacctctgagtccgccacccccgagagcggccctggcacctccaccgagcccagcgagggcagcgcacccggcagccctgccggcagccccacctccacagaggagggaaccagcaccgagcccagcgaaggcagcgccccaggcaccagcaccgagcctagtgagcaggagattaaacggatcaacaagatcagaagaagacttgtgaaagacagcaacaccaagaaggccggcaagacaggccccatgaaaaccctgctggttagagtgatgacacccgatctgagagagcggctggaaaacctgagaaagaagcctgaaaatatcccccagcccatcagcaatacatctagagccaacctgaataagctgctgaccgattacaccgaaatgaagaaggcgatcctgcatgtgtactgggaagagttccagaaggaccctgtgggcctgatgagccgggtggcccagcctgccagcaagaagatcgatcagaacaagctgaaacctgagatggacgagaagggcaacctgaccaccgccggctttgcctgctctcagtgtggccagcccctgttcgtgtacaagctggagcaggtgtctgagaagggcaaggcttacaccaactacttcggacggtgcaatgtggccgagcacgaaaagctgatcctgctggcccagctgaagcccgagaaggatagcgacgaagccgtgacatatagcctgggaaagtttgggcagagggccctggatttctacagcattcatgtgaccaaggagtccacccaccccgtgaagcccctggcccagatcgccggaaacagatacgcctccggacctgtgggaaaggccctgagcgacgcatgtatgggcacaatcgcctccttcctgtctaagtaccaggacatcatcatcgaacaccagaaggtggtgaagggcaaccagaagagactggagagcctgcgggagctggccggcaaggaaaacctggaataccctagcgtgaccctgccacctcagcctcacaccaaggagggcgttgatgcctacaacgaagtgatcgcccgggtgcgaatgtgggtgaacctgaacctgtggcagaagctgaagctaagcagagatgatgccaagcctctgctgagactgaagggattcccttcctttcctctggtcgagagacaggccaacgaagtggactggtgggacatggtgtgtaacgtgaagaagctgatcaacgagaaaaaggaggatggcaaggtgttttggcagaatctggctggctacaagagacaggaagccctgagaccatacctgagcagcgaggaagatcggaagaagggaaagaaattcgctcggtaccagctgggcgacctgctgctgcacctggaaaagaagcacggcgaggactggggaaaggtgtacgacgaggcctgggagcggattgacaagaaagtggaaggcctgagcaagcacatcaagctggaagaggaacggagaagcgaggacgcccagagcaaggccgccctgaccgactggctgcgggctaaggccagcttcgtgatcgagggcctgaaggaggccgacaaggacgagttctgcagatgcgagctgaagctgcagaagtggtacggggacctgcggggaaagcccttcgccatcgaagccgagaacagcatcctggacatcagcggcttcagcaagcagtacaactgtgccttcatctggcagaaggacggcgtgaagaagctgaacctgtacctgatcatcaactacttcaagggcggcaagctgcggttcaagaagatcaaacctgaagccttcgaagccaacagattctacaccgtgatcaacaaaaagagcggcgagatcgtgcccatggaggtgaacttcaacttcgacgaccccaacctgatcatcctgcctctggcctttggcaagagacagggcagagaattcatctggaacgacctgctgtccctggaaaccggcagcctgaagctggccaacggaagagtgatcgagaagacactgtacaacagaagaacccggcaggatgagcctgccctgttcgtggccctgaccttcgagcggcgggaggtcctggactcctccaatatcaaaccaatgaacctgatcggcgtggcaagaggcgaaaacatccccgccgtgatcgccctgaccgaccccgagggctgcccactgagccggtttaaggatagcctgggaaacccaacccacatcctgagaatcggcgagagctataaggagaagcagcggaccatccaggccaagaaggaggtggagcagcggagagccggcggctacagccggaagtacgccagcaaagccaagaatctggcagacgatatggtgagaaacaccgctagagatctgctgtactacgccgtgacccaggatgccatgctgatcttcgccaacctgagccggggcttcggccggcagggcaagcggaccttcatggccgagagacagtacacacggatggaggactggctgaccgccaagctggcctacgagggcctgagcaagacctacctgtccaagacactggcccagtacacctccaagacatgcagcaactgtgggtttaccatcaccagcgccgactacgacagggtgctggagaagctgaagaagacagcaacaggctggatgaccacaattaacggcaaggagctgaaggtggagggccagattacctactacaacagatacaagagacagaacgtagtcaaggacctgtccgtcgagctggatagactgagcgaagaatctgtgaacaacgacatctcctcctggacaaagggcagaagcggagaagctctgagcctcctgaagaaaagattctcccatagacccgtgcaggagaagttcgtgtgcctgaactgcggcttcgagacacacgcagccgagcaagccgccctgaacatcgccagatcctggctgttcctgcggagccaggagtacaagaaataccagacaaacaagacaaccggcaacaccgataagagagccttcgtcgagacctggcagtccttttaccggaagaagcttaaggaggtgtggaaacctgccgtgcggtctggcggatctggcggaggctcctcagcaggtgcccgtgaccttcgaggacgtggccgtgagcttcagccaggaggagtggaagtacctggacgaggcccagaagaacctgtactgggaggtgatgaaggagaactacgagaccctgatcagcctggacagcgaggtgcaccaggaggaggagagggagaagaaccaggaggagtaccccatgctgtggggcctgatcagcaggcagagcaggaagaaccacgagaaggtgtactggggatctggctccggcagcggccccaagaaaaagagaaaagtctaagctgccttctgcggggcttgccttctggccatgcccttcttctctcccttgcacctgtacctcttggtctttgaataaagcctgagtaggaaggctagcaaaaaaaaaaaaaaaaaaaaaaaaaaaaaaaaaaaaaaaaaaaaaaaaaaaaaaaaaaaaaaaaaaaaaaaaaaaaaaaa

SEQ ID NO: 16434 - RNA, 9485 nt, synthetic construct
  source 1..9485: mol_type = other RNA
aggaaataagagagaaaagaagagtaagaagaaatataagagccaccatggcccctaagaagaagcgtaaagtgagccggatggaacgcctcgtctacgaggtgcggcagaagtgcagaaacatcgaggacatctgcatctcctgcggatctctgaacgtgaccctggagcacccactgttcatcggcggcatgtgccagaactgtaaaaactgttttctggagtgtgcctatcaatacgacgatgacggctaccagagctactgcaccatctgttgcggcggaagagaggtgctgatgtgtggaaataacaactgctgccggtgcttctgcgtggaatgcgtggacctgctggtgggccccggcgccgcccaggccgctattaaggaagatccttggaactgctacatgtgcggccacaagggcacatacggcctgctgagacggagagaggactggcctagcagactgcagatgttcttcgccaataaccacgaccaggagttcgacccccctaaggtgtaccctcccgtccccgccgagaagagaaagcccatccgggtcctgagcctgttcgatggcatcgccaccggtctgctggtgctgaaggacctgggcatccaggtggataggtacattgcctccgaggtgtgcgaggactccatcaccgtgggaatggtgcgtcatcagggcaagatcatgtacgtgggcgacgtgcggagcgtgacacagaagcatatccaggagtggggccctttcgacctggtgatcggcggcagcccttgcaatgacctgagcatcgtgaacccagcccggaagggcctgtacgagggaaccggcagactgttcttcgagttttacagactgctgcacgacgcccggcctaaggaaggcgacgaccggcccttcttttggctgttcgagaatgtggtggccatgggagtcagcgacaagcgggatattagccggttcctggagagcaaccccgtgatgatcgatgccaaggaagtgagcgccgcccaccgggccagatacttctggggcaatctgcctggcatgaacagacccctggccagcaccgtgaacgacaagctggagctgcaggagtgcctggagcacggccggatcgccaagttcagcaaggtgagaaccatcaccacccgaagcaacagcatcaaacaaggcaaggaccagcactttcctgtgttcatgaacgagaaggaggacatcctgtggtgtaccgagatggagagagtgttcgggttcccagtccactacacagatgtcagcaacatgtctagactggccagacagagactgctgggaagaagctggtccgtccctgtgatcagacacctgttcgcccctctgaaggagtacttcgcctgcgtgagcagcggcaacagcaacgccaacagccggggccccagcttctctagcggcctggtgccactgtccctgagagggagccacatgggccccatggagatctacaaaaccgtgagcgcctggaagcggcagcctgtgcgcgtgctgagcctgtttcggaatatcgataaagtcctgaaaagcctgggattcctggagagcggctctggctccggcggtggcaccctgaagtacgtggaggatgtgacaaacgtggtcagacgggatgtggagaagtggggccccttcgatctggtgtacggcagcacccaacccctgggcagctcttgtgaccggtgccctggctggtacatgtttcagttccaccggatcctgcagtacgccctgccgagacaggagtcccagcggccattcttttggattttcatggacaacttgctgctgaccgaggatgaccaggaaactaccactcggttcctgcagaccgaagccgtgaccctgcaggacgtgagaggccgggactaccagaacgccatgcgggtgtggtccaacatccctggactgaaaagcaagcacgcacctctgacccctaaagaagaggagtacctgcaggcccaggtgcggagcagaagcaagctggacgcccctaaggtggatctgctggtgaagaattgcctcctgcccctgagagagtacttcaagtatttcagccagaatagtctgcccctgggaggcagcggcggcggcgccctggtgacatttgaggacgtcgccgtgcggttcacccaggaggaatgggctctgctggatccttctcagaaaatcctgtaccgggacgtgatgagagagacataccggaatctgacctccgtgggcatcaactgggaatgttgggaccttgaagcctgcttcagaagcctgggaagaaacctgagagtgcaggtggtgaagagaaagtgcgagctgaccaacagcggcccctgcgccgagggcggcccaagcagcggcgcccctcctcccagcggcggcagcccagccggctccccaacctctaccgaggagggcacctctgagtccgccacccccgagagcggccctggcacctccaccgagcccagcgagggcagcgcacccggcagccctgccggcagccccacctccacagaggagggaaccagcaccgagcccagcgaaggcagcgccccaggcaccagcaccgagcctagtgagcaggagattaaacggatcaacaagatcagaagaagacttgtgaaagacagcaacaccaagaaggccggcaagacaggccccatgaaaaccctgctggttagagtgatgacacccgatctgagagagcggctggaaaacctgagaaagaagcctgaaaatatcccccagcccatcagcaatacatctagagccaacctgaataagctgctgaccgattacaccgaaatgaagaaggcgatcctgcatgtgtactgggaagagttccagaaggaccctgtgggcctgatgagccgggtggcccagcctgccagcaagaagatcgatcagaacaagctgaaacctgagatggacgagaagggcaacctgaccaccgccggctttgcctgctctcagtgtggccagcccctgttcgtgtacaagctggagcaggtgtctgagaagggcaaggcttacaccaactacttcggacggtgcaatgtggccgagcacgaaaagctgatcctgctggcccagctgaagcccgagaaggatagcgacgaagccgtgacatatagcctgggaaagtttgggcagagggccctggatttctacagcattcatgtgaccaaggagtccacccaccccgtgaagcccctggcccagatcgccggaaacagatacgcctccggacctgtgggaaaggccctgagcgacgcatgtatgggcacaatcgcctccttcctgtctaagtaccaggacatcatcatcgaacaccagaaggtggtgaagggcaaccagaagagactggagagcctgcgggagctggccggcaaggaaaacctggaataccctagcgtgaccctgccacctcagcctcacaccaaggagggcgttgatgcctacaacgaagtgatcgcccgggtgcgaatgtgggtgaacctgaacctgtggcagaagctgaagctaagcagagatgatgccaagcctctgctgagactgaagggattcccttcctttcctctggtcgagagacaggccaacgaagtggactggtgggacatggtgtgtaacgtgaagaagctgatcaacgagaaaaaggaggatggcaaggtgttttggcagaatctggctggctacaagagacaggaagccctgagaccatacctgagcagcgaggaagatcggaagaagggaaagaaattcgctcggtaccagctgggcgacctgctgctgcacctggaaaagaagcacggcgaggactggggaaaggtgtacgacgaggcctgggagcggattgacaagaaagtggaaggcctgagcaagcacatcaagctggaagaggaacggagaagcgaggacgcccagagcaaggccgccctgaccgactggctgcgggctaaggccagcttcgtgatcgagggcctgaaggaggccgacaaggacgagttctgcagatgcgagctgaagctgcagaagtggtacggggacctgcggggaaagcccttcgccatcgaagccgagaacagcatcctggacatcagcggcttcagcaagcagtacaactgtgccttcatctggcagaaggacggcgtgaagaagctgaacctgtacctgatcatcaactacttcaagggcggcaagctgcggttcaagaagatcaaacctgaagccttcgaagccaacagattctacaccgtgatcaacaaaaagagcggcgagatcgtgcccatggaggtgaacttcaacttcgacgaccccaacctgatcatcctgcctctggcctttggcaagagacagggcagagaattcatctggaacgacctgctgtccctggaaaccggcagcctgaagctggccaacggaagagtgatcgagaagacactgtacaacagaagaacccggcaggatgagcctgccctgttcgtggccctgaccttcgagcggcgggaggtcctggactcctccaatatcaaaccaatgaacctgatcggcgtggcaagaggcgaaaacatccccgccgtgatcgccctgaccgaccccgagggctgcccactgagccggtttaaggatagcctgggaaacccaacccacatcctgagaatcggcgagagctataaggagaagcagcggaccatccaggccaagaaggaggtggagcagcggagagccggcggctacagccggaagtacgccagcaaagccaagaatctggcagacgatatggtgagaaacaccgctagagatctgctgtactacgccgtgacccaggatgccatgctgatcttcgccaacctgagccggggcttcggccggcagggcaagcggaccttcatggccgagagacagtacacacggatggaggactggctgaccgccaagctggcctacgagggcctgagcaagacctacctgtccaagacactggcccagtacacctccaagacatgcagcaactgtgggtttaccatcaccagcgccgactacgacagggtgctggagaagctgaagaagacagcaacaggctggatgaccacaattaacggcaaggagctgaaggtggagggccagattacctactacaacagatacaagagacagaacgtagtcaaggacctgtccgtcgagctggatagactgagcgaagaatctgtgaacaacgacatctcctcctggacaaagggcagaagcggagaagctctgagcctcctgaagaaaagattctcccatagacccgtgcaggagaagttcgtgtgcctgaactgcggcttcgagacacacgcagccgagcaagccgccctgaacatcgccagatcctggctgttcctgcggagccaggagtacaagaaataccagacaaacaagacaaccggcaacaccgataagagagccttcgtcgagacctggcagtccttttaccggaagaagcttaaggaggtgtggaaacctgccgtgcggtctggcggatctggcggaggctcccccagggagagcgtgaccttcgaggacgtggccgtgaacttcagccacgaggagtggcagtgcctgacccacagccagaggcacctgtacaaggacgtgatgctggagaactacggcaacatggtgagcctgggcttcagcttcagcaagccccccctgatcagctgcctggagcagggcgccgagagctacgtgcaggaccagcaggactgggagttcctgagctgcagctaccccgtgagcggcggcccaagcagcggcgcccctcctcccagcggcggcagcccagccggctccccaacctctaccgaggagggcacctctgagtccgccacccccgagagcggccctggcacctccaccgagcccagcgagggcagcgcacccggcagccctgccggcagccccacctccacagaggagggaaccagcaccgagcccagcgaaggcagcgccccaggcaccagcaccgagcctagtgagcaggagattaaacggatcaacaagatcagaagaagacttgtgaaagacagcaacaccaagaaggccggcaagacaggccccatgaaaaccctgctggttagagtgatgacacccgatctgagagagcggctggaaaacctgagaaagaagcctgaaaatatcccccagcccatcagcaatacatctagagccaacctgaataagctgctgaccgattacaccgaaatgaagaaggcgatcctgcatgtgtactgggaagagttccagaaggaccctgtgggcctgatgagccgggtggcccagcctgccagcaagaagatcgatcagaacaagctgaaacctgagatggacgagaagggcaacctgaccaccgccggctttgcctgctctcagtgtggccagcccctgttcgtgtacaagctggagcaggtgtctgagaagggcaaggcttacaccaactacttcggacggtgcaatgtggccgagcacgaaaagctgatcctgctggcccagctgaagcccgagaaggatagcgacgaagccgtgacatatagcctgggaaagtttgggcagagggccctggatttctacagcattcatgtgaccaaggagtccacccaccccgtgaagcccctggcccagatcgccggaaacagatacgcctccggacctgtgggaaaggccctgagcgacgcatgtatgggcacaatcgcctccttcctgtctaagtaccaggacatcatcatcgaacaccagaaggtggtgaagggcaaccagaagagactggagagcctgcgggagctggccggcaaggaaaacctggaataccctagcgtgaccctgccacctcagcctcacaccaaggagggcgttgatgcctacaacgaagtgatcgcccgggtgcgaatgtgggtgaacctgaacctgtggcagaagctgaagctaagcagagatgatgccaagcctctgctgagactgaagggattcccttcctttcctctggtcgagagacaggccaacgaagtggactggtgggacatggtgtgtaacgtgaagaagctgatcaacgagaaaaaggaggatggcaaggtgttttggcagaatctggctggctacaagagacaggaagccctgagaccatacctgagcagcgaggaagatcggaagaagggaaagaaattcgctcggtaccagctgggcgacctgctgctgcacctggaaaagaagcacggcgaggactggggaaaggtgtacgacgaggcctgggagcggattgacaagaaagtggaaggcctgagcaagcacatcaagctggaagaggaacggagaagcgaggacgcccagagcaaggccgccctgaccgactggctgcgggctaaggccagcttcgtgatcgagggcctgaaggaggccgacaaggacgagttctgcagatgcgagctgaagctgcagaagtggtacggggacctgcggggaaagcccttcgccatcgaagccgagaacagcatcctggacatcagcggcttcagcaagcagtacaactgtgccttcatctggcagaaggacggcgtgaagaagctgaacctgtacctgatcatcaactacttcaagggcggcaagctgcggttcaagaagatcaaacctgaagccttcgaagccaacagattctacaccgtgatcaacaaaaagagcggcgagatcgtgcccatggaggtgaacttcaacttcgacgaccccaacctgatcatcctgcctctggcctttggcaagagacagggcagagaattcatctggaacgacctgctgtccctggaaaccggcagcctgaagctggccaacggaagagtgatcgagaagacactgtacaacagaagaacccggcaggatgagcctgccctgttcgtggccctgaccttcgagcggcgggaggtcctggactcctccaatatcaaaccaatgaacctgatcggcgtggcaagaggcgaaaacatccccgccgtgatcgccctgaccgaccccgagggctgcccactgagccggtttaaggatagcctgggaaacccaacccacatcctgagaatcggcgagagctataaggagaagcagcggaccatccaggccaagaaggaggtggagcagcggagagccggcggctacagccggaagtacgccagcaaagccaagaatctggcagacgatatggtgagaaacaccgctagagatctgctgtactacgccgtgacccaggatgccatgctgatcttcgccaacctgagccggggcttcggccggcagggcaagcggaccttcatggccgagagacagtacacacggatggaggactggctgaccgccaagctggcctacgagggcctgagcaagacctacctgtccaagacactggcccagtacacctccaagacatgcagcaactgtgggtttaccatcaccagcgccgactacgacagggtgctggagaagctgaagaagacagcaacaggctggatgaccacaattaacggcaaggagctgaaggtggagggccagattacctactacaacagatacaagagacagaacgtagtcaaggacctgtccgtcgagctggatagactgagcgaagaatctgtgaacaacgacatctcctcctggacaaagggcagaagcggagaagctctgagcctcctgaagaaaagattctcccatagacccgtgcaggagaagttcgtgtgcctgaactgcggcttcgagacacacgcagccgagcaagccgccctgaacatcgccagatcctggctgttcctgcggagccaggagtacaagaaataccagacaaacaagacaaccggcaacaccgataagagagccttcgtcgagacctggcagtccttttaccggaagaagcttaaggaggtgtggaaacctgccgtgcggtctggcggatctggcggaggctcctcccagggagagcgtgaccttcgaggacgtggccgtgaacttcagccacgaggagtggcagtgcctgacccacagccagaggcacctgtacaaggacgtgatgctggagaactacggcaacatggtgagcctgggcttcagcttcagcaagccccccctgatcagctgcctggagcagggcgccgagagctacgtgcaggaccagcaggactgggagttcctgagctgcagctaccccgtgagcggatctggctccggcagcggccccaagaaaaagagaaaagtctaagctgccttctgcggggcttgccttctggccatgcccttcttctctcccttgcacctgtacctcttggtctttgaataaagcctgagtaggaaggctagcaaaaaaaaaaaaaaaaaaaaaaaaaaaaaaaaaaaaaaaaaaaaaaaaaaaaaaaaaaaaaaaaaaaaaaaaaaaaaaaa

SEQ ID NO: 16435 - RNA, 9485 nt, synthetic construct
  source 1..9485: mol_type = other RNA
aggaaataagagagaaaagaagagtaagaagaaatataagagccaccatggcccctaagaagaagcgtaaagtgagccggatggaacgcctcgtctacgaggtgcggcagaagtgcagaaacatcgaggacatctgcatctcctgcggatctctgaacgtgaccctggagcacccactgttcatcggcggcatgtgccagaactgtaaaaactgttttctggagtgtgcctatcaatacgacgatgacggctaccagagctactgcaccatctgttgcggcggaagagaggtgctgatgtgtggaaataacaactgctgccggtgcttctgcgtggaatgcgtggacctgctggtgggccccggcgccgcccaggccgctattaaggaagatccttggaactgctacatgtgcggccacaagggcacatacggcctgctgagacggagagaggactggcctagcagactgcagatgttcttcgccaataaccacgaccaggagttcgacccccctaaggtgtaccctcccgtccccgccgagaagagaaagcccatccgggtcctgagcctgttcgatggcatcgccaccggtctgctggtgctgaaggacctgggcatccaggtggataggtacattgcctccgaggtgtgcgaggactccatcaccgtgggaatggtgcgtcatcagggcaagatcatgtacgtgggcgacgtgcggagcgtgacacagaagcatatccaggagtggggccctttcgacctggtgatcggcggcagcccttgcaatgacctgagcatcgtgaacccagcccggaagggcctgtacgagggaaccggcagactgttcttcgagttttacagactgctgcacgacgcccggcctaaggaaggcgacgaccggcccttcttttggctgttcgagaatgtggtggccatgggagtcagcgacaagcgggatattagccggttcctggagagcaaccccgtgatgatcgatgccaaggaagtgagcgccgcccaccgggccagatacttctggggcaatctgcctggcatgaacagacccctggccagcaccgtgaacgacaagctggagctgcaggagtgcctggagcacggccggatcgccaagttcagcaaggtgagaaccatcaccacccgaagcaacagcatcaaacaaggcaaggaccagcactttcctgtgttcatgaacgagaaggaggacatcctgtggtgtaccgagatggagagagtgttcgggttcccagtccactacacagatgtcagcaacatgtctagactggccagacagagactgctgggaagaagctggtccgtccctgtgatcagacacctgttcgcccctctgaaggagtacttcgcctgcgtgagcagcggcaacagcaacgccaacagccggggccccagcttctctagcggcctggtgccactgtccctgagagggagccacatgggccccatggagatctacaaaaccgtgagcgcctggaagcggcagcctgtgcgcgtgctgagcctgtttcggaatatcgataaagtcctgaaaagcctgggattcctggagagcggctctggctccggcggtggcaccctgaagtacgtggaggatgtgacaaacgtggtcagacgggatgtggagaagtggggccccttcgatctggtgtacggcagcacccaacccctgggcagctcttgtgaccggtgccctggctggtacatgtttcagttccaccggatcctgcagtacgccctgccgagacaggagtcccagcggccattcttttggattttcatggacaacttgctgctgaccgaggatgaccaggaaactaccactcggttcctgcagaccgaagccgtgaccctgcaggacgtgagaggccgggactaccagaacgccatgcgggtgtggtccaacatccctggactgaaaagcaagcacgcacctctgacccctaaagaagaggagtacctgcaggcccaggtgcggagcagaagcaagctggacgcccctaaggtggatctgctggtgaagaattgcctcctgcccctgagagagtacttcaagtatttcagccagaatagtctgcccctgggaggcagcggcggcggcgccctggtgacatttgaggacgtcgccgtgcggttcacccaggaggaatgggctctgctggatccttctcagaaaatcctgtaccgggacgtgatgagagagacataccggaatctgacctccgtgggcatcaactgggaatgttgggaccttgaagcctgcttcagaagcctgggaagaaacctgagagtgcaggtggtgaagagaaagtgcgagctgaccaacagcggcccctgcgccgagggcggcccaagcagcggcgcccctcctcccagcggcggcagcccagccggctccccaacctctaccgaggagggcacctctgagtccgccacccccgagagcggccctggcacctccaccgagcccagcgagggcagcgcacccggcagccctgccggcagccccacctccacagaggagggaaccagcaccgagcccagcgaaggcagcgccccaggcaccagcaccgagcctagtgagcaggagattaaacggatcaacaagatcagaagaagacttgtgaaagacagcaacaccaagaaggccggcaagacaggccccatgaaaaccctgctggttagagtgatgacacccgatctgagagagcggctggaaaacctgagaaagaagcctgaaaatatcccccagcccatcagcaatacatctagagccaacctgaataagctgctgaccgattacaccgaaatgaagaaggcgatcctgcatgtgtactgggaagagttccagaaggaccctgtgggcctgatgagccgggtggcccagcctgccagcaagaagatcgatcagaacaagctgaaacctgagatggacgagaagggcaacctgaccaccgccggctttgcctgctctcagtgtggccagcccctgttcgtgtacaagctggagcaggtgtctgagaagggcaaggcttacaccaactacttcggacggtgcaatgtggccgagcacgaaaagctgatcctgctggcccagctgaagcccgagaaggatagcgacgaagccgtgacatatagcctgggaaagtttgggcagagggccctggatttctacagcattcatgtgaccaaggagtccacccaccccgtgaagcccctggcccagatcgccggaaacagatacgcctccggacctgtgggaaaggccctgagcgacgcatgtatgggcacaatcgcctccttcctgtctaagtaccaggacatcatcatcgaacaccagaaggtggtgaagggcaaccagaagagactggagagcctgcgggagctggccggcaaggaaaacctggaataccctagcgtgaccctgccacctcagcctcacaccaaggagggcgttgatgcctacaacgaagtgatcgcccgggtgcgaatgtgggtgaacctgaacctgtggcagaagctgaagctaagcagagatgatgccaagcctctgctgagactgaagggattcccttcctttcctctggtcgagagacaggccaacgaagtggactggtgggacatggtgtgtaacgtgaagaagctgatcaacgagaaaaaggaggatggcaaggtgttttggcagaatctggctggctacaagagacaggaagccctgagaccatacctgagcagcgaggaagatcggaagaagggaaagaaattcgctcggtaccagctgggcgacctgctgctgcacctggaaaagaagcacggcgaggactggggaaaggtgtacgacgaggcctgggagcggattgacaagaaagtggaaggcctgagcaagcacatcaagctggaagaggaacggagaagcgaggacgcccagagcaaggccgccctgaccgactggctgcgggctaaggccagcttcgtgatcgagggcctgaaggaggccgacaaggacgagttctgcagatgcgagctgaagctgcagaagtggtacggggacctgcggggaaagcccttcgccatcgaagccgagaacagcatcctggacatcagcggcttcagcaagcagtacaactgtgccttcatctggcagaaggacggcgtgaagaagctgaacctgtacctgatcatcaactacttcaagggcggcaagctgcggttcaagaagatcaaacctgaagccttcgaagccaacagattctacaccgtgatcaacaaaaagagcggcgagatcgtgcccatggaggtgaacttcaacttcgacgaccccaacctgatcatcctgcctctggcctttggcaagagacagggcagagaattcatctggaacgacctgctgtccctggaaaccggcagcctgaagctggccaacggaagagtgatcgagaagacactgtacaacagaagaacccggcaggatgagcctgccctgttcgtggccctgaccttcgagcggcgggaggtcctggactcctccaatatcaaaccaatgaacctgatcggcgtggcaagaggcgaaaacatccccgccgtgatcgccctgaccgaccccgagggctgcccactgagccggtttaaggatagcctgggaaacccaacccacatcctgagaatcggcgagagctataaggagaagcagcggaccatccaggccaagaaggaggtggagcagcggagagccggcggctacagccggaagtacgccagcaaagccaagaatctggcagacgatatggtgagaaacaccgctagagatctgctgtactacgccgtgacccaggatgccatgctgatcttcgccaacctgagccggggcttcggccggcagggcaagcggaccttcatggccgagagacagtacacacggatggaggactggctgaccgccaagctggcctacgagggcctgagcaagacctacctgtccaagacactggcccagtacacctccaagacatgcagcaactgtgggtttaccatcaccagcgccgactacgacagggtgctggagaagctgaagaagacagcaacaggctggatgaccacaattaacggcaaggagctgaaggtggagggccagattacctactacaacagatacaagagacagaacgtagtcaaggacctgtccgtcgagctggatagactgagcgaagaatctgtgaacaacgacatctcctcctggacaaagggcagaagcggagaagctctgagcctcctgaagaaaagattctcccatagacccgtgcaggagaagttcgtgtgcctgaactgcggcttcgagacacacgcagccgagcaagccgccctgaacatcgccagatcctggctgttcctgcggagccaggagtacaagaaataccagacaaacaagacaaccggcaacaccgataagagagccttcgtcgagacctggcagtccttttaccggaagaagcttaaggaggtgtggaaacctgccgtgcggtctggcggatctggcggaggctccagcagccagggcctgctgaccttcagggacgtggccatcgagttcagccaggaggagtggggctgcctgaaccacacccagagggagctgtacagggacgtgatgctggagaactacggccacctgctgttcctgggcctgatcgtgagcaagcccgacctggtgagcttcctggagcagaagaaggacccctgggacgtgaagaggaagaagaccgtggccttccaccccggcaggtgggagggcggcccaagcagcggcgcccctcctcccagcggcggcagcccagccggctccccaacctctaccgaggagggcacctctgagtccgccacccccgagagcggccctggcacctccaccgagcccagcgagggcagcgcacccggcagccctgccggcagccccacctccacagaggagggaaccagcaccgagcccagcgaaggcagcgccccaggcaccagcaccgagcctagtgagcaggagattaaacggatcaacaagatcagaagaagacttgtgaaagacagcaacaccaagaaggccggcaagacaggccccatgaaaaccctgctggttagagtgatgacacccgatctgagagagcggctggaaaacctgagaaagaagcctgaaaatatcccccagcccatcagcaatacatctagagccaacctgaataagctgctgaccgattacaccgaaatgaagaaggcgatcctgcatgtgtactgggaagagttccagaaggaccctgtgggcctgatgagccgggtggcccagcctgccagcaagaagatcgatcagaacaagctgaaacctgagatggacgagaagggcaacctgaccaccgccggctttgcctgctctcagtgtggccagcccctgttcgtgtacaagctggagcaggtgtctgagaagggcaaggcttacaccaactacttcggacggtgcaatgtggccgagcacgaaaagctgatcctgctggcccagctgaagcccgagaaggatagcgacgaagccgtgacatatagcctgggaaagtttgggcagagggccctggatttctacagcattcatgtgaccaaggagtccacccaccccgtgaagcccctggcccagatcgccggaaacagatacgcctccggacctgtgggaaaggccctgagcgacgcatgtatgggcacaatcgcctccttcctgtctaagtaccaggacatcatcatcgaacaccagaaggtggtgaagggcaaccagaagagactggagagcctgcgggagctggccggcaaggaaaacctggaataccctagcgtgaccctgccacctcagcctcacaccaaggagggcgttgatgcctacaacgaagtgatcgcccgggtgcgaatgtgggtgaacctgaacctgtggcagaagctgaagctaagcagagatgatgccaagcctctgctgagactgaagggattcccttcctttcctctggtcgagagacaggccaacgaagtggactggtgggacatggtgtgtaacgtgaagaagctgatcaacgagaaaaaggaggatggcaaggtgttttggcagaatctggctggctacaagagacaggaagccctgagaccatacctgagcagcgaggaagatcggaagaagggaaagaaattcgctcggtaccagctgggcgacctgctgctgcacctggaaaagaagcacggcgaggactggggaaaggtgtacgacgaggcctgggagcggattgacaagaaagtggaaggcctgagcaagcacatcaagctggaagaggaacggagaagcgaggacgcccagagcaaggccgccctgaccgactggctgcgggctaaggccagcttcgtgatcgagggcctgaaggaggccgacaaggacgagttctgcagatgcgagctgaagctgcagaagtggtacggggacctgcggggaaagcccttcgccatcgaagccgagaacagcatcctggacatcagcggcttcagcaagcagtacaactgtgccttcatctggcagaaggacggcgtgaagaagctgaacctgtacctgatcatcaactacttcaagggcggcaagctgcggttcaagaagatcaaacctgaagccttcgaagccaacagattctacaccgtgatcaacaaaaagagcggcgagatcgtgcccatggaggtgaacttcaacttcgacgaccccaacctgatcatcctgcctctggcctttggcaagagacagggcagagaattcatctggaacgacctgctgtccctggaaaccggcagcctgaagctggccaacggaagagtgatcgagaagacactgtacaacagaagaacccggcaggatgagcctgccctgttcgtggccctgaccttcgagcggcgggaggtcctggactcctccaatatcaaaccaatgaacctgatcggcgtggcaagaggcgaaaacatccccgccgtgatcgccctgaccgaccccgagggctgcccactgagccggtttaaggatagcctgggaaacccaacccacatcctgagaatcggcgagagctataaggagaagcagcggaccatccaggccaagaaggaggtggagcagcggagagccggcggctacagccggaagtacgccagcaaagccaagaatctggcagacgatatggtgagaaacaccgctagagatctgctgtactacgccgtgacccaggatgccatgctgatcttcgccaacctgagccggggcttcggccggcagggcaagcggaccttcatggccgagagacagtacacacggatggaggactggctgaccgccaagctggcctacgagggcctgagcaagacctacctgtccaagacactggcccagtacacctccaagacatgcagcaactgtgggtttaccatcaccagcgccgactacgacagggtgctggagaagctgaagaagacagcaacaggctggatgaccacaattaacggcaaggagctgaaggtggagggccagattacctactacaacagatacaagagacagaacgtagtcaaggacctgtccgtcgagctggatagactgagcgaagaatctgtgaacaacgacatctcctcctggacaaagggcagaagcggagaagctctgagcctcctgaagaaaagattctcccatagacccgtgcaggagaagttcgtgtgcctgaactgcggcttcgagacacacgcagccgagcaagccgccctgaacatcgccagatcctggctgttcctgcggagccaggagtacaagaaataccagacaaacaagacaaccggcaacaccgataagagagccttcgtcgagacctggcagtccttttaccggaagaagcttaaggaggtgtggaaacctgccgtgcggtctggcggatctggcggaggctcctagcagccagggcctgctgaccttcagggacgtggccatcgagttcagccaggaggagtggggctgcctgaaccacacccagagggagctgtacagggacgtgatgctggagaactacggccacctgctgttcctgggcctgatcgtgagcaagcccgacctggtgagcttcctggagcagaagaaggacccctgggacgtgaagaggaagaagaccgtggccttccaccccggcaggtgggagggatctggctccggcagcggccccaagaaaaagagaaaagtctaagctgccttctgcggggcttgccttctggccatgcccttcttctctcccttgcacctgtacctcttggtctttgaataaagcctgagtaggaaggctagcaaaaaaaaaaaaaaaaaaaaaaaaaaaaaaaaaaaaaaaaaaaaaaaaaaaaaaaaaaaaaaaaaaaaaaaaaaaaaaaa

SEQ ID NO: 16436 - RNA, 9485 nt, synthetic construct
  source 1..9485: mol_type = other RNA
aggaaataagagagaaaagaagagtaagaagaaatataagagccaccatggcccctaagaagaagcgtaaagtgagccggatggaacgcctcgtctacgaggtgcggcagaagtgcagaaacatcgaggacatctgcatctcctgcggatctctgaacgtgaccctggagcacccactgttcatcggcggcatgtgccagaactgtaaaaactgttttctggagtgtgcctatcaatacgacgatgacggctaccagagctactgcaccatctgttgcggcggaagagaggtgctgatgtgtggaaataacaactgctgccggtgcttctgcgtggaatgcgtggacctgctggtgggccccggcgccgcccaggccgctattaaggaagatccttggaactgctacatgtgcggccacaagggcacatacggcctgctgagacggagagaggactggcctagcagactgcagatgttcttcgccaataaccacgaccaggagttcgacccccctaaggtgtaccctcccgtccccgccgagaagagaaagcccatccgggtcctgagcctgttcgatggcatcgccaccggtctgctggtgctgaaggacctgggcatccaggtggataggtacattgcctccgaggtgtgcgaggactccatcaccgtgggaatggtgcgtcatcagggcaagatcatgtacgtgggcgacgtgcggagcgtgacacagaagcatatccaggagtggggccctttcgacctggtgatcggcggcagcccttgcaatgacctgagcatcgtgaacccagcccggaagggcctgtacgagggaaccggcagactgttcttcgagttttacagactgctgcacgacgcccggcctaaggaaggcgacgaccggcccttcttttggctgttcgagaatgtggtggccatgggagtcagcgacaagcgggatattagccggttcctggagagcaaccccgtgatgatcgatgccaaggaagtgagcgccgcccaccgggccagatacttctggggcaatctgcctggcatgaacagacccctggccagcaccgtgaacgacaagctggagctgcaggagtgcctggagcacggccggatcgccaagttcagcaaggtgagaaccatcaccacccgaagcaacagcatcaaacaaggcaaggaccagcactttcctgtgttcatgaacgagaaggaggacatcctgtggtgtaccgagatggagagagtgttcgggttcccagtccactacacagatgtcagcaacatgtctagactggccagacagagactgctgggaagaagctggtccgtccctgtgatcagacacctgttcgcccctctgaaggagtacttcgcctgcgtgagcagcggcaacagcaacgccaacagccggggccccagcttctctagcggcctggtgccactgtccctgagagggagccacatgggccccatggagatctacaaaaccgtgagcgcctggaagcggcagcctgtgcgcgtgctgagcctgtttcggaatatcgataaagtcctgaaaagcctgggattcctggagagcggctctggctccggcggtggcaccctgaagtacgtggaggatgtgacaaacgtggtcagacgggatgtggagaagtggggccccttcgatctggtgtacggcagcacccaacccctgggcagctcttgtgaccggtgccctggctggtacatgtttcagttccaccggatcctgcagtacgccctgccgagacaggagtcccagcggccattcttttggattttcatggacaacttgctgctgaccgaggatgaccaggaaactaccactcggttcctgcagaccgaagccgtgaccctgcaggacgtgagaggccgggactaccagaacgccatgcgggtgtggtccaacatccctggactgaaaagcaagcacgcacctctgacccctaaagaagaggagtacctgcaggcccaggtgcggagcagaagcaagctggacgcccctaaggtggatctgctggtgaagaattgcctcctgcccctgagagagtacttcaagtatttcagccagaatagtctgcccctgggaggcagcggcggcggcgccctggtgacatttgaggacgtcgccgtgcggttcacccaggaggaatgggctctgctggatccttctcagaaaatcctgtaccgggacgtgatgagagagacataccggaatctgacctccgtgggcatcaactgggaatgttgggaccttgaagcctgcttcagaagcctgggaagaaacctgagagtgcaggtggtgaagagaaagtgcgagctgaccaacagcggcccctgcgccgagggcggcccaagcagcggcgcccctcctcccagcggcggcagcccagccggctccccaacctctaccgaggagggcacctctgagtccgccacccccgagagcggccctggcacctccaccgagcccagcgagggcagcgcacccggcagccctgccggcagccccacctccacagaggagggaaccagcaccgagcccagcgaaggcagcgccccaggcaccagcaccgagcctagtgagcaggagattaaacggatcaacaagatcagaagaagacttgtgaaagacagcaacaccaagaaggccggcaagacaggccccatgaaaaccctgctggttagagtgatgacacccgatctgagagagcggctggaaaacctgagaaagaagcctgaaaatatcccccagcccatcagcaatacatctagagccaacctgaataagctgctgaccgattacaccgaaatgaagaaggcgatcctgcatgtgtactgggaagagttccagaaggaccctgtgggcctgatgagccgggtggcccagcctgccagcaagaagatcgatcagaacaagctgaaacctgagatggacgagaagggcaacctgaccaccgccggctttgcctgctctcagtgtggccagcccctgttcgtgtacaagctggagcaggtgtctgagaagggcaaggcttacaccaactacttcggacggtgcaatgtggccgagcacgaaaagctgatcctgctggcccagctgaagcccgagaaggatagcgacgaagccgtgacatatagcctgggaaagtttgggcagagggccctggatttctacagcattcatgtgaccaaggagtccacccaccccgtgaagcccctggcccagatcgccggaaacagatacgcctccggacctgtgggaaaggccctgagcgacgcatgtatgggcacaatcgcctccttcctgtctaagtaccaggacatcatcatcgaacaccagaaggtggtgaagggcaaccagaagagactggagagcctgcgggagctggccggcaaggaaaacctggaataccctagcgtgaccctgccacctcagcctcacaccaaggagggcgttgatgcctacaacgaagtgatcgcccgggtgcgaatgtgggtgaacctgaacctgtggcagaagctgaagctaagcagagatgatgccaagcctctgctgagactgaagggattcccttcctttcctctggtcgagagacaggccaacgaagtggactggtgggacatggtgtgtaacgtgaagaagctgatcaacgagaaaaaggaggatggcaaggtgttttggcagaatctggctggctacaagagacaggaagccctgagaccatacctgagcagcgaggaagatcggaagaagggaaagaaattcgctcggtaccagctgggcgacctgctgctgcacctggaaaagaagcacggcgaggactggggaaaggtgtacgacgaggcctgggagcggattgacaagaaagtggaaggcctgagcaagcacatcaagctggaagaggaacggagaagcgaggacgcccagagcaaggccgccctgaccgactggctgcgggctaaggccagcttcgtgatcgagggcctgaaggaggccgacaaggacgagttctgcagatgcgagctgaagctgcagaagtggtacggggacctgcggggaaagcccttcgccatcgaagccgagaacagcatcctggacatcagcggcttcagcaagcagtacaactgtgccttcatctggcagaaggacggcgtgaagaagctgaacctgtacctgatcatcaactacttcaagggcggcaagctgcggttcaagaagatcaaacctgaagccttcgaagccaacagattctacaccgtgatcaacaaaaagagcggcgagatcgtgcccatggaggtgaacttcaacttcgacgaccccaacctgatcatcctgcctctggcctttggcaagagacagggcagagaattcatctggaacgacctgctgtccctggaaaccggcagcctgaagctggccaacggaagagtgatcgagaagacactgtacaacagaagaacccggcaggatgagcctgccctgttcgtggccctgaccttcgagcggcgggaggtcctggactcctccaatatcaaaccaatgaacctgatcggcgtggcaagaggcgaaaacatccccgccgtgatcgccctgaccgaccccgagggctgcccactgagccggtttaaggatagcctgggaaacccaacccacatcctgagaatcggcgagagctataaggagaagcagcggaccatccaggccaagaaggaggtggagcagcggagagccggcggctacagccggaagtacgccagcaaagccaagaatctggcagacgatatggtgagaaacaccgctagagatctgctgtactacgccgtgacccaggatgccatgctgatcttcgccaacctgagccggggcttcggccggcagggcaagcggaccttcatggccgagagacagtacacacggatggaggactggctgaccgccaagctggcctacgagggcctgagcaagacctacctgtccaagacactggcccagtacacctccaagacatgcagcaactgtgggtttaccatcaccagcgccgactacgacagggtgctggagaagctgaagaagacagcaacaggctggatgaccacaattaacggcaaggagctgaaggtggagggccagattacctactacaacagatacaagagacagaacgtagtcaaggacctgtccgtcgagctggatagactgagcgaagaatctgtgaacaacgacatctcctcctggacaaagggcagaagcggagaagctctgagcctcctgaagaaaagattctcccatagacccgtgcaggagaagttcgtgtgcctgaactgcggcttcgagacacacgcagccgagcaagccgccctgaacatcgccagatcctggctgttcctgcggagccaggagtacaagaaataccagacaaacaagacaaccggcaacaccgataagagagccttcgtcgagacctggcagtccttttaccggaagaagcttaaggaggtgtggaaacctgccgtgcggtctggcggatctggcggaggctccatgctggcccccgtgaccttcgaggacgtgaccgtggtgttcaccgaggccgagtgggtgaccctgagcaccgagcagaagaacctgtacaaggaggtgaccctggagacctacaggaacctgctgagcctggccgagcccacccccgagacctaccccggccccagctgcctgctgcccttcagctgccagcagttcctgagccagcacgtgctgcagatcttccccggcgtgtgcgccgagggcggcccaagcagcggcgcccctcctcccagcggcggcagcccagccggctccccaacctctaccgaggagggcacctctgagtccgccacccccgagagcggccctggcacctccaccgagcccagcgagggcagcgcacccggcagccctgccggcagccccacctccacagaggagggaaccagcaccgagcccagcgaaggcagcgccccaggcaccagcaccgagcctagtgagcaggagattaaacggatcaacaagatcagaagaagacttgtgaaagacagcaacaccaagaaggccggcaagacaggccccatgaaaaccctgctggttagagtgatgacacccgatctgagagagcggctggaaaacctgagaaagaagcctgaaaatatcccccagcccatcagcaatacatctagagccaacctgaataagctgctgaccgattacaccgaaatgaagaaggcgatcctgcatgtgtactgggaagagttccagaaggaccctgtgggcctgatgagccgggtggcccagcctgccagcaagaagatcgatcagaacaagctgaaacctgagatggacgagaagggcaacctgaccaccgccggctttgcctgctctcagtgtggccagcccctgttcgtgtacaagctggagcaggtgtctgagaagggcaaggcttacaccaactacttcggacggtgcaatgtggccgagcacgaaaagctgatcctgctggcccagctgaagcccgagaaggatagcgacgaagccgtgacatatagcctgggaaagtttgggcagagggccctggatttctacagcattcatgtgaccaaggagtccacccaccccgtgaagcccctggcccagatcgccggaaacagatacgcctccggacctgtgggaaaggccctgagcgacgcatgtatgggcacaatcgcctccttcctgtctaagtaccaggacatcatcatcgaacaccagaaggtggtgaagggcaaccagaagagactggagagcctgcgggagctggccggcaaggaaaacctggaataccctagcgtgaccctgccacctcagcctcacaccaaggagggcgttgatgcctacaacgaagtgatcgcccgggtgcgaatgtgggtgaacctgaacctgtggcagaagctgaagctaagcagagatgatgccaagcctctgctgagactgaagggattcccttcctttcctctggtcgagagacaggccaacgaagtggactggtgggacatggtgtgtaacgtgaagaagctgatcaacgagaaaaaggaggatggcaaggtgttttggcagaatctggctggctacaagagacaggaagccctgagaccatacctgagcagcgaggaagatcggaagaagggaaagaaattcgctcggtaccagctgggcgacctgctgctgcacctggaaaagaagcacggcgaggactggggaaaggtgtacgacgaggcctgggagcggattgacaagaaagtggaaggcctgagcaagcacatcaagctggaagaggaacggagaagcgaggacgcccagagcaaggccgccctgaccgactggctgcgggctaaggccagcttcgtgatcgagggcctgaaggaggccgacaaggacgagttctgcagatgcgagctgaagctgcagaagtggtacggggacctgcggggaaagcccttcgccatcgaagccgagaacagcatcctggacatcagcggcttcagcaagcagtacaactgtgccttcatctggcagaaggacggcgtgaagaagctgaacctgtacctgatcatcaactacttcaagggcggcaagctgcggttcaagaagatcaaacctgaagccttcgaagccaacagattctacaccgtgatcaacaaaaagagcggcgagatcgtgcccatggaggtgaacttcaacttcgacgaccccaacctgatcatcctgcctctggcctttggcaagagacagggcagagaattcatctggaacgacctgctgtccctggaaaccggcagcctgaagctggccaacggaagagtgatcgagaagacactgtacaacagaagaacccggcaggatgagcctgccctgttcgtggccctgaccttcgagcggcgggaggtcctggactcctccaatatcaaaccaatgaacctgatcggcgtggcaagaggcgaaaacatccccgccgtgatcgccctgaccgaccccgagggctgcccactgagccggtttaaggatagcctgggaaacccaacccacatcctgagaatcggcgagagctataaggagaagcagcggaccatccaggccaagaaggaggtggagcagcggagagccggcggctacagccggaagtacgccagcaaagccaagaatctggcagacgatatggtgagaaacaccgctagagatctgctgtactacgccgtgacccaggatgccatgctgatcttcgccaacctgagccggggcttcggccggcagggcaagcggaccttcatggccgagagacagtacacacggatggaggactggctgaccgccaagctggcctacgagggcctgagcaagacctacctgtccaagacactggcccagtacacctccaagacatgcagcaactgtgggtttaccatcaccagcgccgactacgacagggtgctggagaagctgaagaagacagcaacaggctggatgaccacaattaacggcaaggagctgaaggtggagggccagattacctactacaacagatacaagagacagaacgtagtcaaggacctgtccgtcgagctggatagactgagcgaagaatctgtgaacaacgacatctcctcctggacaaagggcagaagcggagaagctctgagcctcctgaagaaaagattctcccatagacccgtgcaggagaagttcgtgtgcctgaactgcggcttcgagacacacgcagccgagcaagccgccctgaacatcgccagatcctggctgttcctgcggagccaggagtacaagaaataccagacaaacaagacaaccggcaacaccgataagagagccttcgtcgagacctggcagtccttttaccggaagaagcttaaggaggtgtggaaacctgccgtgcggtctggcggatctggcggaggctcctatgctggcccccgtgaccttcgaggacgtgaccgtggtgttcaccgaggccgagtgggtgaccctgagcaccgagcagaagaacctgtacaaggaggtgaccctggagacctacaggaacctgctgagcctggccgagcccacccccgagacctaccccggccccagctgcctgctgcccttcagctgccagcagttcctgagccagcacgtgctgcagatcttccccggcgtgtgcgccgagggatctggctccggcagcggccccaagaaaaagagaaaagtctaagctgccttctgcggggcttgccttctggccatgcccttcttctctcccttgcacctgtacctcttggtctttgaataaagcctgagtaggaaggctagcaaaaaaaaaaaaaaaaaaaaaaaaaaaaaaaaaaaaaaaaaaaaaaaaaaaaaaaaaaaaaaaaaaaaaaaaaaaaaaaa

SEQ ID NO: 16437 - RNA, 9485 nt, synthetic construct
  source 1..9485: mol_type = other RNA
aggaaataagagagaaaagaagagtaagaagaaatataagagccaccatggcccctaagaagaagcgtaaagtgagccggatggaacgcctcgtctacgaggtgcggcagaagtgcagaaacatcgaggacatctgcatctcctgcggatctctgaacgtgaccctggagcacccactgttcatcggcggcatgtgccagaactgtaaaaactgttttctggagtgtgcctatcaatacgacgatgacggctaccagagctactgcaccatctgttgcggcggaagagaggtgctgatgtgtggaaataacaactgctgccggtgcttctgcgtggaatgcgtggacctgctggtgggccccggcgccgcccaggccgctattaaggaagatccttggaactgctacatgtgcggccacaagggcacatacggcctgctgagacggagagaggactggcctagcagactgcagatgttcttcgccaataaccacgaccaggagttcgacccccctaaggtgtaccctcccgtccccgccgagaagagaaagcccatccgggtcctgagcctgttcgatggcatcgccaccggtctgctggtgctgaaggacctgggcatccaggtggataggtacattgcctccgaggtgtgcgaggactccatcaccgtgggaatggtgcgtcatcagggcaagatcatgtacgtgggcgacgtgcggagcgtgacacagaagcatatccaggagtggggccctttcgacctggtgatcggcggcagcccttgcaatgacctgagcatcgtgaacccagcccggaagggcctgtacgagggaaccggcagactgttcttcgagttttacagactgctgcacgacgcccggcctaaggaaggcgacgaccggcccttcttttggctgttcgagaatgtggtggccatgggagtcagcgacaagcgggatattagccggttcctggagagcaaccccgtgatgatcgatgccaaggaagtgagcgccgcccaccgggccagatacttctggggcaatctgcctggcatgaacagacccctggccagcaccgtgaacgacaagctggagctgcaggagtgcctggagcacggccggatcgccaagttcagcaaggtgagaaccatcaccacccgaagcaacagcatcaaacaaggcaaggaccagcactttcctgtgttcatgaacgagaaggaggacatcctgtggtgtaccgagatggagagagtgttcgggttcccagtccactacacagatgtcagcaacatgtctagactggccagacagagactgctgggaagaagctggtccgtccctgtgatcagacacctgttcgcccctctgaaggagtacttcgcctgcgtgagcagcggcaacagcaacgccaacagccggggccccagcttctctagcggcctggtgccactgtccctgagagggagccacatgggccccatggagatctacaaaaccgtgagcgcctggaagcggcagcctgtgcgcgtgctgagcctgtttcggaatatcgataaagtcctgaaaagcctgggattcctggagagcggctctggctccggcggtggcaccctgaagtacgtggaggatgtgacaaacgtggtcagacgggatgtggagaagtggggccccttcgatctggtgtacggcagcacccaacccctgggcagctcttgtgaccggtgccctggctggtacatgtttcagttccaccggatcctgcagtacgccctgccgagacaggagtcccagcggccattcttttggattttcatggacaacttgctgctgaccgaggatgaccaggaaactaccactcggttcctgcagaccgaagccgtgaccctgcaggacgtgagaggccgggactaccagaacgccatgcgggtgtggtccaacatccctggactgaaaagcaagcacgcacctctgacccctaaagaagaggagtacctgcaggcccaggtgcggagcagaagcaagctggacgcccctaaggtggatctgctggtgaagaattgcctcctgcccctgagagagtacttcaagtatttcagccagaatagtctgcccctgggaggcagcggcggcggcgccctggtgacatttgaggacgtcgccgtgcggttcacccaggaggaatgggctctgctggatccttctcagaaaatcctgtaccgggacgtgatgagagagacataccggaatctgacctccgtgggcatcaactgggaatgttgggaccttgaagcctgcttcagaagcctgggaagaaacctgagagtgcaggtggtgaagagaaagtgcgagctgaccaacagcggcccctgcgccgagggcggcccaagcagcggcgcccctcctcccagcggcggcagcccagccggctccccaacctctaccgaggagggcacctctgagtccgccacccccgagagcggccctggcacctccaccgagcccagcgagggcagcgcacccggcagccctgccggcagccccacctccacagaggagggaaccagcaccgagcccagcgaaggcagcgccccaggcaccagcaccgagcctagtgagcaggagattaaacggatcaacaagatcagaagaagacttgtgaaagacagcaacaccaagaaggccggcaagacaggccccatgaaaaccctgctggttagagtgatgacacccgatctgagagagcggctggaaaacctgagaaagaagcctgaaaatatcccccagcccatcagcaatacatctagagccaacctgaataagctgctgaccgattacaccgaaatgaagaaggcgatcctgcatgtgtactgggaagagttccagaaggaccctgtgggcctgatgagccgggtggcccagcctgccagcaagaagatcgatcagaacaagctgaaacctgagatggacgagaagggcaacctgaccaccgccggctttgcctgctctcagtgtggccagcccctgttcgtgtacaagctggagcaggtgtctgagaagggcaaggcttacaccaactacttcggacggtgcaatgtggccgagcacgaaaagctgatcctgctggcccagctgaagcccgagaaggatagcgacgaagccgtgacatatagcctgggaaagtttgggcagagggccctggatttctacagcattcatgtgaccaaggagtccacccaccccgtgaagcccctggcccagatcgccggaaacagatacgcctccggacctgtgggaaaggccctgagcgacgcatgtatgggcacaatcgcctccttcctgtctaagtaccaggacatcatcatcgaacaccagaaggtggtgaagggcaaccagaagagactggagagcctgcgggagctggccggcaaggaaaacctggaataccctagcgtgaccctgccacctcagcctcacaccaaggagggcgttgatgcctacaacgaagtgatcgcccgggtgcgaatgtgggtgaacctgaacctgtggcagaagctgaagctaagcagagatgatgccaagcctctgctgagactgaagggattcccttcctttcctctggtcgagagacaggccaacgaagtggactggtgggacatggtgtgtaacgtgaagaagctgatcaacgagaaaaaggaggatggcaaggtgttttggcagaatctggctggctacaagagacaggaagccctgagaccatacctgagcagcgaggaagatcggaagaagggaaagaaattcgctcggtaccagctgggcgacctgctgctgcacctggaaaagaagcacggcgaggactggggaaaggtgtacgacgaggcctgggagcggattgacaagaaagtggaaggcctgagcaagcacatcaagctggaagaggaacggagaagcgaggacgcccagagcaaggccgccctgaccgactggctgcgggctaaggccagcttcgtgatcgagggcctgaaggaggccgacaaggacgagttctgcagatgcgagctgaagctgcagaagtggtacggggacctgcggggaaagcccttcgccatcgaagccgagaacagcatcctggacatcagcggcttcagcaagcagtacaactgtgccttcatctggcagaaggacggcgtgaagaagctgaacctgtacctgatcatcaactacttcaagggcggcaagctgcggttcaagaagatcaaacctgaagccttcgaagccaacagattctacaccgtgatcaacaaaaagagcggcgagatcgtgcccatggaggtgaacttcaacttcgacgaccccaacctgatcatcctgcctctggcctttggcaagagacagggcagagaattcatctggaacgacctgctgtccctggaaaccggcagcctgaagctggccaacggaagagtgatcgagaagacactgtacaacagaagaacccggcaggatgagcctgccctgttcgtggccctgaccttcgagcggcgggaggtcctggactcctccaatatcaaaccaatgaacctgatcggcgtggcaagaggcgaaaacatccccgccgtgatcgccctgaccgaccccgagggctgcccactgagccggtttaaggatagcctgggaaacccaacccacatcctgagaatcggcgagagctataaggagaagcagcggaccatccaggccaagaaggaggtggagcagcggagagccggcggctacagccggaagtacgccagcaaagccaagaatctggcagacgatatggtgagaaacaccgctagagatctgctgtactacgccgtgacccaggatgccatgctgatcttcgccaacctgagccggggcttcggccggcagggcaagcggaccttcatggccgagagacagtacacacggatggaggactggctgaccgccaagctggcctacgagggcctgagcaagacctacctgtccaagacactggcccagtacacctccaagacatgcagcaactgtgggtttaccatcaccagcgccgactacgacagggtgctggagaagctgaagaagacagcaacaggctggatgaccacaattaacggcaaggagctgaaggtggagggccagattacctactacaacagatacaagagacagaacgtagtcaaggacctgtccgtcgagctggatagactgagcgaagaatctgtgaacaacgacatctcctcctggacaaagggcagaagcggagaagctctgagcctcctgaagaaaagattctcccatagacccgtgcaggagaagttcgtgtgcctgaactgcggcttcgagacacacgcagccgagcaagccgccctgaacatcgccagatcctggctgttcctgcggagccaggagtacaagaaataccagacaaacaagacaaccggcaacaccgataagagagccttcgtcgagacctggcagtccttttaccggaagaagcttaaggaggtgtggaaacctgccgtgcggtctggcggatctggcggaggctccatgagccagggcagcgtgaccttcagggacgtggccatcgacttcagccaggaggagtggaagtggctgcagcccgcccagagggacctgtacaggtgcgtgatgctggagaactacggccacctggtgagcctgggcctgagcatcagcaagcccgacgtggtgagcctgctggagcagggcaaggagccctggctgggcaagagagacgtgaagagggacctgttcagcgtgctgaaggagggcggcccaagcagcggcgcccctcctcccagcggcggcagcccagccggctccccaacctctaccgaggagggcacctctgagtccgccacccccgagagcggccctggcacctccaccgagcccagcgagggcagcgcacccggcagccctgccggcagccccacctccacagaggagggaaccagcaccgagcccagcgaaggcagcgccccaggcaccagcaccgagcctagtgagcaggagattaaacggatcaacaagatcagaagaagacttgtgaaagacagcaacaccaagaaggccggcaagacaggccccatgaaaaccctgctggttagagtgatgacacccgatctgagagagcggctggaaaacctgagaaagaagcctgaaaatatcccccagcccatcagcaatacatctagagccaacctgaataagctgctgaccgattacaccgaaatgaagaaggcgatcctgcatgtgtactgggaagagttccagaaggaccctgtgggcctgatgagccgggtggcccagcctgccagcaagaagatcgatcagaacaagctgaaacctgagatggacgagaagggcaacctgaccaccgccggctttgcctgctctcagtgtggccagcccctgttcgtgtacaagctggagcaggtgtctgagaagggcaaggcttacaccaactacttcggacggtgcaatgtggccgagcacgaaaagctgatcctgctggcccagctgaagcccgagaaggatagcgacgaagccgtgacatatagcctgggaaagtttgggcagagggccctggatttctacagcattcatgtgaccaaggagtccacccaccccgtgaagcccctggcccagatcgccggaaacagatacgcctccggacctgtgggaaaggccctgagcgacgcatgtatgggcacaatcgcctccttcctgtctaagtaccaggacatcatcatcgaacaccagaaggtggtgaagggcaaccagaagagactggagagcctgcgggagctggccggcaaggaaaacctggaataccctagcgtgaccctgccacctcagcctcacaccaaggagggcgttgatgcctacaacgaagtgatcgcccgggtgcgaatgtgggtgaacctgaacctgtggcagaagctgaagctaagcagagatgatgccaagcctctgctgagactgaagggattcccttcctttcctctggtcgagagacaggccaacgaagtggactggtgggacatggtgtgtaacgtgaagaagctgatcaacgagaaaaaggaggatggcaaggtgttttggcagaatctggctggctacaagagacaggaagccctgagaccatacctgagcagcgaggaagatcggaagaagggaaagaaattcgctcggtaccagctgggcgacctgctgctgcacctggaaaagaagcacggcgaggactggggaaaggtgtacgacgaggcctgggagcggattgacaagaaagtggaaggcctgagcaagcacatcaagctggaagaggaacggagaagcgaggacgcccagagcaaggccgccctgaccgactggctgcgggctaaggccagcttcgtgatcgagggcctgaaggaggccgacaaggacgagttctgcagatgcgagctgaagctgcagaagtggtacggggacctgcggggaaagcccttcgccatcgaagccgagaacagcatcctggacatcagcggcttcagcaagcagtacaactgtgccttcatctggcagaaggacggcgtgaagaagctgaacctgtacctgatcatcaactacttcaagggcggcaagctgcggttcaagaagatcaaacctgaagccttcgaagccaacagattctacaccgtgatcaacaaaaagagcggcgagatcgtgcccatggaggtgaacttcaacttcgacgaccccaacctgatcatcctgcctctggcctttggcaagagacagggcagagaattcatctggaacgacctgctgtccctggaaaccggcagcctgaagctggccaacggaagagtgatcgagaagacactgtacaacagaagaacccggcaggatgagcctgccctgttcgtggccctgaccttcgagcggcgggaggtcctggactcctccaatatcaaaccaatgaacctgatcggcgtggcaagaggcgaaaacatccccgccgtgatcgccctgaccgaccccgagggctgcccactgagccggtttaaggatagcctgggaaacccaacccacatcctgagaatcggcgagagctataaggagaagcagcggaccatccaggccaagaaggaggtggagcagcggagagccggcggctacagccggaagtacgccagcaaagccaagaatctggcagacgatatggtgagaaacaccgctagagatctgctgtactacgccgtgacccaggatgccatgctgatcttcgccaacctgagccggggcttcggccggcagggcaagcggaccttcatggccgagagacagtacacacggatggaggactggctgaccgccaagctggcctacgagggcctgagcaagacctacctgtccaagacactggcccagtacacctccaagacatgcagcaactgtgggtttaccatcaccagcgccgactacgacagggtgctggagaagctgaagaagacagcaacaggctggatgaccacaattaacggcaaggagctgaaggtggagggccagattacctactacaacagatacaagagacagaacgtagtcaaggacctgtccgtcgagctggatagactgagcgaagaatctgtgaacaacgacatctcctcctggacaaagggcagaagcggagaagctctgagcctcctgaagaaaagattctcccatagacccgtgcaggagaagttcgtgtgcctgaactgcggcttcgagacacacgcagccgagcaagccgccctgaacatcgccagatcctggctgttcctgcggagccaggagtacaagaaataccagacaaacaagacaaccggcaacaccgataagagagccttcgtcgagacctggcagtccttttaccggaagaagcttaaggaggtgtggaaacctgccgtgcggtctggcggatctggcggaggctcctatgagccagggcagcgtgaccttcagggacgtggccatcgacttcagccaggaggagtggaagtggctgcagcccgcccagagggacctgtacaggtgcgtgatgctggagaactacggccacctggtgagcctgggcctgagcatcagcaagcccgacgtggtgagcctgctggagcagggcaaggagccctggctgggcaagagagacgtgaagagggacctgttcagcgtgctgaaggagggatctggctccggcagcggccccaagaaaaagagaaaagtctaagctgccttctgcggggcttgccttctggccatgcccttcttctctcccttgcacctgtacctcttggtctttgaataaagcctgagtaggaaggctagcaaaaaaaaaaaaaaaaaaaaaaaaaaaaaaaaaaaaaaaaaaaaaaaaaaaaaaaaaaaaaaaaaaaaaaaaaaaaaaaa

SEQ ID NO: 16438 - RNA, 9485 nt, synthetic construct
  source 1..9485: mol_type = other RNA
aggaaataagagagaaaagaagagtaagaagaaatataagagccaccatggcccctaagaagaagcgtaaagtgagccggatggaacgcctcgtctacgaggtgcggcagaagtgcagaaacatcgaggacatctgcatctcctgcggatctctgaacgtgaccctggagcacccactgttcatcggcggcatgtgccagaactgtaaaaactgttttctggagtgtgcctatcaatacgacgatgacggctaccagagctactgcaccatctgttgcggcggaagagaggtgctgatgtgtggaaataacaactgctgccggtgcttctgcgtggaatgcgtggacctgctggtgggccccggcgccgcccaggccgctattaaggaagatccttggaactgctacatgtgcggccacaagggcacatacggcctgctgagacggagagaggactggcctagcagactgcagatgttcttcgccaataaccacgaccaggagttcgacccccctaaggtgtaccctcccgtccccgccgagaagagaaagcccatccgggtcctgagcctgttcgatggcatcgccaccggtctgctggtgctgaaggacctgggcatccaggtggataggtacattgcctccgaggtgtgcgaggactccatcaccgtgggaatggtgcgtcatcagggcaagatcatgtacgtgggcgacgtgcggagcgtgacacagaagcatatccaggagtggggccctttcgacctggtgatcggcggcagcccttgcaatgacctgagcatcgtgaacccagcccggaagggcctgtacgagggaaccggcagactgttcttcgagttttacagactgctgcacgacgcccggcctaaggaaggcgacgaccggcccttcttttggctgttcgagaatgtggtggccatgggagtcagcgacaagcgggatattagccggttcctggagagcaaccccgtgatgatcgatgccaaggaagtgagcgccgcccaccgggccagatacttctggggcaatctgcctggcatgaacagacccctggccagcaccgtgaacgacaagctggagctgcaggagtgcctggagcacggccggatcgccaagttcagcaaggtgagaaccatcaccacccgaagcaacagcatcaaacaaggcaaggaccagcactttcctgtgttcatgaacgagaaggaggacatcctgtggtgtaccgagatggagagagtgttcgggttcccagtccactacacagatgtcagcaacatgtctagactggccagacagagactgctgggaagaagctggtccgtccctgtgatcagacacctgttcgcccctctgaaggagtacttcgcctgcgtgagcagcggcaacagcaacgccaacagccggggccccagcttctctagcggcctggtgccactgtccctgagagggagccacatgggccccatggagatctacaaaaccgtgagcgcctggaagcggcagcctgtgcgcgtgctgagcctgtttcggaatatcgataaagtcctgaaaagcctgggattcctggagagcggctctggctccggcggtggcaccctgaagtacgtggaggatgtgacaaacgtggtcagacgggatgtggagaagtggggccccttcgatctggtgtacggcagcacccaacccctgggcagctcttgtgaccggtgccctggctggtacatgtttcagttccaccggatcctgcagtacgccctgccgagacaggagtcccagcggccattcttttggattttcatggacaacttgctgctgaccgaggatgaccaggaaactaccactcggttcctgcagaccgaagccgtgaccctgcaggacgtgagaggccgggactaccagaacgccatgcgggtgtggtccaacatccctggactgaaaagcaagcacgcacctctgacccctaaagaagaggagtacctgcaggcccaggtgcggagcagaagcaagctggacgcccctaaggtggatctgctggtgaagaattgcctcctgcccctgagagagtacttcaagtatttcagccagaatagtctgcccctgggaggcagcggcggcggcgccctggtgacatttgaggacgtcgccgtgcggttcacccaggaggaatgggctctgctggatccttctcagaaaatcctgtaccgggacgtgatgagagagacataccggaatctgacctccgtgggcatcaactgggaatgttgggaccttgaagcctgcttcagaagcctgggaagaaacctgagagtgcaggtggtgaagagaaagtgcgagctgaccaacagcggcccctgcgccgagggcggcccaagcagcggcgcccctcctcccagcggcggcagcccagccggctccccaacctctaccgaggagggcacctctgagtccgccacccccgagagcggccctggcacctccaccgagcccagcgagggcagcgcacccggcagccctgccggcagccccacctccacagaggagggaaccagcaccgagcccagcgaaggcagcgccccaggcaccagcaccgagcctagtgagcaggagattaaacggatcaacaagatcagaagaagacttgtgaaagacagcaacaccaagaaggccggcaagacaggccccatgaaaaccctgctggttagagtgatgacacccgatctgagagagcggctggaaaacctgagaaagaagcctgaaaatatcccccagcccatcagcaatacatctagagccaacctgaataagctgctgaccgattacaccgaaatgaagaaggcgatcctgcatgtgtactgggaagagttccagaaggaccctgtgggcctgatgagccgggtggcccagcctgccagcaagaagatcgatcagaacaagctgaaacctgagatggacgagaagggcaacctgaccaccgccggctttgcctgctctcagtgtggccagcccctgttcgtgtacaagctggagcaggtgtctgagaagggcaaggcttacaccaactacttcggacggtgcaatgtggccgagcacgaaaagctgatcctgctggcccagctgaagcccgagaaggatagcgacgaagccgtgacatatagcctgggaaagtttgggcagagggccctggatttctacagcattcatgtgaccaaggagtccacccaccccgtgaagcccctggcccagatcgccggaaacagatacgcctccggacctgtgggaaaggccctgagcgacgcatgtatgggcacaatcgcctccttcctgtctaagtaccaggacatcatcatcgaacaccagaaggtggtgaagggcaaccagaagagactggagagcctgcgggagctggccggcaaggaaaacctggaataccctagcgtgaccctgccacctcagcctcacaccaaggagggcgttgatgcctacaacgaagtgatcgcccgggtgcgaatgtgggtgaacctgaacctgtggcagaagctgaagctaagcagagatgatgccaagcctctgctgagactgaagggattcccttcctttcctctggtcgagagacaggccaacgaagtggactggtgggacatggtgtgtaacgtgaagaagctgatcaacgagaaaaaggaggatggcaaggtgttttggcagaatctggctggctacaagagacaggaagccctgagaccatacctgagcagcgaggaagatcggaagaagggaaagaaattcgctcggtaccagctgggcgacctgctgctgcacctggaaaagaagcacggcgaggactggggaaaggtgtacgacgaggcctgggagcggattgacaagaaagtggaaggcctgagcaagcacatcaagctggaagaggaacggagaagcgaggacgcccagagcaaggccgccctgaccgactggctgcgggctaaggccagcttcgtgatcgagggcctgaaggaggccgacaaggacgagttctgcagatgcgagctgaagctgcagaagtggtacggggacctgcggggaaagcccttcgccatcgaagccgagaacagcatcctggacatcagcggcttcagcaagcagtacaactgtgccttcatctggcagaaggacggcgtgaagaagctgaacctgtacctgatcatcaactacttcaagggcggcaagctgcggttcaagaagatcaaacctgaagccttcgaagccaacagattctacaccgtgatcaacaaaaagagcggcgagatcgtgcccatggaggtgaacttcaacttcgacgaccccaacctgatcatcctgcctctggcctttggcaagagacagggcagagaattcatctggaacgacctgctgtccctggaaaccggcagcctgaagctggccaacggaagagtgatcgagaagacactgtacaacagaagaacccggcaggatgagcctgccctgttcgtggccctgaccttcgagcggcgggaggtcctggactcctccaatatcaaaccaatgaacctgatcggcgtggcaagaggcgaaaacatccccgccgtgatcgccctgaccgaccccgagggctgcccactgagccggtttaaggatagcctgggaaacccaacccacatcctgagaatcggcgagagctataaggagaagcagcggaccatccaggccaagaaggaggtggagcagcggagagccggcggctacagccggaagtacgccagcaaagccaagaatctggcagacgatatggtgagaaacaccgctagagatctgctgtactacgccgtgacccaggatgccatgctgatcttcgccaacctgagccggggcttcggccggcagggcaagcggaccttcatggccgagagacagtacacacggatggaggactggctgaccgccaagctggcctacgagggcctgagcaagacctacctgtccaagacactggcccagtacacctccaagacatgcagcaactgtgggtttaccatcaccagcgccgactacgacagggtgctggagaagctgaagaagacagcaacaggctggatgaccacaattaacggcaaggagctgaaggtggagggccagattacctactacaacagatacaagagacagaacgtagtcaaggacctgtccgtcgagctggatagactgagcgaagaatctgtgaacaacgacatctcctcctggacaaagggcagaagcggagaagctctgagcctcctgaagaaaagattctcccatagacccgtgcaggagaagttcgtgtgcctgaactgcggcttcgagacacacgcagccgagcaagccgccctgaacatcgccagatcctggctgttcctgcggagccaggagtacaagaaataccagacaaacaagacaaccggcaacaccgataagagagccttcgtcgagacctggcagtccttttaccggaagaagcttaaggaggtgtggaaacctgccgtgcggtctggcggatctggcggaggctccatgggcaggctgatgttccaggacgtggccatcgacttcacccaggaggagtgggagtgcctggacctgagccagagggacctgtacagggacgtgatgctggagacctacggcaacctggccagcctgggcctggtggtgagcaagcccgacctggtgaccttcctggagcagatgaagaacccctgggacgtgaggaggaccgacaccaaggccacctaccccgccgtgagcagccacaacggcggcccaagcagcggcgcccctcctcccagcggcggcagcccagccggctccccaacctctaccgaggagggcacctctgagtccgccacccccgagagcggccctggcacctccaccgagcccagcgagggcagcgcacccggcagccctgccggcagccccacctccacagaggagggaaccagcaccgagcccagcgaaggcagcgccccaggcaccagcaccgagcctagtgagcaggagattaaacggatcaacaagatcagaagaagacttgtgaaagacagcaacaccaagaaggccggcaagacaggccccatgaaaaccctgctggttagagtgatgacacccgatctgagagagcggctggaaaacctgagaaagaagcctgaaaatatcccccagcccatcagcaatacatctagagccaacctgaataagctgctgaccgattacaccgaaatgaagaaggcgatcctgcatgtgtactgggaagagttccagaaggaccctgtgggcctgatgagccgggtggcccagcctgccagcaagaagatcgatcagaacaagctgaaacctgagatggacgagaagggcaacctgaccaccgccggctttgcctgctctcagtgtggccagcccctgttcgtgtacaagctggagcaggtgtctgagaagggcaaggcttacaccaactacttcggacggtgcaatgtggccgagcacgaaaagctgatcctgctggcccagctgaagcccgagaaggatagcgacgaagccgtgacatatagcctgggaaagtttgggcagagggccctggatttctacagcattcatgtgaccaaggagtccacccaccccgtgaagcccctggcccagatcgccggaaacagatacgcctccggacctgtgggaaaggccctgagcgacgcatgtatgggcacaatcgcctccttcctgtctaagtaccaggacatcatcatcgaacaccagaaggtggtgaagggcaaccagaagagactggagagcctgcgggagctggccggcaaggaaaacctggaataccctagcgtgaccctgccacctcagcctcacaccaaggagggcgttgatgcctacaacgaagtgatcgcccgggtgcgaatgtgggtgaacctgaacctgtggcagaagctgaagctaagcagagatgatgccaagcctctgctgagactgaagggattcccttcctttcctctggtcgagagacaggccaacgaagtggactggtgggacatggtgtgtaacgtgaagaagctgatcaacgagaaaaaggaggatggcaaggtgttttggcagaatctggctggctacaagagacaggaagccctgagaccatacctgagcagcgaggaagatcggaagaagggaaagaaattcgctcggtaccagctgggcgacctgctgctgcacctggaaaagaagcacggcgaggactggggaaaggtgtacgacgaggcctgggagcggattgacaagaaagtggaaggcctgagcaagcacatcaagctggaagaggaacggagaagcgaggacgcccagagcaaggccgccctgaccgactggctgcgggctaaggccagcttcgtgatcgagggcctgaaggaggccgacaaggacgagttctgcagatgcgagctgaagctgcagaagtggtacggggacctgcggggaaagcccttcgccatcgaagccgagaacagcatcctggacatcagcggcttcagcaagcagtacaactgtgccttcatctggcagaaggacggcgtgaagaagctgaacctgtacctgatcatcaactacttcaagggcggcaagctgcggttcaagaagatcaaacctgaagccttcgaagccaacagattctacaccgtgatcaacaaaaagagcggcgagatcgtgcccatggaggtgaacttcaacttcgacgaccccaacctgatcatcctgcctctggcctttggcaagagacagggcagagaattcatctggaacgacctgctgtccctggaaaccggcagcctgaagctggccaacggaagagtgatcgagaagacactgtacaacagaagaacccggcaggatgagcctgccctgttcgtggccctgaccttcgagcggcgggaggtcctggactcctccaatatcaaaccaatgaacctgatcggcgtggcaagaggcgaaaacatccccgccgtgatcgccctgaccgaccccgagggctgcccactgagccggtttaaggatagcctgggaaacccaacccacatcctgagaatcggcgagagctataaggagaagcagcggaccatccaggccaagaaggaggtggagcagcggagagccggcggctacagccggaagtacgccagcaaagccaagaatctggcagacgatatggtgagaaacaccgctagagatctgctgtactacgccgtgacccaggatgccatgctgatcttcgccaacctgagccggggcttcggccggcagggcaagcggaccttcatggccgagagacagtacacacggatggaggactggctgaccgccaagctggcctacgagggcctgagcaagacctacctgtccaagacactggcccagtacacctccaagacatgcagcaactgtgggtttaccatcaccagcgccgactacgacagggtgctggagaagctgaagaagacagcaacaggctggatgaccacaattaacggcaaggagctgaaggtggagggccagattacctactacaacagatacaagagacagaacgtagtcaaggacctgtccgtcgagctggatagactgagcgaagaatctgtgaacaacgacatctcctcctggacaaagggcagaagcggagaagctctgagcctcctgaagaaaagattctcccatagacccgtgcaggagaagttcgtgtgcctgaactgcggcttcgagacacacgcagccgagcaagccgccctgaacatcgccagatcctggctgttcctgcggagccaggagtacaagaaataccagacaaacaagacaaccggcaacaccgataagagagccttcgtcgagacctggcagtccttttaccggaagaagcttaaggaggtgtggaaacctgccgtgcggtctggcggatctggcggaggctcctatgggcaggctgatgttccaggacgtggccatcgacttcacccaggaggagtgggagtgcctggacctgagccagagggacctgtacagggacgtgatgctggagacctacggcaacctggccagcctgggcctggtggtgagcaagcccgacctggtgaccttcctggagcagatgaagaacccctgggacgtgaggaggaccgacaccaaggccacctaccccgccgtgagcagccacaacggatctggctccggcagcggccccaagaaaaagagaaaagtctaagctgccttctgcggggcttgccttctggccatgcccttcttctctcccttgcacctgtacctcttggtctttgaataaagcctgagtaggaaggctagcaaaaaaaaaaaaaaaaaaaaaaaaaaaaaaaaaaaaaaaaaaaaaaaaaaaaaaaaaaaaaaaaaaaaaaaaaaaaaaaa

SEQ ID NO: 16439 - RNA, 9485 nt, synthetic construct
  source 1..9485: mol_type = other RNA
aggaaataagagagaaaagaagagtaagaagaaatataagagccaccatggcccctaagaagaagcgtaaagtgagccggatggaacgcctcgtctacgaggtgcggcagaagtgcagaaacatcgaggacatctgcatctcctgcggatctctgaacgtgaccctggagcacccactgttcatcggcggcatgtgccagaactgtaaaaactgttttctggagtgtgcctatcaatacgacgatgacggctaccagagctactgcaccatctgttgcggcggaagagaggtgctgatgtgtggaaataacaactgctgccggtgcttctgcgtggaatgcgtggacctgctggtgggccccggcgccgcccaggccgctattaaggaagatccttggaactgctacatgtgcggccacaagggcacatacggcctgctgagacggagagaggactggcctagcagactgcagatgttcttcgccaataaccacgaccaggagttcgacccccctaaggtgtaccctcccgtccccgccgagaagagaaagcccatccgggtcctgagcctgttcgatggcatcgccaccggtctgctggtgctgaaggacctgggcatccaggtggataggtacattgcctccgaggtgtgcgaggactccatcaccgtgggaatggtgcgtcatcagggcaagatcatgtacgtgggcgacgtgcggagcgtgacacagaagcatatccaggagtggggccctttcgacctggtgatcggcggcagcccttgcaatgacctgagcatcgtgaacccagcccggaagggcctgtacgagggaaccggcagactgttcttcgagttttacagactgctgcacgacgcccggcctaaggaaggcgacgaccggcccttcttttggctgttcgagaatgtggtggccatgggagtcagcgacaagcgggatattagccggttcctggagagcaaccccgtgatgatcgatgccaaggaagtgagcgccgcccaccgggccagatacttctggggcaatctgcctggcatgaacagacccctggccagcaccgtgaacgacaagctggagctgcaggagtgcctggagcacggccggatcgccaagttcagcaaggtgagaaccatcaccacccgaagcaacagcatcaaacaaggcaaggaccagcactttcctgtgttcatgaacgagaaggaggacatcctgtggtgtaccgagatggagagagtgttcgggttcccagtccactacacagatgtcagcaacatgtctagactggccagacagagactgctgggaagaagctggtccgtccctgtgatcagacacctgttcgcccctctgaaggagtacttcgcctgcgtgagcagcggcaacagcaacgccaacagccggggccccagcttctctagcggcctggtgccactgtccctgagagggagccacatgggccccatggagatctacaaaaccgtgagcgcctggaagcggcagcctgtgcgcgtgctgagcctgtttcggaatatcgataaagtcctgaaaagcctgggattcctggagagcggctctggctccggcggtggcaccctgaagtacgtggaggatgtgacaaacgtggtcagacgggatgtggagaagtggggccccttcgatctggtgtacggcagcacccaacccctgggcagctcttgtgaccggtgccctggctggtacatgtttcagttccaccggatcctgcagtacgccctgccgagacaggagtcccagcggccattcttttggattttcatggacaacttgctgctgaccgaggatgaccaggaaactaccactcggttcctgcagaccgaagccgtgaccctgcaggacgtgagaggccgggactaccagaacgccatgcgggtgtggtccaacatccctggactgaaaagcaagcacgcacctctgacccctaaagaagaggagtacctgcaggcccaggtgcggagcagaagcaagctggacgcccctaaggtggatctgctggtgaagaattgcctcctgcccctgagagagtacttcaagtatttcagccagaatagtctgcccctgggaggcagcggcggcggcgccctggtgacatttgaggacgtcgccgtgcggttcacccaggaggaatgggctctgctggatccttctcagaaaatcctgtaccgggacgtgatgagagagacataccggaatctgacctccgtgggcatcaactgggaatgttgggaccttgaagcctgcttcagaagcctgggaagaaacctgagagtgcaggtggtgaagagaaagtgcgagctgaccaacagcggcccctgcgccgagggcggcccaagcagcggcgcccctcctcccagcggcggcagcccagccggctccccaacctctaccgaggagggcacctctgagtccgccacccccgagagcggccctggcacctccaccgagcccagcgagggcagcgcacccggcagccctgccggcagccccacctccacagaggagggaaccagcaccgagcccagcgaaggcagcgccccaggcaccagcaccgagcctagtgagcaggagattaaacggatcaacaagatcagaagaagacttgtgaaagacagcaacaccaagaaggccggcaagacaggccccatgaaaaccctgctggttagagtgatgacacccgatctgagagagcggctggaaaacctgagaaagaagcctgaaaatatcccccagcccatcagcaatacatctagagccaacctgaataagctgctgaccgattacaccgaaatgaagaaggcgatcctgcatgtgtactgggaagagttccagaaggaccctgtgggcctgatgagccgggtggcccagcctgccagcaagaagatcgatcagaacaagctgaaacctgagatggacgagaagggcaacctgaccaccgccggctttgcctgctctcagtgtggccagcccctgttcgtgtacaagctggagcaggtgtctgagaagggcaaggcttacaccaactacttcggacggtgcaatgtggccgagcacgaaaagctgatcctgctggcccagctgaagcccgagaaggatagcgacgaagccgtgacatatagcctgggaaagtttgggcagagggccctggatttctacagcattcatgtgaccaaggagtccacccaccccgtgaagcccctggcccagatcgccggaaacagatacgcctccggacctgtgggaaaggccctgagcgacgcatgtatgggcacaatcgcctccttcctgtctaagtaccaggacatcatcatcgaacaccagaaggtggtgaagggcaaccagaagagactggagagcctgcgggagctggccggcaaggaaaacctggaataccctagcgtgaccctgccacctcagcctcacaccaaggagggcgttgatgcctacaacgaagtgatcgcccgggtgcgaatgtgggtgaacctgaacctgtggcagaagctgaagctaagcagagatgatgccaagcctctgctgagactgaagggattcccttcctttcctctggtcgagagacaggccaacgaagtggactggtgggacatggtgtgtaacgtgaagaagctgatcaacgagaaaaaggaggatggcaaggtgttttggcagaatctggctggctacaagagacaggaagccctgagaccatacctgagcagcgaggaagatcggaagaagggaaagaaattcgctcggtaccagctgggcgacctgctgctgcacctggaaaagaagcacggcgaggactggggaaaggtgtacgacgaggcctgggagcggattgacaagaaagtggaaggcctgagcaagcacatcaagctggaagaggaacggagaagcgaggacgcccagagcaaggccgccctgaccgactggctgcgggctaaggccagcttcgtgatcgagggcctgaaggaggccgacaaggacgagttctgcagatgcgagctgaagctgcagaagtggtacggggacctgcggggaaagcccttcgccatcgaagccgagaacagcatcctggacatcagcggcttcagcaagcagtacaactgtgccttcatctggcagaaggacggcgtgaagaagctgaacctgtacctgatcatcaactacttcaagggcggcaagctgcggttcaagaagatcaaacctgaagccttcgaagccaacagattctacaccgtgatcaacaaaaagagcggcgagatcgtgcccatggaggtgaacttcaacttcgacgaccccaacctgatcatcctgcctctggcctttggcaagagacagggcagagaattcatctggaacgacctgctgtccctggaaaccggcagcctgaagctggccaacggaagagtgatcgagaagacactgtacaacagaagaacccggcaggatgagcctgccctgttcgtggccctgaccttcgagcggcgggaggtcctggactcctccaatatcaaaccaatgaacctgatcggcgtggcaagaggcgaaaacatccccgccgtgatcgccctgaccgaccccgagggctgcccactgagccggtttaaggatagcctgggaaacccaacccacatcctgagaatcggcgagagctataaggagaagcagcggaccatccaggccaagaaggaggtggagcagcggagagccggcggctacagccggaagtacgccagcaaagccaagaatctggcagacgatatggtgagaaacaccgctagagatctgctgtactacgccgtgacccaggatgccatgctgatcttcgccaacctgagccggggcttcggccggcagggcaagcggaccttcatggccgagagacagtacacacggatggaggactggctgaccgccaagctggcctacgagggcctgagcaagacctacctgtccaagacactggcccagtacacctccaagacatgcagcaactgtgggtttaccatcaccagcgccgactacgacagggtgctggagaagctgaagaagacagcaacaggctggatgaccacaattaacggcaaggagctgaaggtggagggccagattacctactacaacagatacaagagacagaacgtagtcaaggacctgtccgtcgagctggatagactgagcgaagaatctgtgaacaacgacatctcctcctggacaaagggcagaagcggagaagctctgagcctcctgaagaaaagattctcccatagacccgtgcaggagaagttcgtgtgcctgaactgcggcttcgagacacacgcagccgagcaagccgccctgaacatcgccagatcctggctgttcctgcggagccaggagtacaagaaataccagacaaacaagacaaccggcaacaccgataagagagccttcgtcgagacctggcagtccttttaccggaagaagcttaaggaggtgtggaaacctgccgtgcggtctggcggatctggcggaggctccttcctgatgcccgtgaccttcgaggaggtggccgtgtacttcacccccggccagggcgccctgctggaccccgcccagagggccctgtacagggacgtgatgcaggagaactacgagaccgtggccagcctgggcttcagcatccccaagcccgacctgatcgcccagctggagcagggcgaggagccctgggtgcccgacctgcagcccagcaaggagatggtgatcctgaggggcatctgcggcggcccaagcagcggcgcccctcctcccagcggcggcagcccagccggctccccaacctctaccgaggagggcacctctgagtccgccacccccgagagcggccctggcacctccaccgagcccagcgagggcagcgcacccggcagccctgccggcagccccacctccacagaggagggaaccagcaccgagcccagcgaaggcagcgccccaggcaccagcaccgagcctagtgagcaggagattaaacggatcaacaagatcagaagaagacttgtgaaagacagcaacaccaagaaggccggcaagacaggccccatgaaaaccctgctggttagagtgatgacacccgatctgagagagcggctggaaaacctgagaaagaagcctgaaaatatcccccagcccatcagcaatacatctagagccaacctgaataagctgctgaccgattacaccgaaatgaagaaggcgatcctgcatgtgtactgggaagagttccagaaggaccctgtgggcctgatgagccgggtggcccagcctgccagcaagaagatcgatcagaacaagctgaaacctgagatggacgagaagggcaacctgaccaccgccggctttgcctgctctcagtgtggccagcccctgttcgtgtacaagctggagcaggtgtctgagaagggcaaggcttacaccaactacttcggacggtgcaatgtggccgagcacgaaaagctgatcctgctggcccagctgaagcccgagaaggatagcgacgaagccgtgacatatagcctgggaaagtttgggcagagggccctggatttctacagcattcatgtgaccaaggagtccacccaccccgtgaagcccctggcccagatcgccggaaacagatacgcctccggacctgtgggaaaggccctgagcgacgcatgtatgggcacaatcgcctccttcctgtctaagtaccaggacatcatcatcgaacaccagaaggtggtgaagggcaaccagaagagactggagagcctgcgggagctggccggcaaggaaaacctggaataccctagcgtgaccctgccacctcagcctcacaccaaggagggcgttgatgcctacaacgaagtgatcgcccgggtgcgaatgtgggtgaacctgaacctgtggcagaagctgaagctaagcagagatgatgccaagcctctgctgagactgaagggattcccttcctttcctctggtcgagagacaggccaacgaagtggactggtgggacatggtgtgtaacgtgaagaagctgatcaacgagaaaaaggaggatggcaaggtgttttggcagaatctggctggctacaagagacaggaagccctgagaccatacctgagcagcgaggaagatcggaagaagggaaagaaattcgctcggtaccagctgggcgacctgctgctgcacctggaaaagaagcacggcgaggactggggaaaggtgtacgacgaggcctgggagcggattgacaagaaagtggaaggcctgagcaagcacatcaagctggaagaggaacggagaagcgaggacgcccagagcaaggccgccctgaccgactggctgcgggctaaggccagcttcgtgatcgagggcctgaaggaggccgacaaggacgagttctgcagatgcgagctgaagctgcagaagtggtacggggacctgcggggaaagcccttcgccatcgaagccgagaacagcatcctggacatcagcggcttcagcaagcagtacaactgtgccttcatctggcagaaggacggcgtgaagaagctgaacctgtacctgatcatcaactacttcaagggcggcaagctgcggttcaagaagatcaaacctgaagccttcgaagccaacagattctacaccgtgatcaacaaaaagagcggcgagatcgtgcccatggaggtgaacttcaacttcgacgaccccaacctgatcatcctgcctctggcctttggcaagagacagggcagagaattcatctggaacgacctgctgtccctggaaaccggcagcctgaagctggccaacggaagagtgatcgagaagacactgtacaacagaagaacccggcaggatgagcctgccctgttcgtggccctgaccttcgagcggcgggaggtcctggactcctccaatatcaaaccaatgaacctgatcggcgtggcaagaggcgaaaacatccccgccgtgatcgccctgaccgaccccgagggctgcccactgagccggtttaaggatagcctgggaaacccaacccacatcctgagaatcggcgagagctataaggagaagcagcggaccatccaggccaagaaggaggtggagcagcggagagccggcggctacagccggaagtacgccagcaaagccaagaatctggcagacgatatggtgagaaacaccgctagagatctgctgtactacgccgtgacccaggatgccatgctgatcttcgccaacctgagccggggcttcggccggcagggcaagcggaccttcatggccgagagacagtacacacggatggaggactggctgaccgccaagctggcctacgagggcctgagcaagacctacctgtccaagacactggcccagtacacctccaagacatgcagcaactgtgggtttaccatcaccagcgccgactacgacagggtgctggagaagctgaagaagacagcaacaggctggatgaccacaattaacggcaaggagctgaaggtggagggccagattacctactacaacagatacaagagacagaacgtagtcaaggacctgtccgtcgagctggatagactgagcgaagaatctgtgaacaacgacatctcctcctggacaaagggcagaagcggagaagctctgagcctcctgaagaaaagattctcccatagacccgtgcaggagaagttcgtgtgcctgaactgcggcttcgagacacacgcagccgagcaagccgccctgaacatcgccagatcctggctgttcctgcggagccaggagtacaagaaataccagacaaacaagacaaccggcaacaccgataagagagccttcgtcgagacctggcagtccttttaccggaagaagcttaaggaggtgtggaaacctgccgtgcggtctggcggatctggcggaggctcctttcctgatgcccgtgaccttcgaggaggtggccgtgtacttcacccccggccagggcgccctgctggaccccgcccagagggccctgtacagggacgtgatgcaggagaactacgagaccgtggccagcctgggcttcagcatccccaagcccgacctgatcgcccagctggagcagggcgaggagccctgggtgcccgacctgcagcccagcaaggagatggtgatcctgaggggcatctgcggatctggctccggcagcggccccaagaaaaagagaaaagtctaagctgccttctgcggggcttgccttctggccatgcccttcttctctcccttgcacctgtacctcttggtctttgaataaagcctgagtaggaaggctagcaaaaaaaaaaaaaaaaaaaaaaaaaaaaaaaaaaaaaaaaaaaaaaaaaaaaaaaaaaaaaaaaaaaaaaaaaaaaaaaa

SEQ ID NO: 16440 - RNA, 9485 nt, synthetic construct
  source 1..9485: mol_type = other RNA
aggaaataagagagaaaagaagagtaagaagaaatataagagccaccatggcccctaagaagaagcgtaaagtgagccggatggaacgcctcgtctacgaggtgcggcagaagtgcagaaacatcgaggacatctgcatctcctgcggatctctgaacgtgaccctggagcacccactgttcatcggcggcatgtgccagaactgtaaaaactgttttctggagtgtgcctatcaatacgacgatgacggctaccagagctactgcaccatctgttgcggcggaagagaggtgctgatgtgtggaaataacaactgctgccggtgcttctgcgtggaatgcgtggacctgctggtgggccccggcgccgcccaggccgctattaaggaagatccttggaactgctacatgtgcggccacaagggcacatacggcctgctgagacggagagaggactggcctagcagactgcagatgttcttcgccaataaccacgaccaggagttcgacccccctaaggtgtaccctcccgtccccgccgagaagagaaagcccatccgggtcctgagcctgttcgatggcatcgccaccggtctgctggtgctgaaggacctgggcatccaggtggataggtacattgcctccgaggtgtgcgaggactccatcaccgtgggaatggtgcgtcatcagggcaagatcatgtacgtgggcgacgtgcggagcgtgacacagaagcatatccaggagtggggccctttcgacctggtgatcggcggcagcccttgcaatgacctgagcatcgtgaacccagcccggaagggcctgtacgagggaaccggcagactgttcttcgagttttacagactgctgcacgacgcccggcctaaggaaggcgacgaccggcccttcttttggctgttcgagaatgtggtggccatgggagtcagcgacaagcgggatattagccggttcctggagagcaaccccgtgatgatcgatgccaaggaagtgagcgccgcccaccgggccagatacttctggggcaatctgcctggcatgaacagacccctggccagcaccgtgaacgacaagctggagctgcaggagtgcctggagcacggccggatcgccaagttcagcaaggtgagaaccatcaccacccgaagcaacagcatcaaacaaggcaaggaccagcactttcctgtgttcatgaacgagaaggaggacatcctgtggtgtaccgagatggagagagtgttcgggttcccagtccactacacagatgtcagcaacatgtctagactggccagacagagactgctgggaagaagctggtccgtccctgtgatcagacacctgttcgcccctctgaaggagtacttcgcctgcgtgagcagcggcaacagcaacgccaacagccggggccccagcttctctagcggcctggtgccactgtccctgagagggagccacatgggccccatggagatctacaaaaccgtgagcgcctggaagcggcagcctgtgcgcgtgctgagcctgtttcggaatatcgataaagtcctgaaaagcctgggattcctggagagcggctctggctccggcggtggcaccctgaagtacgtggaggatgtgacaaacgtggtcagacgggatgtggagaagtggggccccttcgatctggtgtacggcagcacccaacccctgggcagctcttgtgaccggtgccctggctggtacatgtttcagttccaccggatcctgcagtacgccctgccgagacaggagtcccagcggccattcttttggattttcatggacaacttgctgctgaccgaggatgaccaggaaactaccactcggttcctgcagaccgaagccgtgaccctgcaggacgtgagaggccgggactaccagaacgccatgcgggtgtggtccaacatccctggactgaaaagcaagcacgcacctctgacccctaaagaagaggagtacctgcaggcccaggtgcggagcagaagcaagctggacgcccctaaggtggatctgctggtgaagaattgcctcctgcccctgagagagtacttcaagtatttcagccagaatagtctgcccctgggaggcagcggcggcggcgccctggtgacatttgaggacgtcgccgtgcggttcacccaggaggaatgggctctgctggatccttctcagaaaatcctgtaccgggacgtgatgagagagacataccggaatctgacctccgtgggcatcaactgggaatgttgggaccttgaagcctgcttcagaagcctgggaagaaacctgagagtgcaggtggtgaagagaaagtgcgagctgaccaacagcggcccctgcgccgagggcggcccaagcagcggcgcccctcctcccagcggcggcagcccagccggctccccaacctctaccgaggagggcacctctgagtccgccacccccgagagcggccctggcacctccaccgagcccagcgagggcagcgcacccggcagccctgccggcagccccacctccacagaggagggaaccagcaccgagcccagcgaaggcagcgccccaggcaccagcaccgagcctagtgagcaggagattaaacggatcaacaagatcagaagaagacttgtgaaagacagcaacaccaagaaggccggcaagacaggccccatgaaaaccctgctggttagagtgatgacacccgatctgagagagcggctggaaaacctgagaaagaagcctgaaaatatcccccagcccatcagcaatacatctagagccaacctgaataagctgctgaccgattacaccgaaatgaagaaggcgatcctgcatgtgtactgggaagagttccagaaggaccctgtgggcctgatgagccgggtggcccagcctgccagcaagaagatcgatcagaacaagctgaaacctgagatggacgagaagggcaacctgaccaccgccggctttgcctgctctcagtgtggccagcccctgttcgtgtacaagctggagcaggtgtctgagaagggcaaggcttacaccaactacttcggacggtgcaatgtggccgagcacgaaaagctgatcctgctggcccagctgaagcccgagaaggatagcgacgaagccgtgacatatagcctgggaaagtttgggcagagggccctggatttctacagcattcatgtgaccaaggagtccacccaccccgtgaagcccctggcccagatcgccggaaacagatacgcctccggacctgtgggaaaggccctgagcgacgcatgtatgggcacaatcgcctccttcctgtctaagtaccaggacatcatcatcgaacaccagaaggtggtgaagggcaaccagaagagactggagagcctgcgggagctggccggcaaggaaaacctggaataccctagcgtgaccctgccacctcagcctcacaccaaggagggcgttgatgcctacaacgaagtgatcgcccgggtgcgaatgtgggtgaacctgaacctgtggcagaagctgaagctaagcagagatgatgccaagcctctgctgagactgaagggattcccttcctttcctctggtcgagagacaggccaacgaagtggactggtgggacatggtgtgtaacgtgaagaagctgatcaacgagaaaaaggaggatggcaaggtgttttggcagaatctggctggctacaagagacaggaagccctgagaccatacctgagcagcgaggaagatcggaagaagggaaagaaattcgctcggtaccagctgggcgacctgctgctgcacctggaaaagaagcacggcgaggactggggaaaggtgtacgacgaggcctgggagcggattgacaagaaagtggaaggcctgagcaagcacatcaagctggaagaggaacggagaagcgaggacgcccagagcaaggccgccctgaccgactggctgcgggctaaggccagcttcgtgatcgagggcctgaaggaggccgacaaggacgagttctgcagatgcgagctgaagctgcagaagtggtacggggacctgcggggaaagcccttcgccatcgaagccgagaacagcatcctggacatcagcggcttcagcaagcagtacaactgtgccttcatctggcagaaggacggcgtgaagaagctgaacctgtacctgatcatcaactacttcaagggcggcaagctgcggttcaagaagatcaaacctgaagccttcgaagccaacagattctacaccgtgatcaacaaaaagagcggcgagatcgtgcccatggaggtgaacttcaacttcgacgaccccaacctgatcatcctgcctctggcctttggcaagagacagggcagagaattcatctggaacgacctgctgtccctggaaaccggcagcctgaagctggccaacggaagagtgatcgagaagacactgtacaacagaagaacccggcaggatgagcctgccctgttcgtggccctgaccttcgagcggcgggaggtcctggactcctccaatatcaaaccaatgaacctgatcggcgtggcaagaggcgaaaacatccccgccgtgatcgccctgaccgaccccgagggctgcccactgagccggtttaaggatagcctgggaaacccaacccacatcctgagaatcggcgagagctataaggagaagcagcggaccatccaggccaagaaggaggtggagcagcggagagccggcggctacagccggaagtacgccagcaaagccaagaatctggcagacgatatggtgagaaacaccgctagagatctgctgtactacgccgtgacccaggatgccatgctgatcttcgccaacctgagccggggcttcggccggcagggcaagcggaccttcatggccgagagacagtacacacggatggaggactggctgaccgccaagctggcctacgagggcctgagcaagacctacctgtccaagacactggcccagtacacctccaagacatgcagcaactgtgggtttaccatcaccagcgccgactacgacagggtgctggagaagctgaagaagacagcaacaggctggatgaccacaattaacggcaaggagctgaaggtggagggccagattacctactacaacagatacaagagacagaacgtagtcaaggacctgtccgtcgagctggatagactgagcgaagaatctgtgaacaacgacatctcctcctggacaaagggcagaagcggagaagctctgagcctcctgaagaaaagattctcccatagacccgtgcaggagaagttcgtgtgcctgaactgcggcttcgagacacacgcagccgagcaagccgccctgaacatcgccagatcctggctgttcctgcggagccaggagtacaagaaataccagacaaacaagacaaccggcaacaccgataagagagccttcgtcgagacctggcagtccttttaccggaagaagcttaaggaggtgtggaaacctgccgtgcggtctggcggatctggcggaggctcctgcgagggcagcgtgagcttcgaggacgtgaccatggacttcagcagggaggagtggcagcagctggaccccgcccagaggtgcctgtaccaggacgtgatgctggagatctacagccacctgctgttcgtgggctacaacatccccaaccccgagatcatcagcaggatggagaagggcgaggagccctggatgagggagatccagctgccccaccagaggcacagggagagggccttcggcggcggcccaagcagcggcgcccctcctcccagcggcggcagcccagccggctccccaacctctaccgaggagggcacctctgagtccgccacccccgagagcggccctggcacctccaccgagcccagcgagggcagcgcacccggcagccctgccggcagccccacctccacagaggagggaaccagcaccgagcccagcgaaggcagcgccccaggcaccagcaccgagcctagtgagcaggagattaaacggatcaacaagatcagaagaagacttgtgaaagacagcaacaccaagaaggccggcaagacaggccccatgaaaaccctgctggttagagtgatgacacccgatctgagagagcggctggaaaacctgagaaagaagcctgaaaatatcccccagcccatcagcaatacatctagagccaacctgaataagctgctgaccgattacaccgaaatgaagaaggcgatcctgcatgtgtactgggaagagttccagaaggaccctgtgggcctgatgagccgggtggcccagcctgccagcaagaagatcgatcagaacaagctgaaacctgagatggacgagaagggcaacctgaccaccgccggctttgcctgctctcagtgtggccagcccctgttcgtgtacaagctggagcaggtgtctgagaagggcaaggcttacaccaactacttcggacggtgcaatgtggccgagcacgaaaagctgatcctgctggcccagctgaagcccgagaaggatagcgacgaagccgtgacatatagcctgggaaagtttgggcagagggccctggatttctacagcattcatgtgaccaaggagtccacccaccccgtgaagcccctggcccagatcgccggaaacagatacgcctccggacctgtgggaaaggccctgagcgacgcatgtatgggcacaatcgcctccttcctgtctaagtaccaggacatcatcatcgaacaccagaaggtggtgaagggcaaccagaagagactggagagcctgcgggagctggccggcaaggaaaacctggaataccctagcgtgaccctgccacctcagcctcacaccaaggagggcgttgatgcctacaacgaagtgatcgcccgggtgcgaatgtgggtgaacctgaacctgtggcagaagctgaagctaagcagagatgatgccaagcctctgctgagactgaagggattcccttcctttcctctggtcgagagacaggccaacgaagtggactggtgggacatggtgtgtaacgtgaagaagctgatcaacgagaaaaaggaggatggcaaggtgttttggcagaatctggctggctacaagagacaggaagccctgagaccatacctgagcagcgaggaagatcggaagaagggaaagaaattcgctcggtaccagctgggcgacctgctgctgcacctggaaaagaagcacggcgaggactggggaaaggtgtacgacgaggcctgggagcggattgacaagaaagtggaaggcctgagcaagcacatcaagctggaagaggaacggagaagcgaggacgcccagagcaaggccgccctgaccgactggctgcgggctaaggccagcttcgtgatcgagggcctgaaggaggccgacaaggacgagttctgcagatgcgagctgaagctgcagaagtggtacggggacctgcggggaaagcccttcgccatcgaagccgagaacagcatcctggacatcagcggcttcagcaagcagtacaactgtgccttcatctggcagaaggacggcgtgaagaagctgaacctgtacctgatcatcaactacttcaagggcggcaagctgcggttcaagaagatcaaacctgaagccttcgaagccaacagattctacaccgtgatcaacaaaaagagcggcgagatcgtgcccatggaggtgaacttcaacttcgacgaccccaacctgatcatcctgcctctggcctttggcaagagacagggcagagaattcatctggaacgacctgctgtccctggaaaccggcagcctgaagctggccaacggaagagtgatcgagaagacactgtacaacagaagaacccggcaggatgagcctgccctgttcgtggccctgaccttcgagcggcgggaggtcctggactcctccaatatcaaaccaatgaacctgatcggcgtggcaagaggcgaaaacatccccgccgtgatcgccctgaccgaccccgagggctgcccactgagccggtttaaggatagcctgggaaacccaacccacatcctgagaatcggcgagagctataaggagaagcagcggaccatccaggccaagaaggaggtggagcagcggagagccggcggctacagccggaagtacgccagcaaagccaagaatctggcagacgatatggtgagaaacaccgctagagatctgctgtactacgccgtgacccaggatgccatgctgatcttcgccaacctgagccggggcttcggccggcagggcaagcggaccttcatggccgagagacagtacacacggatggaggactggctgaccgccaagctggcctacgagggcctgagcaagacctacctgtccaagacactggcccagtacacctccaagacatgcagcaactgtgggtttaccatcaccagcgccgactacgacagggtgctggagaagctgaagaagacagcaacaggctggatgaccacaattaacggcaaggagctgaaggtggagggccagattacctactacaacagatacaagagacagaacgtagtcaaggacctgtccgtcgagctggatagactgagcgaagaatctgtgaacaacgacatctcctcctggacaaagggcagaagcggagaagctctgagcctcctgaagaaaagattctcccatagacccgtgcaggagaagttcgtgtgcctgaactgcggcttcgagacacacgcagccgagcaagccgccctgaacatcgccagatcctggctgttcctgcggagccaggagtacaagaaataccagacaaacaagacaaccggcaacaccgataagagagccttcgtcgagacctggcagtccttttaccggaagaagcttaaggaggtgtggaaacctgccgtgcggtctggcggatctggcggaggctccttgcgagggcagcgtgagcttcgaggacgtgaccatggacttcagcagggaggagtggcagcagctggaccccgcccagaggtgcctgtaccaggacgtgatgctggagatctacagccacctgctgttcgtgggctacaacatccccaaccccgagatcatcagcaggatggagaagggcgaggagccctggatgagggagatccagctgccccaccagaggcacagggagagggccttcggcggatctggctccggcagcggccccaagaaaaagagaaaagtctaagctgccttctgcggggcttgccttctggccatgcccttcttctctcccttgcacctgtacctcttggtctttgaataaagcctgagtaggaaggctagcaaaaaaaaaaaaaaaaaaaaaaaaaaaaaaaaaaaaaaaaaaaaaaaaaaaaaaaaaaaaaaaaaaaaaaaaaaaaaaaa

SEQ ID NO: 16441 - RNA, 9485 nt, synthetic construct
  source 1..9485: mol_type = other RNA
aggaaataagagagaaaagaagagtaagaagaaatataagagccaccatggcccctaagaagaagcgtaaagtgagccggatggaacgcctcgtctacgaggtgcggcagaagtgcagaaacatcgaggacatctgcatctcctgcggatctctgaacgtgaccctggagcacccactgttcatcggcggcatgtgccagaactgtaaaaactgttttctggagtgtgcctatcaatacgacgatgacggctaccagagctactgcaccatctgttgcggcggaagagaggtgctgatgtgtggaaataacaactgctgccggtgcttctgcgtggaatgcgtggacctgctggtgggccccggcgccgcccaggccgctattaaggaagatccttggaactgctacatgtgcggccacaagggcacatacggcctgctgagacggagagaggactggcctagcagactgcagatgttcttcgccaataaccacgaccaggagttcgacccccctaaggtgtaccctcccgtccccgccgagaagagaaagcccatccgggtcctgagcctgttcgatggcatcgccaccggtctgctggtgctgaaggacctgggcatccaggtggataggtacattgcctccgaggtgtgcgaggactccatcaccgtgggaatggtgcgtcatcagggcaagatcatgtacgtgggcgacgtgcggagcgtgacacagaagcatatccaggagtggggccctttcgacctggtgatcggcggcagcccttgcaatgacctgagcatcgtgaacccagcccggaagggcctgtacgagggaaccggcagactgttcttcgagttttacagactgctgcacgacgcccggcctaaggaaggcgacgaccggcccttcttttggctgttcgagaatgtggtggccatgggagtcagcgacaagcgggatattagccggttcctggagagcaaccccgtgatgatcgatgccaaggaagtgagcgccgcccaccgggccagatacttctggggcaatctgcctggcatgaacagacccctggccagcaccgtgaacgacaagctggagctgcaggagtgcctggagcacggccggatcgccaagttcagcaaggtgagaaccatcaccacccgaagcaacagcatcaaacaaggcaaggaccagcactttcctgtgttcatgaacgagaaggaggacatcctgtggtgtaccgagatggagagagtgttcgggttcccagtccactacacagatgtcagcaacatgtctagactggccagacagagactgctgggaagaagctggtccgtccctgtgatcagacacctgttcgcccctctgaaggagtacttcgcctgcgtgagcagcggcaacagcaacgccaacagccggggccccagcttctctagcggcctggtgccactgtccctgagagggagccacatgggccccatggagatctacaaaaccgtgagcgcctggaagcggcagcctgtgcgcgtgctgagcctgtttcggaatatcgataaagtcctgaaaagcctgggattcctggagagcggctctggctccggcggtggcaccctgaagtacgtggaggatgtgacaaacgtggtcagacgggatgtggagaagtggggccccttcgatctggtgtacggcagcacccaacccctgggcagctcttgtgaccggtgccctggctggtacatgtttcagttccaccggatcctgcagtacgccctgccgagacaggagtcccagcggccattcttttggattttcatggacaacttgctgctgaccgaggatgaccaggaaactaccactcggttcctgcagaccgaagccgtgaccctgcaggacgtgagaggccgggactaccagaacgccatgcgggtgtggtccaacatccctggactgaaaagcaagcacgcacctctgacccctaaagaagaggagtacctgcaggcccaggtgcggagcagaagcaagctggacgcccctaaggtggatctgctggtgaagaattgcctcctgcccctgagagagtacttcaagtatttcagccagaatagtctgcccctgggaggcagcggcggcggcgccctggtgacatttgaggacgtcgccgtgcggttcacccaggaggaatgggctctgctggatccttctcagaaaatcctgtaccgggacgtgatgagagagacataccggaatctgacctccgtgggcatcaactgggaatgttgggaccttgaagcctgcttcagaagcctgggaagaaacctgagagtgcaggtggtgaagagaaagtgcgagctgaccaacagcggcccctgcgccgagggcggcccaagcagcggcgcccctcctcccagcggcggcagcccagccggctccccaacctctaccgaggagggcacctctgagtccgccacccccgagagcggccctggcacctccaccgagcccagcgagggcagcgcacccggcagccctgccggcagccccacctccacagaggagggaaccagcaccgagcccagcgaaggcagcgccccaggcaccagcaccgagcctagtgagcaggagattaaacggatcaacaagatcagaagaagacttgtgaaagacagcaacaccaagaaggccggcaagacaggccccatgaaaaccctgctggttagagtgatgacacccgatctgagagagcggctggaaaacctgagaaagaagcctgaaaatatcccccagcccatcagcaatacatctagagccaacctgaataagctgctgaccgattacaccgaaatgaagaaggcgatcctgcatgtgtactgggaagagttccagaaggaccctgtgggcctgatgagccgggtggcccagcctgccagcaagaagatcgatcagaacaagctgaaacctgagatggacgagaagggcaacctgaccaccgccggctttgcctgctctcagtgtggccagcccctgttcgtgtacaagctggagcaggtgtctgagaagggcaaggcttacaccaactacttcggacggtgcaatgtggccgagcacgaaaagctgatcctgctggcccagctgaagcccgagaaggatagcgacgaagccgtgacatatagcctgggaaagtttgggcagagggccctggatttctacagcattcatgtgaccaaggagtccacccaccccgtgaagcccctggcccagatcgccggaaacagatacgcctccggacctgtgggaaaggccctgagcgacgcatgtatgggcacaatcgcctccttcctgtctaagtaccaggacatcatcatcgaacaccagaaggtggtgaagggcaaccagaagagactggagagcctgcgggagctggccggcaaggaaaacctggaataccctagcgtgaccctgccacctcagcctcacaccaaggagggcgttgatgcctacaacgaagtgatcgcccgggtgcgaatgtgggtgaacctgaacctgtggcagaagctgaagctaagcagagatgatgccaagcctctgctgagactgaagggattcccttcctttcctctggtcgagagacaggccaacgaagtggactggtgggacatggtgtgtaacgtgaagaagctgatcaacgagaaaaaggaggatggcaaggtgttttggcagaatctggctggctacaagagacaggaagccctgagaccatacctgagcagcgaggaagatcggaagaagggaaagaaattcgctcggtaccagctgggcgacctgctgctgcacctggaaaagaagcacggcgaggactggggaaaggtgtacgacgaggcctgggagcggattgacaagaaagtggaaggcctgagcaagcacatcaagctggaagaggaacggagaagcgaggacgcccagagcaaggccgccctgaccgactggctgcgggctaaggccagcttcgtgatcgagggcctgaaggaggccgacaaggacgagttctgcagatgcgagctgaagctgcagaagtggtacggggacctgcggggaaagcccttcgccatcgaagccgagaacagcatcctggacatcagcggcttcagcaagcagtacaactgtgccttcatctggcagaaggacggcgtgaagaagctgaacctgtacctgatcatcaactacttcaagggcggcaagctgcggttcaagaagatcaaacctgaagccttcgaagccaacagattctacaccgtgatcaacaaaaagagcggcgagatcgtgcccatggaggtgaacttcaacttcgacgaccccaacctgatcatcctgcctctggcctttggcaagagacagggcagagaattcatctggaacgacctgctgtccctggaaaccggcagcctgaagctggccaacggaagagtgatcgagaagacactgtacaacagaagaacccggcaggatgagcctgccctgttcgtggccctgaccttcgagcggcgggaggtcctggactcctccaatatcaaaccaatgaacctgatcggcgtggcaagaggcgaaaacatccccgccgtgatcgccctgaccgaccccgagggctgcccactgagccggtttaaggatagcctgggaaacccaacccacatcctgagaatcggcgagagctataaggagaagcagcggaccatccaggccaagaaggaggtggagcagcggagagccggcggctacagccggaagtacgccagcaaagccaagaatctggcagacgatatggtgagaaacaccgctagagatctgctgtactacgccgtgacccaggatgccatgctgatcttcgccaacctgagccggggcttcggccggcagggcaagcggaccttcatggccgagagacagtacacacggatggaggactggctgaccgccaagctggcctacgagggcctgagcaagacctacctgtccaagacactggcccagtacacctccaagacatgcagcaactgtgggtttaccatcaccagcgccgactacgacagggtgctggagaagctgaagaagacagcaacaggctggatgaccacaattaacggcaaggagctgaaggtggagggccagattacctactacaacagatacaagagacagaacgtagtcaaggacctgtccgtcgagctggatagactgagcgaagaatctgtgaacaacgacatctcctcctggacaaagggcagaagcggagaagctctgagcctcctgaagaaaagattctcccatagacccgtgcaggagaagttcgtgtgcctgaactgcggcttcgagacacacgcagccgagcaagccgccctgaacatcgccagatcctggctgttcctgcggagccaggagtacaagaaataccagacaaacaagacaaccggcaacaccgataagagagccttcgtcgagacctggcagtccttttaccggaagaagcttaaggaggtgtggaaacctgccgtgcggtctggcggatctggcggaggctcccagggcctggtgagcttcaaggacgtggccgtggacttcacccaggaggagtggcagcagctggaccccgcccagaggaccctgtacagggacgtgatgctggagaacttcagccacctggtgagcatcggctacgccgtgagcaagcccgacgtgatcagcaagctggagcagggcgaggacccctggatcatcaagagggacatccccaactggatctaccccgacgagaaccaggccgacggcggcccaagcagcggcgcccctcctcccagcggcggcagcccagccggctccccaacctctaccgaggagggcacctctgagtccgccacccccgagagcggccctggcacctccaccgagcccagcgagggcagcgcacccggcagccctgccggcagccccacctccacagaggagggaaccagcaccgagcccagcgaaggcagcgccccaggcaccagcaccgagcctagtgagcaggagattaaacggatcaacaagatcagaagaagacttgtgaaagacagcaacaccaagaaggccggcaagacaggccccatgaaaaccctgctggttagagtgatgacacccgatctgagagagcggctggaaaacctgagaaagaagcctgaaaatatcccccagcccatcagcaatacatctagagccaacctgaataagctgctgaccgattacaccgaaatgaagaaggcgatcctgcatgtgtactgggaagagttccagaaggaccctgtgggcctgatgagccgggtggcccagcctgccagcaagaagatcgatcagaacaagctgaaacctgagatggacgagaagggcaacctgaccaccgccggctttgcctgctctcagtgtggccagcccctgttcgtgtacaagctggagcaggtgtctgagaagggcaaggcttacaccaactacttcggacggtgcaatgtggccgagcacgaaaagctgatcctgctggcccagctgaagcccgagaaggatagcgacgaagccgtgacatatagcctgggaaagtttgggcagagggccctggatttctacagcattcatgtgaccaaggagtccacccaccccgtgaagcccctggcccagatcgccggaaacagatacgcctccggacctgtgggaaaggccctgagcgacgcatgtatgggcacaatcgcctccttcctgtctaagtaccaggacatcatcatcgaacaccagaaggtggtgaagggcaaccagaagagactggagagcctgcgggagctggccggcaaggaaaacctggaataccctagcgtgaccctgccacctcagcctcacaccaaggagggcgttgatgcctacaacgaagtgatcgcccgggtgcgaatgtgggtgaacctgaacctgtggcagaagctgaagctaagcagagatgatgccaagcctctgctgagactgaagggattcccttcctttcctctggtcgagagacaggccaacgaagtggactggtgggacatggtgtgtaacgtgaagaagctgatcaacgagaaaaaggaggatggcaaggtgttttggcagaatctggctggctacaagagacaggaagccctgagaccatacctgagcagcgaggaagatcggaagaagggaaagaaattcgctcggtaccagctgggcgacctgctgctgcacctggaaaagaagcacggcgaggactggggaaaggtgtacgacgaggcctgggagcggattgacaagaaagtggaaggcctgagcaagcacatcaagctggaagaggaacggagaagcgaggacgcccagagcaaggccgccctgaccgactggctgcgggctaaggccagcttcgtgatcgagggcctgaaggaggccgacaaggacgagttctgcagatgcgagctgaagctgcagaagtggtacggggacctgcggggaaagcccttcgccatcgaagccgagaacagcatcctggacatcagcggcttcagcaagcagtacaactgtgccttcatctggcagaaggacggcgtgaagaagctgaacctgtacctgatcatcaactacttcaagggcggcaagctgcggttcaagaagatcaaacctgaagccttcgaagccaacagattctacaccgtgatcaacaaaaagagcggcgagatcgtgcccatggaggtgaacttcaacttcgacgaccccaacctgatcatcctgcctctggcctttggcaagagacagggcagagaattcatctggaacgacctgctgtccctggaaaccggcagcctgaagctggccaacggaagagtgatcgagaagacactgtacaacagaagaacccggcaggatgagcctgccctgttcgtggccctgaccttcgagcggcgggaggtcctggactcctccaatatcaaaccaatgaacctgatcggcgtggcaagaggcgaaaacatccccgccgtgatcgccctgaccgaccccgagggctgcccactgagccggtttaaggatagcctgggaaacccaacccacatcctgagaatcggcgagagctataaggagaagcagcggaccatccaggccaagaaggaggtggagcagcggagagccggcggctacagccggaagtacgccagcaaagccaagaatctggcagacgatatggtgagaaacaccgctagagatctgctgtactacgccgtgacccaggatgccatgctgatcttcgccaacctgagccggggcttcggccggcagggcaagcggaccttcatggccgagagacagtacacacggatggaggactggctgaccgccaagctggcctacgagggcctgagcaagacctacctgtccaagacactggcccagtacacctccaagacatgcagcaactgtgggtttaccatcaccagcgccgactacgacagggtgctggagaagctgaagaagacagcaacaggctggatgaccacaattaacggcaaggagctgaaggtggagggccagattacctactacaacagatacaagagacagaacgtagtcaaggacctgtccgtcgagctggatagactgagcgaagaatctgtgaacaacgacatctcctcctggacaaagggcagaagcggagaagctctgagcctcctgaagaaaagattctcccatagacccgtgcaggagaagttcgtgtgcctgaactgcggcttcgagacacacgcagccgagcaagccgccctgaacatcgccagatcctggctgttcctgcggagccaggagtacaagaaataccagacaaacaagacaaccggcaacaccgataagagagccttcgtcgagacctggcagtccttttaccggaagaagcttaaggaggtgtggaaacctgccgtgcggtctggcggatctggcggaggctcctcagggcctggtgagcttcaaggacgtggccgtggacttcacccaggaggagtggcagcagctggaccccgcccagaggaccctgtacagggacgtgatgctggagaacttcagccacctggtgagcatcggctacgccgtgagcaagcccgacgtgatcagcaagctggagcagggcgaggacccctggatcatcaagagggacatccccaactggatctaccccgacgagaaccaggccgacggatctggctccggcagcggccccaagaaaaagagaaaagtctaagctgccttctgcggggcttgccttctggccatgcccttcttctctcccttgcacctgtacctcttggtctttgaataaagcctgagtaggaaggctagcaaaaaaaaaaaaaaaaaaaaaaaaaaaaaaaaaaaaaaaaaaaaaaaaaaaaaaaaaaaaaaaaaaaaaaaaaaaaaaaa

SEQ ID NO: 16442 - RNA, 9485 nt, synthetic construct
  source 1..9485: mol_type = other RNA
aggaaataagagagaaaagaagagtaagaagaaatataagagccaccatggcccctaagaagaagcgtaaagtgagccggatggaacgcctcgtctacgaggtgcggcagaagtgcagaaacatcgaggacatctgcatctcctgcggatctctgaacgtgaccctggagcacccactgttcatcggcggcatgtgccagaactgtaaaaactgttttctggagtgtgcctatcaatacgacgatgacggctaccagagctactgcaccatctgttgcggcggaagagaggtgctgatgtgtggaaataacaactgctgccggtgcttctgcgtggaatgcgtggacctgctggtgggccccggcgccgcccaggccgctattaaggaagatccttggaactgctacatgtgcggccacaagggcacatacggcctgctgagacggagagaggactggcctagcagactgcagatgttcttcgccaataaccacgaccaggagttcgacccccctaaggtgtaccctcccgtccccgccgagaagagaaagcccatccgggtcctgagcctgttcgatggcatcgccaccggtctgctggtgctgaaggacctgggcatccaggtggataggtacattgcctccgaggtgtgcgaggactccatcaccgtgggaatggtgcgtcatcagggcaagatcatgtacgtgggcgacgtgcggagcgtgacacagaagcatatccaggagtggggccctttcgacctggtgatcggcggcagcccttgcaatgacctgagcatcgtgaacccagcccggaagggcctgtacgagggaaccggcagactgttcttcgagttttacagactgctgcacgacgcccggcctaaggaaggcgacgaccggcccttcttttggctgttcgagaatgtggtggccatgggagtcagcgacaagcgggatattagccggttcctggagagcaaccccgtgatgatcgatgccaaggaagtgagcgccgcccaccgggccagatacttctggggcaatctgcctggcatgaacagacccctggccagcaccgtgaacgacaagctggagctgcaggagtgcctggagcacggccggatcgccaagttcagcaaggtgagaaccatcaccacccgaagcaacagcatcaaacaaggcaaggaccagcactttcctgtgttcatgaacgagaaggaggacatcctgtggtgtaccgagatggagagagtgttcgggttcccagtccactacacagatgtcagcaacatgtctagactggccagacagagactgctgggaagaagctggtccgtccctgtgatcagacacctgttcgcccctctgaaggagtacttcgcctgcgtgagcagcggcaacagcaacgccaacagccggggccccagcttctctagcggcctggtgccactgtccctgagagggagccacatgggccccatggagatctacaaaaccgtgagcgcctggaagcggcagcctgtgcgcgtgctgagcctgtttcggaatatcgataaagtcctgaaaagcctgggattcctggagagcggctctggctccggcggtggcaccctgaagtacgtggaggatgtgacaaacgtggtcagacgggatgtggagaagtggggccccttcgatctggtgtacggcagcacccaacccctgggcagctcttgtgaccggtgccctggctggtacatgtttcagttccaccggatcctgcagtacgccctgccgagacaggagtcccagcggccattcttttggattttcatggacaacttgctgctgaccgaggatgaccaggaaactaccactcggttcctgcagaccgaagccgtgaccctgcaggacgtgagaggccgggactaccagaacgccatgcgggtgtggtccaacatccctggactgaaaagcaagcacgcacctctgacccctaaagaagaggagtacctgcaggcccaggtgcggagcagaagcaagctggacgcccctaaggtggatctgctggtgaagaattgcctcctgcccctgagagagtacttcaagtatttcagccagaatagtctgcccctgggaggcagcggcggcggcgccctggtgacatttgaggacgtcgccgtgcggttcacccaggaggaatgggctctgctggatccttctcagaaaatcctgtaccgggacgtgatgagagagacataccggaatctgacctccgtgggcatcaactgggaatgttgggaccttgaagcctgcttcagaagcctgggaagaaacctgagagtgcaggtggtgaagagaaagtgcgagctgaccaacagcggcccctgcgccgagggcggcccaagcagcggcgcccctcctcccagcggcggcagcccagccggctccccaacctctaccgaggagggcacctctgagtccgccacccccgagagcggccctggcacctccaccgagcccagcgagggcagcgcacccggcagccctgccggcagccccacctccacagaggagggaaccagcaccgagcccagcgaaggcagcgccccaggcaccagcaccgagcctagtgagcaggagattaaacggatcaacaagatcagaagaagacttgtgaaagacagcaacaccaagaaggccggcaagacaggccccatgaaaaccctgctggttagagtgatgacacccgatctgagagagcggctggaaaacctgagaaagaagcctgaaaatatcccccagcccatcagcaatacatctagagccaacctgaataagctgctgaccgattacaccgaaatgaagaaggcgatcctgcatgtgtactgggaagagttccagaaggaccctgtgggcctgatgagccgggtggcccagcctgccagcaagaagatcgatcagaacaagctgaaacctgagatggacgagaagggcaacctgaccaccgccggctttgcctgctctcagtgtggccagcccctgttcgtgtacaagctggagcaggtgtctgagaagggcaaggcttacaccaactacttcggacggtgcaatgtggccgagcacgaaaagctgatcctgctggcccagctgaagcccgagaaggatagcgacgaagccgtgacatatagcctgggaaagtttgggcagagggccctggatttctacagcattcatgtgaccaaggagtccacccaccccgtgaagcccctggcccagatcgccggaaacagatacgcctccggacctgtgggaaaggccctgagcgacgcatgtatgggcacaatcgcctccttcctgtctaagtaccaggacatcatcatcgaacaccagaaggtggtgaagggcaaccagaagagactggagagcctgcgggagctggccggcaaggaaaacctggaataccctagcgtgaccctgccacctcagcctcacaccaaggagggcgttgatgcctacaacgaagtgatcgcccgggtgcgaatgtgggtgaacctgaacctgtggcagaagctgaagctaagcagagatgatgccaagcctctgctgagactgaagggattcccttcctttcctctggtcgagagacaggccaacgaagtggactggtgggacatggtgtgtaacgtgaagaagctgatcaacgagaaaaaggaggatggcaaggtgttttggcagaatctggctggctacaagagacaggaagccctgagaccatacctgagcagcgaggaagatcggaagaagggaaagaaattcgctcggtaccagctgggcgacctgctgctgcacctggaaaagaagcacggcgaggactggggaaaggtgtacgacgaggcctgggagcggattgacaagaaagtggaaggcctgagcaagcacatcaagctggaagaggaacggagaagcgaggacgcccagagcaaggccgccctgaccgactggctgcgggctaaggccagcttcgtgatcgagggcctgaaggaggccgacaaggacgagttctgcagatgcgagctgaagctgcagaagtggtacggggacctgcggggaaagcccttcgccatcgaagccgagaacagcatcctggacatcagcggcttcagcaagcagtacaactgtgccttcatctggcagaaggacggcgtgaagaagctgaacctgtacctgatcatcaactacttcaagggcggcaagctgcggttcaagaagatcaaacctgaagccttcgaagccaacagattctacaccgtgatcaacaaaaagagcggcgagatcgtgcccatggaggtgaacttcaacttcgacgaccccaacctgatcatcctgcctctggcctttggcaagagacagggcagagaattcatctggaacgacctgctgtccctggaaaccggcagcctgaagctggccaacggaagagtgatcgagaagacactgtacaacagaagaacccggcaggatgagcctgccctgttcgtggccctgaccttcgagcggcgggaggtcctggactcctccaatatcaaaccaatgaacctgatcggcgtggcaagaggcgaaaacatccccgccgtgatcgccctgaccgaccccgagggctgcccactgagccggtttaaggatagcctgggaaacccaacccacatcctgagaatcggcgagagctataaggagaagcagcggaccatccaggccaagaaggaggtggagcagcggagagccggcggctacagccggaagtacgccagcaaagccaagaatctggcagacgatatggtgagaaacaccgctagagatctgctgtactacgccgtgacccaggatgccatgctgatcttcgccaacctgagccggggcttcggccggcagggcaagcggaccttcatggccgagagacagtacacacggatggaggactggctgaccgccaagctggcctacgagggcctgagcaagacctacctgtccaagacactggcccagtacacctccaagacatgcagcaactgtgggtttaccatcaccagcgccgactacgacagggtgctggagaagctgaagaagacagcaacaggctggatgaccacaattaacggcaaggagctgaaggtggagggccagattacctactacaacagatacaagagacagaacgtagtcaaggacctgtccgtcgagctggatagactgagcgaagaatctgtgaacaacgacatctcctcctggacaaagggcagaagcggagaagctctgagcctcctgaagaaaagattctcccatagacccgtgcaggagaagttcgtgtgcctgaactgcggcttcgagacacacgcagccgagcaagccgccctgaacatcgccagatcctggctgttcctgcggagccaggagtacaagaaataccagacaaacaagacaaccggcaacaccgataagagagccttcgtcgagacctggcagtccttttaccggaagaagcttaaggaggtgtggaaacctgccgtgcggtctggcggatctggcggaggctccagcctgggcatggtgagcttcgacgacgtgatggtgaccttcagcctggaggagtggcagctgctgagcaccagccagaggaccctgtacaggaccgtgatgctggacacctacagcagcctggccgccctgggccactgcgccgtgaagcccggcgtgatcatcaagctggagcagggcgccgagccctggatgggcgcccaggccccccccaggagcctgagcgacccctgcggccccagcggcggcccaagcagcggcgcccctcctcccagcggcggcagcccagccggctccccaacctctaccgaggagggcacctctgagtccgccacccccgagagcggccctggcacctccaccgagcccagcgagggcagcgcacccggcagccctgccggcagccccacctccacagaggagggaaccagcaccgagcccagcgaaggcagcgccccaggcaccagcaccgagcctagtgagcaggagattaaacggatcaacaagatcagaagaagacttgtgaaagacagcaacaccaagaaggccggcaagacaggccccatgaaaaccctgctggttagagtgatgacacccgatctgagagagcggctggaaaacctgagaaagaagcctgaaaatatcccccagcccatcagcaatacatctagagccaacctgaataagctgctgaccgattacaccgaaatgaagaaggcgatcctgcatgtgtactgggaagagttccagaaggaccctgtgggcctgatgagccgggtggcccagcctgccagcaagaagatcgatcagaacaagctgaaacctgagatggacgagaagggcaacctgaccaccgccggctttgcctgctctcagtgtggccagcccctgttcgtgtacaagctggagcaggtgtctgagaagggcaaggcttacaccaactacttcggacggtgcaatgtggccgagcacgaaaagctgatcctgctggcccagctgaagcccgagaaggatagcgacgaagccgtgacatatagcctgggaaagtttgggcagagggccctggatttctacagcattcatgtgaccaaggagtccacccaccccgtgaagcccctggcccagatcgccggaaacagatacgcctccggacctgtgggaaaggccctgagcgacgcatgtatgggcacaatcgcctccttcctgtctaagtaccaggacatcatcatcgaacaccagaaggtggtgaagggcaaccagaagagactggagagcctgcgggagctggccggcaaggaaaacctggaataccctagcgtgaccctgccacctcagcctcacaccaaggagggcgttgatgcctacaacgaagtgatcgcccgggtgcgaatgtgggtgaacctgaacctgtggcagaagctgaagctaagcagagatgatgccaagcctctgctgagactgaagggattcccttcctttcctctggtcgagagacaggccaacgaagtggactggtgggacatggtgtgtaacgtgaagaagctgatcaacgagaaaaaggaggatggcaaggtgttttggcagaatctggctggctacaagagacaggaagccctgagaccatacctgagcagcgaggaagatcggaagaagggaaagaaattcgctcggtaccagctgggcgacctgctgctgcacctggaaaagaagcacggcgaggactggggaaaggtgtacgacgaggcctgggagcggattgacaagaaagtggaaggcctgagcaagcacatcaagctggaagaggaacggagaagcgaggacgcccagagcaaggccgccctgaccgactggctgcgggctaaggccagcttcgtgatcgagggcctgaaggaggccgacaaggacgagttctgcagatgcgagctgaagctgcagaagtggtacggggacctgcggggaaagcccttcgccatcgaagccgagaacagcatcctggacatcagcggcttcagcaagcagtacaactgtgccttcatctggcagaaggacggcgtgaagaagctgaacctgtacctgatcatcaactacttcaagggcggcaagctgcggttcaagaagatcaaacctgaagccttcgaagccaacagattctacaccgtgatcaacaaaaagagcggcgagatcgtgcccatggaggtgaacttcaacttcgacgaccccaacctgatcatcctgcctctggcctttggcaagagacagggcagagaattcatctggaacgacctgctgtccctggaaaccggcagcctgaagctggccaacggaagagtgatcgagaagacactgtacaacagaagaacccggcaggatgagcctgccctgttcgtggccctgaccttcgagcggcgggaggtcctggactcctccaatatcaaaccaatgaacctgatcggcgtggcaagaggcgaaaacatccccgccgtgatcgccctgaccgaccccgagggctgcccactgagccggtttaaggatagcctgggaaacccaacccacatcctgagaatcggcgagagctataaggagaagcagcggaccatccaggccaagaaggaggtggagcagcggagagccggcggctacagccggaagtacgccagcaaagccaagaatctggcagacgatatggtgagaaacaccgctagagatctgctgtactacgccgtgacccaggatgccatgctgatcttcgccaacctgagccggggcttcggccggcagggcaagcggaccttcatggccgagagacagtacacacggatggaggactggctgaccgccaagctggcctacgagggcctgagcaagacctacctgtccaagacactggcccagtacacctccaagacatgcagcaactgtgggtttaccatcaccagcgccgactacgacagggtgctggagaagctgaagaagacagcaacaggctggatgaccacaattaacggcaaggagctgaaggtggagggccagattacctactacaacagatacaagagacagaacgtagtcaaggacctgtccgtcgagctggatagactgagcgaagaatctgtgaacaacgacatctcctcctggacaaagggcagaagcggagaagctctgagcctcctgaagaaaagattctcccatagacccgtgcaggagaagttcgtgtgcctgaactgcggcttcgagacacacgcagccgagcaagccgccctgaacatcgccagatcctggctgttcctgcggagccaggagtacaagaaataccagacaaacaagacaaccggcaacaccgataagagagccttcgtcgagacctggcagtccttttaccggaagaagcttaaggaggtgtggaaacctgccgtgcggtctggcggatctggcggaggctcctagcctgggcatggtgagcttcgacgacgtgatggtgaccttcagcctggaggagtggcagctgctgagcaccagccagaggaccctgtacaggaccgtgatgctggacacctacagcagcctggccgccctgggccactgcgccgtgaagcccggcgtgatcatcaagctggagcagggcgccgagccctggatgggcgcccaggccccccccaggagcctgagcgacccctgcggccccagcggatctggctccggcagcggccccaagaaaaagagaaaagtctaagctgccttctgcggggcttgccttctggccatgcccttcttctctcccttgcacctgtacctcttggtctttgaataaagcctgagtaggaaggctagcaaaaaaaaaaaaaaaaaaaaaaaaaaaaaaaaaaaaaaaaaaaaaaaaaaaaaaaaaaaaaaaaaaaaaaaaaaaaaaaa

SEQ ID NO: 16443 - RNA, 9485 nt, synthetic construct
  source 1..9485: mol_type = other RNA
aggaaataagagagaaaagaagagtaagaagaaatataagagccaccatggcccctaagaagaagcgtaaagtgagccggatggaacgcctcgtctacgaggtgcggcagaagtgcagaaacatcgaggacatctgcatctcctgcggatctctgaacgtgaccctggagcacccactgttcatcggcggcatgtgccagaactgtaaaaactgttttctggagtgtgcctatcaatacgacgatgacggctaccagagctactgcaccatctgttgcggcggaagagaggtgctgatgtgtggaaataacaactgctgccggtgcttctgcgtggaatgcgtggacctgctggtgggccccggcgccgcccaggccgctattaaggaagatccttggaactgctacatgtgcggccacaagggcacatacggcctgctgagacggagagaggactggcctagcagactgcagatgttcttcgccaataaccacgaccaggagttcgacccccctaaggtgtaccctcccgtccccgccgagaagagaaagcccatccgggtcctgagcctgttcgatggcatcgccaccggtctgctggtgctgaaggacctgggcatccaggtggataggtacattgcctccgaggtgtgcgaggactccatcaccgtgggaatggtgcgtcatcagggcaagatcatgtacgtgggcgacgtgcggagcgtgacacagaagcatatccaggagtggggccctttcgacctggtgatcggcggcagcccttgcaatgacctgagcatcgtgaacccagcccggaagggcctgtacgagggaaccggcagactgttcttcgagttttacagactgctgcacgacgcccggcctaaggaaggcgacgaccggcccttcttttggctgttcgagaatgtggtggccatgggagtcagcgacaagcgggatattagccggttcctggagagcaaccccgtgatgatcgatgccaaggaagtgagcgccgcccaccgggccagatacttctggggcaatctgcctggcatgaacagacccctggccagcaccgtgaacgacaagctggagctgcaggagtgcctggagcacggccggatcgccaagttcagcaaggtgagaaccatcaccacccgaagcaacagcatcaaacaaggcaaggaccagcactttcctgtgttcatgaacgagaaggaggacatcctgtggtgtaccgagatggagagagtgttcgggttcccagtccactacacagatgtcagcaacatgtctagactggccagacagagactgctgggaagaagctggtccgtccctgtgatcagacacctgttcgcccctctgaaggagtacttcgcctgcgtgagcagcggcaacagcaacgccaacagccggggccccagcttctctagcggcctggtgccactgtccctgagagggagccacatgggccccatggagatctacaaaaccgtgagcgcctggaagcggcagcctgtgcgcgtgctgagcctgtttcggaatatcgataaagtcctgaaaagcctgggattcctggagagcggctctggctccggcggtggcaccctgaagtacgtggaggatgtgacaaacgtggtcagacgggatgtggagaagtggggccccttcgatctggtgtacggcagcacccaacccctgggcagctcttgtgaccggtgccctggctggtacatgtttcagttccaccggatcctgcagtacgccctgccgagacaggagtcccagcggccattcttttggattttcatggacaacttgctgctgaccgaggatgaccaggaaactaccactcggttcctgcagaccgaagccgtgaccctgcaggacgtgagaggccgggactaccagaacgccatgcgggtgtggtccaacatccctggactgaaaagcaagcacgcacctctgacccctaaagaagaggagtacctgcaggcccaggtgcggagcagaagcaagctggacgcccctaaggtggatctgctggtgaagaattgcctcctgcccctgagagagtacttcaagtatttcagccagaatagtctgcccctgggaggcagcggcggcggcgccctggtgacatttgaggacgtcgccgtgcggttcacccaggaggaatgggctctgctggatccttctcagaaaatcctgtaccgggacgtgatgagagagacataccggaatctgacctccgtgggcatcaactgggaatgttgggaccttgaagcctgcttcagaagcctgggaagaaacctgagagtgcaggtggtgaagagaaagtgcgagctgaccaacagcggcccctgcgccgagggcggcccaagcagcggcgcccctcctcccagcggcggcagcccagccggctccccaacctctaccgaggagggcacctctgagtccgccacccccgagagcggccctggcacctccaccgagcccagcgagggcagcgcacccggcagccctgccggcagccccacctccacagaggagggaaccagcaccgagcccagcgaaggcagcgccccaggcaccagcaccgagcctagtgagcaggagattaaacggatcaacaagatcagaagaagacttgtgaaagacagcaacaccaagaaggccggcaagacaggccccatgaaaaccctgctggttagagtgatgacacccgatctgagagagcggctggaaaacctgagaaagaagcctgaaaatatcccccagcccatcagcaatacatctagagccaacctgaataagctgctgaccgattacaccgaaatgaagaaggcgatcctgcatgtgtactgggaagagttccagaaggaccctgtgggcctgatgagccgggtggcccagcctgccagcaagaagatcgatcagaacaagctgaaacctgagatggacgagaagggcaacctgaccaccgccggctttgcctgctctcagtgtggccagcccctgttcgtgtacaagctggagcaggtgtctgagaagggcaaggcttacaccaactacttcggacggtgcaatgtggccgagcacgaaaagctgatcctgctggcccagctgaagcccgagaaggatagcgacgaagccgtgacatatagcctgggaaagtttgggcagagggccctggatttctacagcattcatgtgaccaaggagtccacccaccccgtgaagcccctggcccagatcgccggaaacagatacgcctccggacctgtgggaaaggccctgagcgacgcatgtatgggcacaatcgcctccttcctgtctaagtaccaggacatcatcatcgaacaccagaaggtggtgaagggcaaccagaagagactggagagcctgcgggagctggccggcaaggaaaacctggaataccctagcgtgaccctgccacctcagcctcacaccaaggagggcgttgatgcctacaacgaagtgatcgcccgggtgcgaatgtgggtgaacctgaacctgtggcagaagctgaagctaagcagagatgatgccaagcctctgctgagactgaagggattcccttcctttcctctggtcgagagacaggccaacgaagtggactggtgggacatggtgtgtaacgtgaagaagctgatcaacgagaaaaaggaggatggcaaggtgttttggcagaatctggctggctacaagagacaggaagccctgagaccatacctgagcagcgaggaagatcggaagaagggaaagaaattcgctcggtaccagctgggcgacctgctgctgcacctggaaaagaagcacggcgaggactggggaaaggtgtacgacgaggcctgggagcggattgacaagaaagtggaaggcctgagcaagcacatcaagctggaagaggaacggagaagcgaggacgcccagagcaaggccgccctgaccgactggctgcgggctaaggccagcttcgtgatcgagggcctgaaggaggccgacaaggacgagttctgcagatgcgagctgaagctgcagaagtggtacggggacctgcggggaaagcccttcgccatcgaagccgagaacagcatcctggacatcagcggcttcagcaagcagtacaactgtgccttcatctggcagaaggacggcgtgaagaagctgaacctgtacctgatcatcaactacttcaagggcggcaagctgcggttcaagaagatcaaacctgaagccttcgaagccaacagattctacaccgtgatcaacaaaaagagcggcgagatcgtgcccatggaggtgaacttcaacttcgacgaccccaacctgatcatcctgcctctggcctttggcaagagacagggcagagaattcatctggaacgacctgctgtccctggaaaccggcagcctgaagctggccaacggaagagtgatcgagaagacactgtacaacagaagaacccggcaggatgagcctgccctgttcgtggccctgaccttcgagcggcgggaggtcctggactcctccaatatcaaaccaatgaacctgatcggcgtggcaagaggcgaaaacatccccgccgtgatcgccctgaccgaccccgagggctgcccactgagccggtttaaggatagcctgggaaacccaacccacatcctgagaatcggcgagagctataaggagaagcagcggaccatccaggccaagaaggaggtggagcagcggagagccggcggctacagccggaagtacgccagcaaagccaagaatctggcagacgatatggtgagaaacaccgctagagatctgctgtactacgccgtgacccaggatgccatgctgatcttcgccaacctgagccggggcttcggccggcagggcaagcggaccttcatggccgagagacagtacacacggatggaggactggctgaccgccaagctggcctacgagggcctgagcaagacctacctgtccaagacactggcccagtacacctccaagacatgcagcaactgtgggtttaccatcaccagcgccgactacgacagggtgctggagaagctgaagaagacagcaacaggctggatgaccacaattaacggcaaggagctgaaggtggagggccagattacctactacaacagatacaagagacagaacgtagtcaaggacctgtccgtcgagctggatagactgagcgaagaatctgtgaacaacgacatctcctcctggacaaagggcagaagcggagaagctctgagcctcctgaagaaaagattctcccatagacccgtgcaggagaagttcgtgtgcctgaactgcggcttcgagacacacgcagccgagcaagccgccctgaacatcgccagatcctggctgttcctgcggagccaggagtacaagaaataccagacaaacaagacaaccggcaacaccgataagagagccttcgtcgagacctggcagtccttttaccggaagaagcttaaggaggtgtggaaacctgccgtgcggtctggcggatctggcggaggctccacccaggagagcgtgatgttcgaggacgtggccgtggacttcaccagggaggagtggagccacctggaccccgcccagagggccctgtacagggaggtgatgctggagaactacgagaacctggtgagcctgggcctgcccgtgagcaagctggacgtgatcagcctgctggagaggggcgaggccccctggaggcccgagggcggcggccccaggtgcagctgccccgaccccttcatcgagggcggcccaagcagcggcgcccctcctcccagcggcggcagcccagccggctccccaacctctaccgaggagggcacctctgagtccgccacccccgagagcggccctggcacctccaccgagcccagcgagggcagcgcacccggcagccctgccggcagccccacctccacagaggagggaaccagcaccgagcccagcgaaggcagcgccccaggcaccagcaccgagcctagtgagcaggagattaaacggatcaacaagatcagaagaagacttgtgaaagacagcaacaccaagaaggccggcaagacaggccccatgaaaaccctgctggttagagtgatgacacccgatctgagagagcggctggaaaacctgagaaagaagcctgaaaatatcccccagcccatcagcaatacatctagagccaacctgaataagctgctgaccgattacaccgaaatgaagaaggcgatcctgcatgtgtactgggaagagttccagaaggaccctgtgggcctgatgagccgggtggcccagcctgccagcaagaagatcgatcagaacaagctgaaacctgagatggacgagaagggcaacctgaccaccgccggctttgcctgctctcagtgtggccagcccctgttcgtgtacaagctggagcaggtgtctgagaagggcaaggcttacaccaactacttcggacggtgcaatgtggccgagcacgaaaagctgatcctgctggcccagctgaagcccgagaaggatagcgacgaagccgtgacatatagcctgggaaagtttgggcagagggccctggatttctacagcattcatgtgaccaaggagtccacccaccccgtgaagcccctggcccagatcgccggaaacagatacgcctccggacctgtgggaaaggccctgagcgacgcatgtatgggcacaatcgcctccttcctgtctaagtaccaggacatcatcatcgaacaccagaaggtggtgaagggcaaccagaagagactggagagcctgcgggagctggccggcaaggaaaacctggaataccctagcgtgaccctgccacctcagcctcacaccaaggagggcgttgatgcctacaacgaagtgatcgcccgggtgcgaatgtgggtgaacctgaacctgtggcagaagctgaagctaagcagagatgatgccaagcctctgctgagactgaagggattcccttcctttcctctggtcgagagacaggccaacgaagtggactggtgggacatggtgtgtaacgtgaagaagctgatcaacgagaaaaaggaggatggcaaggtgttttggcagaatctggctggctacaagagacaggaagccctgagaccatacctgagcagcgaggaagatcggaagaagggaaagaaattcgctcggtaccagctgggcgacctgctgctgcacctggaaaagaagcacggcgaggactggggaaaggtgtacgacgaggcctgggagcggattgacaagaaagtggaaggcctgagcaagcacatcaagctggaagaggaacggagaagcgaggacgcccagagcaaggccgccctgaccgactggctgcgggctaaggccagcttcgtgatcgagggcctgaaggaggccgacaaggacgagttctgcagatgcgagctgaagctgcagaagtggtacggggacctgcggggaaagcccttcgccatcgaagccgagaacagcatcctggacatcagcggcttcagcaagcagtacaactgtgccttcatctggcagaaggacggcgtgaagaagctgaacctgtacctgatcatcaactacttcaagggcggcaagctgcggttcaagaagatcaaacctgaagccttcgaagccaacagattctacaccgtgatcaacaaaaagagcggcgagatcgtgcccatggaggtgaacttcaacttcgacgaccccaacctgatcatcctgcctctggcctttggcaagagacagggcagagaattcatctggaacgacctgctgtccctggaaaccggcagcctgaagctggccaacggaagagtgatcgagaagacactgtacaacagaagaacccggcaggatgagcctgccctgttcgtggccctgaccttcgagcggcgggaggtcctggactcctccaatatcaaaccaatgaacctgatcggcgtggcaagaggcgaaaacatccccgccgtgatcgccctgaccgaccccgagggctgcccactgagccggtttaaggatagcctgggaaacccaacccacatcctgagaatcggcgagagctataaggagaagcagcggaccatccaggccaagaaggaggtggagcagcggagagccggcggctacagccggaagtacgccagcaaagccaagaatctggcagacgatatggtgagaaacaccgctagagatctgctgtactacgccgtgacccaggatgccatgctgatcttcgccaacctgagccggggcttcggccggcagggcaagcggaccttcatggccgagagacagtacacacggatggaggactggctgaccgccaagctggcctacgagggcctgagcaagacctacctgtccaagacactggcccagtacacctccaagacatgcagcaactgtgggtttaccatcaccagcgccgactacgacagggtgctggagaagctgaagaagacagcaacaggctggatgaccacaattaacggcaaggagctgaaggtggagggccagattacctactacaacagatacaagagacagaacgtagtcaaggacctgtccgtcgagctggatagactgagcgaagaatctgtgaacaacgacatctcctcctggacaaagggcagaagcggagaagctctgagcctcctgaagaaaagattctcccatagacccgtgcaggagaagttcgtgtgcctgaactgcggcttcgagacacacgcagccgagcaagccgccctgaacatcgccagatcctggctgttcctgcggagccaggagtacaagaaataccagacaaacaagacaaccggcaacaccgataagagagccttcgtcgagacctggcagtccttttaccggaagaagcttaaggaggtgtggaaacctgccgtgcggtctggcggatctggcggaggctcctacccaggagagcgtgatgttcgaggacgtggccgtggacttcaccagggaggagtggagccacctggaccccgcccagagggccctgtacagggaggtgatgctggagaactacgagaacctggtgagcctgggcctgcccgtgagcaagctggacgtgatcagcctgctggagaggggcgaggccccctggaggcccgagggcggcggccccaggtgcagctgccccgaccccttcatcgagggatctggctccggcagcggccccaagaaaaagagaaaagtctaagctgccttctgcggggcttgccttctggccatgcccttcttctctcccttgcacctgtacctcttggtctttgaataaagcctgagtaggaaggctagcaaaaaaaaaaaaaaaaaaaaaaaaaaaaaaaaaaaaaaaaaaaaaaaaaaaaaaaaaaaaaaaaaaaaaaaaaaaaaaaa

SEQ ID NO: 16444 - RNA, 9485 nt, synthetic construct
  source 1..9485: mol_type = other RNA
aggaaataagagagaaaagaagagtaagaagaaatataagagccaccatggcccctaagaagaagcgtaaagtgagccggatggaacgcctcgtctacgaggtgcggcagaagtgcagaaacatcgaggacatctgcatctcctgcggatctctgaacgtgaccctggagcacccactgttcatcggcggcatgtgccagaactgtaaaaactgttttctggagtgtgcctatcaatacgacgatgacggctaccagagctactgcaccatctgttgcggcggaagagaggtgctgatgtgtggaaataacaactgctgccggtgcttctgcgtggaatgcgtggacctgctggtgggccccggcgccgcccaggccgctattaaggaagatccttggaactgctacatgtgcggccacaagggcacatacggcctgctgagacggagagaggactggcctagcagactgcagatgttcttcgccaataaccacgaccaggagttcgacccccctaaggtgtaccctcccgtccccgccgagaagagaaagcccatccgggtcctgagcctgttcgatggcatcgccaccggtctgctggtgctgaaggacctgggcatccaggtggataggtacattgcctccgaggtgtgcgaggactccatcaccgtgggaatggtgcgtcatcagggcaagatcatgtacgtgggcgacgtgcggagcgtgacacagaagcatatccaggagtggggccctttcgacctggtgatcggcggcagcccttgcaatgacctgagcatcgtgaacccagcccggaagggcctgtacgagggaaccggcagactgttcttcgagttttacagactgctgcacgacgcccggcctaaggaaggcgacgaccggcccttcttttggctgttcgagaatgtggtggccatgggagtcagcgacaagcgggatattagccggttcctggagagcaaccccgtgatgatcgatgccaaggaagtgagcgccgcccaccgggccagatacttctggggcaatctgcctggcatgaacagacccctggccagcaccgtgaacgacaagctggagctgcaggagtgcctggagcacggccggatcgccaagttcagcaaggtgagaaccatcaccacccgaagcaacagcatcaaacaaggcaaggaccagcactttcctgtgttcatgaacgagaaggaggacatcctgtggtgtaccgagatggagagagtgttcgggttcccagtccactacacagatgtcagcaacatgtctagactggccagacagagactgctgggaagaagctggtccgtccctgtgatcagacacctgttcgcccctctgaaggagtacttcgcctgcgtgagcagcggcaacagcaacgccaacagccggggccccagcttctctagcggcctggtgccactgtccctgagagggagccacatgggccccatggagatctacaaaaccgtgagcgcctggaagcggcagcctgtgcgcgtgctgagcctgtttcggaatatcgataaagtcctgaaaagcctgggattcctggagagcggctctggctccggcggtggcaccctgaagtacgtggaggatgtgacaaacgtggtcagacgggatgtggagaagtggggccccttcgatctggtgtacggcagcacccaacccctgggcagctcttgtgaccggtgccctggctggtacatgtttcagttccaccggatcctgcagtacgccctgccgagacaggagtcccagcggccattcttttggattttcatggacaacttgctgctgaccgaggatgaccaggaaactaccactcggttcctgcagaccgaagccgtgaccctgcaggacgtgagaggccgggactaccagaacgccatgcgggtgtggtccaacatccctggactgaaaagcaagcacgcacctctgacccctaaagaagaggagtacctgcaggcccaggtgcggagcagaagcaagctggacgcccctaaggtggatctgctggtgaagaattgcctcctgcccctgagagagtacttcaagtatttcagccagaatagtctgcccctgggaggcagcggcggcggcgccctggtgacatttgaggacgtcgccgtgcggttcacccaggaggaatgggctctgctggatccttctcagaaaatcctgtaccgggacgtgatgagagagacataccggaatctgacctccgtgggcatcaactgggaatgttgggaccttgaagcctgcttcagaagcctgggaagaaacctgagagtgcaggtggtgaagagaaagtgcgagctgaccaacagcggcccctgcgccgagggcggcccaagcagcggcgcccctcctcccagcggcggcagcccagccggctccccaacctctaccgaggagggcacctctgagtccgccacccccgagagcggccctggcacctccaccgagcccagcgagggcagcgcacccggcagccctgccggcagccccacctccacagaggagggaaccagcaccgagcccagcgaaggcagcgccccaggcaccagcaccgagcctagtgagcaggagattaaacggatcaacaagatcagaagaagacttgtgaaagacagcaacaccaagaaggccggcaagacaggccccatgaaaaccctgctggttagagtgatgacacccgatctgagagagcggctggaaaacctgagaaagaagcctgaaaatatcccccagcccatcagcaatacatctagagccaacctgaataagctgctgaccgattacaccgaaatgaagaaggcgatcctgcatgtgtactgggaagagttccagaaggaccctgtgggcctgatgagccgggtggcccagcctgccagcaagaagatcgatcagaacaagctgaaacctgagatggacgagaagggcaacctgaccaccgccggctttgcctgctctcagtgtggccagcccctgttcgtgtacaagctggagcaggtgtctgagaagggcaaggcttacaccaactacttcggacggtgcaatgtggccgagcacgaaaagctgatcctgctggcccagctgaagcccgagaaggatagcgacgaagccgtgacatatagcctgggaaagtttgggcagagggccctggatttctacagcattcatgtgaccaaggagtccacccaccccgtgaagcccctggcccagatcgccggaaacagatacgcctccggacctgtgggaaaggccctgagcgacgcatgtatgggcacaatcgcctccttcctgtctaagtaccaggacatcatcatcgaacaccagaaggtggtgaagggcaaccagaagagactggagagcctgcgggagctggccggcaaggaaaacctggaataccctagcgtgaccctgccacctcagcctcacaccaaggagggcgttgatgcctacaacgaagtgatcgcccgggtgcgaatgtgggtgaacctgaacctgtggcagaagctgaagctaagcagagatgatgccaagcctctgctgagactgaagggattcccttcctttcctctggtcgagagacaggccaacgaagtggactggtgggacatggtgtgtaacgtgaagaagctgatcaacgagaaaaaggaggatggcaaggtgttttggcagaatctggctggctacaagagacaggaagccctgagaccatacctgagcagcgaggaagatcggaagaagggaaagaaattcgctcggtaccagctgggcgacctgctgctgcacctggaaaagaagcacggcgaggactggggaaaggtgtacgacgaggcctgggagcggattgacaagaaagtggaaggcctgagcaagcacatcaagctggaagaggaacggagaagcgaggacgcccagagcaaggccgccctgaccgactggctgcgggctaaggccagcttcgtgatcgagggcctgaaggaggccgacaaggacgagttctgcagatgcgagctgaagctgcagaagtggtacggggacctgcggggaaagcccttcgccatcgaagccgagaacagcatcctggacatcagcggcttcagcaagcagtacaactgtgccttcatctggcagaaggacggcgtgaagaagctgaacctgtacctgatcatcaactacttcaagggcggcaagctgcggttcaagaagatcaaacctgaagccttcgaagccaacagattctacaccgtgatcaacaaaaagagcggcgagatcgtgcccatggaggtgaacttcaacttcgacgaccccaacctgatcatcctgcctctggcctttggcaagagacagggcagagaattcatctggaacgacctgctgtccctggaaaccggcagcctgaagctggccaacggaagagtgatcgagaagacactgtacaacagaagaacccggcaggatgagcctgccctgttcgtggccctgaccttcgagcggcgggaggtcctggactcctccaatatcaaaccaatgaacctgatcggcgtggcaagaggcgaaaacatccccgccgtgatcgccctgaccgaccccgagggctgcccactgagccggtttaaggatagcctgggaaacccaacccacatcctgagaatcggcgagagctataaggagaagcagcggaccatccaggccaagaaggaggtggagcagcggagagccggcggctacagccggaagtacgccagcaaagccaagaatctggcagacgatatggtgagaaacaccgctagagatctgctgtactacgccgtgacccaggatgccatgctgatcttcgccaacctgagccggggcttcggccggcagggcaagcggaccttcatggccgagagacagtacacacggatggaggactggctgaccgccaagctggcctacgagggcctgagcaagacctacctgtccaagacactggcccagtacacctccaagacatgcagcaactgtgggtttaccatcaccagcgccgactacgacagggtgctggagaagctgaagaagacagcaacaggctggatgaccacaattaacggcaaggagctgaaggtggagggccagattacctactacaacagatacaagagacagaacgtagtcaaggacctgtccgtcgagctggatagactgagcgaagaatctgtgaacaacgacatctcctcctggacaaagggcagaagcggagaagctctgagcctcctgaagaaaagattctcccatagacccgtgcaggagaagttcgtgtgcctgaactgcggcttcgagacacacgcagccgagcaagccgccctgaacatcgccagatcctggctgttcctgcggagccaggagtacaagaaataccagacaaacaagacaaccggcaacaccgataagagagccttcgtcgagacctggcagtccttttaccggaagaagcttaaggaggtgtggaaacctgccgtgcggtctggcggatctggcggaggctccatggtgaccttcaaggacgtggccgtggccttcagcgaggaggagctgaggctgctggaccccgcccagaggaagctgtaccaggaggtgatggtggagaacttccagaacctgctgagcgtgggcatcaacaaccagagcgagctgagggccgtgcaggacggcggcagccacgaggccctgagctgctggcagatctggcagagggtgatcgacaacctgaccaggtgccaggacagcatgggcggcccaagcagcggcgcccctcctcccagcggcggcagcccagccggctccccaacctctaccgaggagggcacctctgagtccgccacccccgagagcggccctggcacctccaccgagcccagcgagggcagcgcacccggcagccctgccggcagccccacctccacagaggagggaaccagcaccgagcccagcgaaggcagcgccccaggcaccagcaccgagcctagtgagcaggagattaaacggatcaacaagatcagaagaagacttgtgaaagacagcaacaccaagaaggccggcaagacaggccccatgaaaaccctgctggttagagtgatgacacccgatctgagagagcggctggaaaacctgagaaagaagcctgaaaatatcccccagcccatcagcaatacatctagagccaacctgaataagctgctgaccgattacaccgaaatgaagaaggcgatcctgcatgtgtactgggaagagttccagaaggaccctgtgggcctgatgagccgggtggcccagcctgccagcaagaagatcgatcagaacaagctgaaacctgagatggacgagaagggcaacctgaccaccgccggctttgcctgctctcagtgtggccagcccctgttcgtgtacaagctggagcaggtgtctgagaagggcaaggcttacaccaactacttcggacggtgcaatgtggccgagcacgaaaagctgatcctgctggcccagctgaagcccgagaaggatagcgacgaagccgtgacatatagcctgggaaagtttgggcagagggccctggatttctacagcattcatgtgaccaaggagtccacccaccccgtgaagcccctggcccagatcgccggaaacagatacgcctccggacctgtgggaaaggccctgagcgacgcatgtatgggcacaatcgcctccttcctgtctaagtaccaggacatcatcatcgaacaccagaaggtggtgaagggcaaccagaagagactggagagcctgcgggagctggccggcaaggaaaacctggaataccctagcgtgaccctgccacctcagcctcacaccaaggagggcgttgatgcctacaacgaagtgatcgcccgggtgcgaatgtgggtgaacctgaacctgtggcagaagctgaagctaagcagagatgatgccaagcctctgctgagactgaagggattcccttcctttcctctggtcgagagacaggccaacgaagtggactggtgggacatggtgtgtaacgtgaagaagctgatcaacgagaaaaaggaggatggcaaggtgttttggcagaatctggctggctacaagagacaggaagccctgagaccatacctgagcagcgaggaagatcggaagaagggaaagaaattcgctcggtaccagctgggcgacctgctgctgcacctggaaaagaagcacggcgaggactggggaaaggtgtacgacgaggcctgggagcggattgacaagaaagtggaaggcctgagcaagcacatcaagctggaagaggaacggagaagcgaggacgcccagagcaaggccgccctgaccgactggctgcgggctaaggccagcttcgtgatcgagggcctgaaggaggccgacaaggacgagttctgcagatgcgagctgaagctgcagaagtggtacggggacctgcggggaaagcccttcgccatcgaagccgagaacagcatcctggacatcagcggcttcagcaagcagtacaactgtgccttcatctggcagaaggacggcgtgaagaagctgaacctgtacctgatcatcaactacttcaagggcggcaagctgcggttcaagaagatcaaacctgaagccttcgaagccaacagattctacaccgtgatcaacaaaaagagcggcgagatcgtgcccatggaggtgaacttcaacttcgacgaccccaacctgatcatcctgcctctggcctttggcaagagacagggcagagaattcatctggaacgacctgctgtccctggaaaccggcagcctgaagctggccaacggaagagtgatcgagaagacactgtacaacagaagaacccggcaggatgagcctgccctgttcgtggccctgaccttcgagcggcgggaggtcctggactcctccaatatcaaaccaatgaacctgatcggcgtggcaagaggcgaaaacatccccgccgtgatcgccctgaccgaccccgagggctgcccactgagccggtttaaggatagcctgggaaacccaacccacatcctgagaatcggcgagagctataaggagaagcagcggaccatccaggccaagaaggaggtggagcagcggagagccggcggctacagccggaagtacgccagcaaagccaagaatctggcagacgatatggtgagaaacaccgctagagatctgctgtactacgccgtgacccaggatgccatgctgatcttcgccaacctgagccggggcttcggccggcagggcaagcggaccttcatggccgagagacagtacacacggatggaggactggctgaccgccaagctggcctacgagggcctgagcaagacctacctgtccaagacactggcccagtacacctccaagacatgcagcaactgtgggtttaccatcaccagcgccgactacgacagggtgctggagaagctgaagaagacagcaacaggctggatgaccacaattaacggcaaggagctgaaggtggagggccagattacctactacaacagatacaagagacagaacgtagtcaaggacctgtccgtcgagctggatagactgagcgaagaatctgtgaacaacgacatctcctcctggacaaagggcagaagcggagaagctctgagcctcctgaagaaaagattctcccatagacccgtgcaggagaagttcgtgtgcctgaactgcggcttcgagacacacgcagccgagcaagccgccctgaacatcgccagatcctggctgttcctgcggagccaggagtacaagaaataccagacaaacaagacaaccggcaacaccgataagagagccttcgtcgagacctggcagtccttttaccggaagaagcttaaggaggtgtggaaacctgccgtgcggtctggcggatctggcggaggctcctatggtgaccttcaaggacgtggccgtggccttcagcgaggaggagctgaggctgctggaccccgcccagaggaagctgtaccaggaggtgatggtggagaacttccagaacctgctgagcgtgggcatcaacaaccagagcgagctgagggccgtgcaggacggcggcagccacgaggccctgagctgctggcagatctggcagagggtgatcgacaacctgaccaggtgccaggacagcatgggatctggctccggcagcggccccaagaaaaagagaaaagtctaagctgccttctgcggggcttgccttctggccatgcccttcttctctcccttgcacctgtacctcttggtctttgaataaagcctgagtaggaaggctagcaaaaaaaaaaaaaaaaaaaaaaaaaaaaaaaaaaaaaaaaaaaaaaaaaaaaaaaaaaaaaaaaaaaaaaaaaaaaaaaa

SEQ ID NO: 16445 - RNA, 9485 nt, synthetic construct
  source 1..9485: mol_type = other RNA
aggaaataagagagaaaagaagagtaagaagaaatataagagccaccatggcccctaagaagaagcgtaaagtgagccggatggaacgcctcgtctacgaggtgcggcagaagtgcagaaacatcgaggacatctgcatctcctgcggatctctgaacgtgaccctggagcacccactgttcatcggcggcatgtgccagaactgtaaaaactgttttctggagtgtgcctatcaatacgacgatgacggctaccagagctactgcaccatctgttgcggcggaagagaggtgctgatgtgtggaaataacaactgctgccggtgcttctgcgtggaatgcgtggacctgctggtgggccccggcgccgcccaggccgctattaaggaagatccttggaactgctacatgtgcggccacaagggcacatacggcctgctgagacggagagaggactggcctagcagactgcagatgttcttcgccaataaccacgaccaggagttcgacccccctaaggtgtaccctcccgtccccgccgagaagagaaagcccatccgggtcctgagcctgttcgatggcatcgccaccggtctgctggtgctgaaggacctgggcatccaggtggataggtacattgcctccgaggtgtgcgaggactccatcaccgtgggaatggtgcgtcatcagggcaagatcatgtacgtgggcgacgtgcggagcgtgacacagaagcatatccaggagtggggccctttcgacctggtgatcggcggcagcccttgcaatgacctgagcatcgtgaacccagcccggaagggcctgtacgagggaaccggcagactgttcttcgagttttacagactgctgcacgacgcccggcctaaggaaggcgacgaccggcccttcttttggctgttcgagaatgtggtggccatgggagtcagcgacaagcgggatattagccggttcctggagagcaaccccgtgatgatcgatgccaaggaagtgagcgccgcccaccgggccagatacttctggggcaatctgcctggcatgaacagacccctggccagcaccgtgaacgacaagctggagctgcaggagtgcctggagcacggccggatcgccaagttcagcaaggtgagaaccatcaccacccgaagcaacagcatcaaacaaggcaaggaccagcactttcctgtgttcatgaacgagaaggaggacatcctgtggtgtaccgagatggagagagtgttcgggttcccagtccactacacagatgtcagcaacatgtctagactggccagacagagactgctgggaagaagctggtccgtccctgtgatcagacacctgttcgcccctctgaaggagtacttcgcctgcgtgagcagcggcaacagcaacgccaacagccggggccccagcttctctagcggcctggtgccactgtccctgagagggagccacatgggccccatggagatctacaaaaccgtgagcgcctggaagcggcagcctgtgcgcgtgctgagcctgtttcggaatatcgataaagtcctgaaaagcctgggattcctggagagcggctctggctccggcggtggcaccctgaagtacgtggaggatgtgacaaacgtggtcagacgggatgtggagaagtggggccccttcgatctggtgtacggcagcacccaacccctgggcagctcttgtgaccggtgccctggctggtacatgtttcagttccaccggatcctgcagtacgccctgccgagacaggagtcccagcggccattcttttggattttcatggacaacttgctgctgaccgaggatgaccaggaaactaccactcggttcctgcagaccgaagccgtgaccctgcaggacgtgagaggccgggactaccagaacgccatgcgggtgtggtccaacatccctggactgaaaagcaagcacgcacctctgacccctaaagaagaggagtacctgcaggcccaggtgcggagcagaagcaagctggacgcccctaaggtggatctgctggtgaagaattgcctcctgcccctgagagagtacttcaagtatttcagccagaatagtctgcccctgggaggcagcggcggcggcgccctggtgacatttgaggacgtcgccgtgcggttcacccaggaggaatgggctctgctggatccttctcagaaaatcctgtaccgggacgtgatgagagagacataccggaatctgacctccgtgggcatcaactgggaatgttgggaccttgaagcctgcttcagaagcctgggaagaaacctgagagtgcaggtggtgaagagaaagtgcgagctgaccaacagcggcccctgcgccgagggcggcccaagcagcggcgcccctcctcccagcggcggcagcccagccggctccccaacctctaccgaggagggcacctctgagtccgccacccccgagagcggccctggcacctccaccgagcccagcgagggcagcgcacccggcagccctgccggcagccccacctccacagaggagggaaccagcaccgagcccagcgaaggcagcgccccaggcaccagcaccgagcctagtgagcaggagattaaacggatcaacaagatcagaagaagacttgtgaaagacagcaacaccaagaaggccggcaagacaggccccatgaaaaccctgctggttagagtgatgacacccgatctgagagagcggctggaaaacctgagaaagaagcctgaaaatatcccccagcccatcagcaatacatctagagccaacctgaataagctgctgaccgattacaccgaaatgaagaaggcgatcctgcatgtgtactgggaagagttccagaaggaccctgtgggcctgatgagccgggtggcccagcctgccagcaagaagatcgatcagaacaagctgaaacctgagatggacgagaagggcaacctgaccaccgccggctttgcctgctctcagtgtggccagcccctgttcgtgtacaagctggagcaggtgtctgagaagggcaaggcttacaccaactacttcggacggtgcaatgtggccgagcacgaaaagctgatcctgctggcccagctgaagcccgagaaggatagcgacgaagccgtgacatatagcctgggaaagtttgggcagagggccctggatttctacagcattcatgtgaccaaggagtccacccaccccgtgaagcccctggcccagatcgccggaaacagatacgcctccggacctgtgggaaaggccctgagcgacgcatgtatgggcacaatcgcctccttcctgtctaagtaccaggacatcatcatcgaacaccagaaggtggtgaagggcaaccagaagagactggagagcctgcgggagctggccggcaaggaaaacctggaataccctagcgtgaccctgccacctcagcctcacaccaaggagggcgttgatgcctacaacgaagtgatcgcccgggtgcgaatgtgggtgaacctgaacctgtggcagaagctgaagctaagcagagatgatgccaagcctctgctgagactgaagggattcccttcctttcctctggtcgagagacaggccaacgaagtggactggtgggacatggtgtgtaacgtgaagaagctgatcaacgagaaaaaggaggatggcaaggtgttttggcagaatctggctggctacaagagacaggaagccctgagaccatacctgagcagcgaggaagatcggaagaagggaaagaaattcgctcggtaccagctgggcgacctgctgctgcacctggaaaagaagcacggcgaggactggggaaaggtgtacgacgaggcctgggagcggattgacaagaaagtggaaggcctgagcaagcacatcaagctggaagaggaacggagaagcgaggacgcccagagcaaggccgccctgaccgactggctgcgggctaaggccagcttcgtgatcgagggcctgaaggaggccgacaaggacgagttctgcagatgcgagctgaagctgcagaagtggtacggggacctgcggggaaagcccttcgccatcgaagccgagaacagcatcctggacatcagcggcttcagcaagcagtacaactgtgccttcatctggcagaaggacggcgtgaagaagctgaacctgtacctgatcatcaactacttcaagggcggcaagctgcggttcaagaagatcaaacctgaagccttcgaagccaacagattctacaccgtgatcaacaaaaagagcggcgagatcgtgcccatggaggtgaacttcaacttcgacgaccccaacctgatcatcctgcctctggcctttggcaagagacagggcagagaattcatctggaacgacctgctgtccctggaaaccggcagcctgaagctggccaacggaagagtgatcgagaagacactgtacaacagaagaacccggcaggatgagcctgccctgttcgtggccctgaccttcgagcggcgggaggtcctggactcctccaatatcaaaccaatgaacctgatcggcgtggcaagaggcgaaaacatccccgccgtgatcgccctgaccgaccccgagggctgcccactgagccggtttaaggatagcctgggaaacccaacccacatcctgagaatcggcgagagctataaggagaagcagcggaccatccaggccaagaaggaggtggagcagcggagagccggcggctacagccggaagtacgccagcaaagccaagaatctggcagacgatatggtgagaaacaccgctagagatctgctgtactacgccgtgacccaggatgccatgctgatcttcgccaacctgagccggggcttcggccggcagggcaagcggaccttcatggccgagagacagtacacacggatggaggactggctgaccgccaagctggcctacgagggcctgagcaagacctacctgtccaagacactggcccagtacacctccaagacatgcagcaactgtgggtttaccatcaccagcgccgactacgacagggtgctggagaagctgaagaagacagcaacaggctggatgaccacaattaacggcaaggagctgaaggtggagggccagattacctactacaacagatacaagagacagaacgtagtcaaggacctgtccgtcgagctggatagactgagcgaagaatctgtgaacaacgacatctcctcctggacaaagggcagaagcggagaagctctgagcctcctgaagaaaagattctcccatagacccgtgcaggagaagttcgtgtgcctgaactgcggcttcgagacacacgcagccgagcaagccgccctgaacatcgccagatcctggctgttcctgcggagccaggagtacaagaaataccagacaaacaagacaaccggcaacaccgataagagagccttcgtcgagacctggcagtccttttaccggaagaagcttaaggaggtgtggaaacctgccgtgcggtctggcggatctggcggaggctccatgcccggcccccccggcagcctggagatgggcgtgctgaccttcagggacgtggccatcgagttcagcctggaggagtggcagtgcctggacatcacccagcagaacctgtacaggaacgtgatgctggagaactacaggaacctggtgttcgtgggcatcgccgccagcaagcccgacctgatcacctgcctggagcagggcaaggagccctggaacgtgaagaggcacgagatggtggccggcggcccaagcagcggcgcccctcctcccagcggcggcagcccagccggctccccaacctctaccgaggagggcacctctgagtccgccacccccgagagcggccctggcacctccaccgagcccagcgagggcagcgcacccggcagccctgccggcagccccacctccacagaggagggaaccagcaccgagcccagcgaaggcagcgccccaggcaccagcaccgagcctagtgagcaggagattaaacggatcaacaagatcagaagaagacttgtgaaagacagcaacaccaagaaggccggcaagacaggccccatgaaaaccctgctggttagagtgatgacacccgatctgagagagcggctggaaaacctgagaaagaagcctgaaaatatcccccagcccatcagcaatacatctagagccaacctgaataagctgctgaccgattacaccgaaatgaagaaggcgatcctgcatgtgtactgggaagagttccagaaggaccctgtgggcctgatgagccgggtggcccagcctgccagcaagaagatcgatcagaacaagctgaaacctgagatggacgagaagggcaacctgaccaccgccggctttgcctgctctcagtgtggccagcccctgttcgtgtacaagctggagcaggtgtctgagaagggcaaggcttacaccaactacttcggacggtgcaatgtggccgagcacgaaaagctgatcctgctggcccagctgaagcccgagaaggatagcgacgaagccgtgacatatagcctgggaaagtttgggcagagggccctggatttctacagcattcatgtgaccaaggagtccacccaccccgtgaagcccctggcccagatcgccggaaacagatacgcctccggacctgtgggaaaggccctgagcgacgcatgtatgggcacaatcgcctccttcctgtctaagtaccaggacatcatcatcgaacaccagaaggtggtgaagggcaaccagaagagactggagagcctgcgggagctggccggcaaggaaaacctggaataccctagcgtgaccctgccacctcagcctcacaccaaggagggcgttgatgcctacaacgaagtgatcgcccgggtgcgaatgtgggtgaacctgaacctgtggcagaagctgaagctaagcagagatgatgccaagcctctgctgagactgaagggattcccttcctttcctctggtcgagagacaggccaacgaagtggactggtgggacatggtgtgtaacgtgaagaagctgatcaacgagaaaaaggaggatggcaaggtgttttggcagaatctggctggctacaagagacaggaagccctgagaccatacctgagcagcgaggaagatcggaagaagggaaagaaattcgctcggtaccagctgggcgacctgctgctgcacctggaaaagaagcacggcgaggactggggaaaggtgtacgacgaggcctgggagcggattgacaagaaagtggaaggcctgagcaagcacatcaagctggaagaggaacggagaagcgaggacgcccagagcaaggccgccctgaccgactggctgcgggctaaggccagcttcgtgatcgagggcctgaaggaggccgacaaggacgagttctgcagatgcgagctgaagctgcagaagtggtacggggacctgcggggaaagcccttcgccatcgaagccgagaacagcatcctggacatcagcggcttcagcaagcagtacaactgtgccttcatctggcagaaggacggcgtgaagaagctgaacctgtacctgatcatcaactacttcaagggcggcaagctgcggttcaagaagatcaaacctgaagccttcgaagccaacagattctacaccgtgatcaacaaaaagagcggcgagatcgtgcccatggaggtgaacttcaacttcgacgaccccaacctgatcatcctgcctctggcctttggcaagagacagggcagagaattcatctggaacgacctgctgtccctggaaaccggcagcctgaagctggccaacggaagagtgatcgagaagacactgtacaacagaagaacccggcaggatgagcctgccctgttcgtggccctgaccttcgagcggcgggaggtcctggactcctccaatatcaaaccaatgaacctgatcggcgtggcaagaggcgaaaacatccccgccgtgatcgccctgaccgaccccgagggctgcccactgagccggtttaaggatagcctgggaaacccaacccacatcctgagaatcggcgagagctataaggagaagcagcggaccatccaggccaagaaggaggtggagcagcggagagccggcggctacagccggaagtacgccagcaaagccaagaatctggcagacgatatggtgagaaacaccgctagagatctgctgtactacgccgtgacccaggatgccatgctgatcttcgccaacctgagccggggcttcggccggcagggcaagcggaccttcatggccgagagacagtacacacggatggaggactggctgaccgccaagctggcctacgagggcctgagcaagacctacctgtccaagacactggcccagtacacctccaagacatgcagcaactgtgggtttaccatcaccagcgccgactacgacagggtgctggagaagctgaagaagacagcaacaggctggatgaccacaattaacggcaaggagctgaaggtggagggccagattacctactacaacagatacaagagacagaacgtagtcaaggacctgtccgtcgagctggatagactgagcgaagaatctgtgaacaacgacatctcctcctggacaaagggcagaagcggagaagctctgagcctcctgaagaaaagattctcccatagacccgtgcaggagaagttcgtgtgcctgaactgcggcttcgagacacacgcagccgagcaagccgccctgaacatcgccagatcctggctgttcctgcggagccaggagtacaagaaataccagacaaacaagacaaccggcaacaccgataagagagccttcgtcgagacctggcagtccttttaccggaagaagcttaaggaggtgtggaaacctgccgtgcggtctggcggatctggcggaggctcctatgcccggcccccccggcagcctggagatgggcgtgctgaccttcagggacgtggccatcgagttcagcctggaggagtggcagtgcctggacatcacccagcagaacctgtacaggaacgtgatgctggagaactacaggaacctggtgttcgtgggcatcgccgccagcaagcccgacctgatcacctgcctggagcagggcaaggagccctggaacgtgaagaggcacgagatggtggccggatctggctccggcagcggccccaagaaaaagagaaaagtctaagctgccttctgcggggcttgccttctggccatgcccttcttctctcccttgcacctgtacctcttggtctttgaataaagcctgagtaggaaggctagcaaaaaaaaaaaaaaaaaaaaaaaaaaaaaaaaaaaaaaaaaaaaaaaaaaaaaaaaaaaaaaaaaaaaaaaaaaaaaaaa

SEQ ID NO: 16446 - RNA, 9485 nt, synthetic construct
  source 1..9485: mol_type = other RNA
aggaaataagagagaaaagaagagtaagaagaaatataagagccaccatggcccctaagaagaagcgtaaagtgagccggatggaacgcctcgtctacgaggtgcggcagaagtgcagaaacatcgaggacatctgcatctcctgcggatctctgaacgtgaccctggagcacccactgttcatcggcggcatgtgccagaactgtaaaaactgttttctggagtgtgcctatcaatacgacgatgacggctaccagagctactgcaccatctgttgcggcggaagagaggtgctgatgtgtggaaataacaactgctgccggtgcttctgcgtggaatgcgtggacctgctggtgggccccggcgccgcccaggccgctattaaggaagatccttggaactgctacatgtgcggccacaagggcacatacggcctgctgagacggagagaggactggcctagcagactgcagatgttcttcgccaataaccacgaccaggagttcgacccccctaaggtgtaccctcccgtccccgccgagaagagaaagcccatccgggtcctgagcctgttcgatggcatcgccaccggtctgctggtgctgaaggacctgggcatccaggtggataggtacattgcctccgaggtgtgcgaggactccatcaccgtgggaatggtgcgtcatcagggcaagatcatgtacgtgggcgacgtgcggagcgtgacacagaagcatatccaggagtggggccctttcgacctggtgatcggcggcagcccttgcaatgacctgagcatcgtgaacccagcccggaagggcctgtacgagggaaccggcagactgttcttcgagttttacagactgctgcacgacgcccggcctaaggaaggcgacgaccggcccttcttttggctgttcgagaatgtggtggccatgggagtcagcgacaagcgggatattagccggttcctggagagcaaccccgtgatgatcgatgccaaggaagtgagcgccgcccaccgggccagatacttctggggcaatctgcctggcatgaacagacccctggccagcaccgtgaacgacaagctggagctgcaggagtgcctggagcacggccggatcgccaagttcagcaaggtgagaaccatcaccacccgaagcaacagcatcaaacaaggcaaggaccagcactttcctgtgttcatgaacgagaaggaggacatcctgtggtgtaccgagatggagagagtgttcgggttcccagtccactacacagatgtcagcaacatgtctagactggccagacagagactgctgggaagaagctggtccgtccctgtgatcagacacctgttcgcccctctgaaggagtacttcgcctgcgtgagcagcggcaacagcaacgccaacagccggggccccagcttctctagcggcctggtgccactgtccctgagagggagccacatgggccccatggagatctacaaaaccgtgagcgcctggaagcggcagcctgtgcgcgtgctgagcctgtttcggaatatcgataaagtcctgaaaagcctgggattcctggagagcggctctggctccggcggtggcaccctgaagtacgtggaggatgtgacaaacgtggtcagacgggatgtggagaagtggggccccttcgatctggtgtacggcagcacccaacccctgggcagctcttgtgaccggtgccctggctggtacatgtttcagttccaccggatcctgcagtacgccctgccgagacaggagtcccagcggccattcttttggattttcatggacaacttgctgctgaccgaggatgaccaggaaactaccactcggttcctgcagaccgaagccgtgaccctgcaggacgtgagaggccgggactaccagaacgccatgcgggtgtggtccaacatccctggactgaaaagcaagcacgcacctctgacccctaaagaagaggagtacctgcaggcccaggtgcggagcagaagcaagctggacgcccctaaggtggatctgctggtgaagaattgcctcctgcccctgagagagtacttcaagtatttcagccagaatagtctgcccctgggaggcagcggcggcggcgccctggtgacatttgaggacgtcgccgtgcggttcacccaggaggaatgggctctgctggatccttctcagaaaatcctgtaccgggacgtgatgagagagacataccggaatctgacctccgtgggcatcaactgggaatgttgggaccttgaagcctgcttcagaagcctgggaagaaacctgagagtgcaggtggtgaagagaaagtgcgagctgaccaacagcggcccctgcgccgagggcggcccaagcagcggcgcccctcctcccagcggcggcagcccagccggctccccaacctctaccgaggagggcacctctgagtccgccacccccgagagcggccctggcacctccaccgagcccagcgagggcagcgcacccggcagccctgccggcagccccacctccacagaggagggaaccagcaccgagcccagcgaaggcagcgccccaggcaccagcaccgagcctagtgagcaggagattaaacggatcaacaagatcagaagaagacttgtgaaagacagcaacaccaagaaggccggcaagacaggccccatgaaaaccctgctggttagagtgatgacacccgatctgagagagcggctggaaaacctgagaaagaagcctgaaaatatcccccagcccatcagcaatacatctagagccaacctgaataagctgctgaccgattacaccgaaatgaagaaggcgatcctgcatgtgtactgggaagagttccagaaggaccctgtgggcctgatgagccgggtggcccagcctgccagcaagaagatcgatcagaacaagctgaaacctgagatggacgagaagggcaacctgaccaccgccggctttgcctgctctcagtgtggccagcccctgttcgtgtacaagctggagcaggtgtctgagaagggcaaggcttacaccaactacttcggacggtgcaatgtggccgagcacgaaaagctgatcctgctggcccagctgaagcccgagaaggatagcgacgaagccgtgacatatagcctgggaaagtttgggcagagggccctggatttctacagcattcatgtgaccaaggagtccacccaccccgtgaagcccctggcccagatcgccggaaacagatacgcctccggacctgtgggaaaggccctgagcgacgcatgtatgggcacaatcgcctccttcctgtctaagtaccaggacatcatcatcgaacaccagaaggtggtgaagggcaaccagaagagactggagagcctgcgggagctggccggcaaggaaaacctggaataccctagcgtgaccctgccacctcagcctcacaccaaggagggcgttgatgcctacaacgaagtgatcgcccgggtgcgaatgtgggtgaacctgaacctgtggcagaagctgaagctaagcagagatgatgccaagcctctgctgagactgaagggattcccttcctttcctctggtcgagagacaggccaacgaagtggactggtgggacatggtgtgtaacgtgaagaagctgatcaacgagaaaaaggaggatggcaaggtgttttggcagaatctggctggctacaagagacaggaagccctgagaccatacctgagcagcgaggaagatcggaagaagggaaagaaattcgctcggtaccagctgggcgacctgctgctgcacctggaaaagaagcacggcgaggactggggaaaggtgtacgacgaggcctgggagcggattgacaagaaagtggaaggcctgagcaagcacatcaagctggaagaggaacggagaagcgaggacgcccagagcaaggccgccctgaccgactggctgcgggctaaggccagcttcgtgatcgagggcctgaaggaggccgacaaggacgagttctgcagatgcgagctgaagctgcagaagtggtacggggacctgcggggaaagcccttcgccatcgaagccgagaacagcatcctggacatcagcggcttcagcaagcagtacaactgtgccttcatctggcagaaggacggcgtgaagaagctgaacctgtacctgatcatcaactacttcaagggcggcaagctgcggttcaagaagatcaaacctgaagccttcgaagccaacagattctacaccgtgatcaacaaaaagagcggcgagatcgtgcccatggaggtgaacttcaacttcgacgaccccaacctgatcatcctgcctctggcctttggcaagagacagggcagagaattcatctggaacgacctgctgtccctggaaaccggcagcctgaagctggccaacggaagagtgatcgagaagacactgtacaacagaagaacccggcaggatgagcctgccctgttcgtggccctgaccttcgagcggcgggaggtcctggactcctccaatatcaaaccaatgaacctgatcggcgtggcaagaggcgaaaacatccccgccgtgatcgccctgaccgaccccgagggctgcccactgagccggtttaaggatagcctgggaaacccaacccacatcctgagaatcggcgagagctataaggagaagcagcggaccatccaggccaagaaggaggtggagcagcggagagccggcggctacagccggaagtacgccagcaaagccaagaatctggcagacgatatggtgagaaacaccgctagagatctgctgtactacgccgtgacccaggatgccatgctgatcttcgccaacctgagccggggcttcggccggcagggcaagcggaccttcatggccgagagacagtacacacggatggaggactggctgaccgccaagctggcctacgagggcctgagcaagacctacctgtccaagacactggcccagtacacctccaagacatgcagcaactgtgggtttaccatcaccagcgccgactacgacagggtgctggagaagctgaagaagacagcaacaggctggatgaccacaattaacggcaaggagctgaaggtggagggccagattacctactacaacagatacaagagacagaacgtagtcaaggacctgtccgtcgagctggatagactgagcgaagaatctgtgaacaacgacatctcctcctggacaaagggcagaagcggagaagctctgagcctcctgaagaaaagattctcccatagacccgtgcaggagaagttcgtgtgcctgaactgcggcttcgagacacacgcagccgagcaagccgccctgaacatcgccagatcctggctgttcctgcggagccaggagtacaagaaataccagacaaacaagacaaccggcaacaccgataagagagccttcgtcgagacctggcagtccttttaccggaagaagcttaaggaggtgtggaaacctgccgtgcggtctggcggatctggcggaggctccgacatgggcctggtgagcttcgaggacgtggccgtggacttcacctggcaggagtggcaggagctggacgccgcccagaggaccctgtacagggacgtgatgctggagaactacaggagcctggtgtggctgggccactgcctggccaagcccgagctgatcagcaagctggaggagggcttcgagccctggggcgtggccgaggccaccgagcagtgcctgccctgcgccgaggaccagaccggcggcccaagcagcggcgcccctcctcccagcggcggcagcccagccggctccccaacctctaccgaggagggcacctctgagtccgccacccccgagagcggccctggcacctccaccgagcccagcgagggcagcgcacccggcagccctgccggcagccccacctccacagaggagggaaccagcaccgagcccagcgaaggcagcgccccaggcaccagcaccgagcctagtgagcaggagattaaacggatcaacaagatcagaagaagacttgtgaaagacagcaacaccaagaaggccggcaagacaggccccatgaaaaccctgctggttagagtgatgacacccgatctgagagagcggctggaaaacctgagaaagaagcctgaaaatatcccccagcccatcagcaatacatctagagccaacctgaataagctgctgaccgattacaccgaaatgaagaaggcgatcctgcatgtgtactgggaagagttccagaaggaccctgtgggcctgatgagccgggtggcccagcctgccagcaagaagatcgatcagaacaagctgaaacctgagatggacgagaagggcaacctgaccaccgccggctttgcctgctctcagtgtggccagcccctgttcgtgtacaagctggagcaggtgtctgagaagggcaaggcttacaccaactacttcggacggtgcaatgtggccgagcacgaaaagctgatcctgctggcccagctgaagcccgagaaggatagcgacgaagccgtgacatatagcctgggaaagtttgggcagagggccctggatttctacagcattcatgtgaccaaggagtccacccaccccgtgaagcccctggcccagatcgccggaaacagatacgcctccggacctgtgggaaaggccctgagcgacgcatgtatgggcacaatcgcctccttcctgtctaagtaccaggacatcatcatcgaacaccagaaggtggtgaagggcaaccagaagagactggagagcctgcgggagctggccggcaaggaaaacctggaataccctagcgtgaccctgccacctcagcctcacaccaaggagggcgttgatgcctacaacgaagtgatcgcccgggtgcgaatgtgggtgaacctgaacctgtggcagaagctgaagctaagcagagatgatgccaagcctctgctgagactgaagggattcccttcctttcctctggtcgagagacaggccaacgaagtggactggtgggacatggtgtgtaacgtgaagaagctgatcaacgagaaaaaggaggatggcaaggtgttttggcagaatctggctggctacaagagacaggaagccctgagaccatacctgagcagcgaggaagatcggaagaagggaaagaaattcgctcggtaccagctgggcgacctgctgctgcacctggaaaagaagcacggcgaggactggggaaaggtgtacgacgaggcctgggagcggattgacaagaaagtggaaggcctgagcaagcacatcaagctggaagaggaacggagaagcgaggacgcccagagcaaggccgccctgaccgactggctgcgggctaaggccagcttcgtgatcgagggcctgaaggaggccgacaaggacgagttctgcagatgcgagctgaagctgcagaagtggtacggggacctgcggggaaagcccttcgccatcgaagccgagaacagcatcctggacatcagcggcttcagcaagcagtacaactgtgccttcatctggcagaaggacggcgtgaagaagctgaacctgtacctgatcatcaactacttcaagggcggcaagctgcggttcaagaagatcaaacctgaagccttcgaagccaacagattctacaccgtgatcaacaaaaagagcggcgagatcgtgcccatggaggtgaacttcaacttcgacgaccccaacctgatcatcctgcctctggcctttggcaagagacagggcagagaattcatctggaacgacctgctgtccctggaaaccggcagcctgaagctggccaacggaagagtgatcgagaagacactgtacaacagaagaacccggcaggatgagcctgccctgttcgtggccctgaccttcgagcggcgggaggtcctggactcctccaatatcaaaccaatgaacctgatcggcgtggcaagaggcgaaaacatccccgccgtgatcgccctgaccgaccccgagggctgcccactgagccggtttaaggatagcctgggaaacccaacccacatcctgagaatcggcgagagctataaggagaagcagcggaccatccaggccaagaaggaggtggagcagcggagagccggcggctacagccggaagtacgccagcaaagccaagaatctggcagacgatatggtgagaaacaccgctagagatctgctgtactacgccgtgacccaggatgccatgctgatcttcgccaacctgagccggggcttcggccggcagggcaagcggaccttcatggccgagagacagtacacacggatggaggactggctgaccgccaagctggcctacgagggcctgagcaagacctacctgtccaagacactggcccagtacacctccaagacatgcagcaactgtgggtttaccatcaccagcgccgactacgacagggtgctggagaagctgaagaagacagcaacaggctggatgaccacaattaacggcaaggagctgaaggtggagggccagattacctactacaacagatacaagagacagaacgtagtcaaggacctgtccgtcgagctggatagactgagcgaagaatctgtgaacaacgacatctcctcctggacaaagggcagaagcggagaagctctgagcctcctgaagaaaagattctcccatagacccgtgcaggagaagttcgtgtgcctgaactgcggcttcgagacacacgcagccgagcaagccgccctgaacatcgccagatcctggctgttcctgcggagccaggagtacaagaaataccagacaaacaagacaaccggcaacaccgataagagagccttcgtcgagacctggcagtccttttaccggaagaagcttaaggaggtgtggaaacctgccgtgcggtctggcggatctggcggaggctcctgacatgggcctggtgagcttcgaggacgtggccgtggacttcacctggcaggagtggcaggagctggacgccgcccagaggaccctgtacagggacgtgatgctggagaactacaggagcctggtgtggctgggccactgcctggccaagcccgagctgatcagcaagctggaggagggcttcgagccctggggcgtggccgaggccaccgagcagtgcctgccctgcgccgaggaccagaccggatctggctccggcagcggccccaagaaaaagagaaaagtctaagctgccttctgcggggcttgccttctggccatgcccttcttctctcccttgcacctgtacctcttggtctttgaataaagcctgagtaggaaggctagcaaaaaaaaaaaaaaaaaaaaaaaaaaaaaaaaaaaaaaaaaaaaaaaaaaaaaaaaaaaaaaaaaaaaaaaaaaaaaaaa

SEQ ID NO: 16447 - RNA, 9485 nt, synthetic construct
  source 1..9485: mol_type = other RNA
aggaaataagagagaaaagaagagtaagaagaaatataagagccaccatggcccctaagaagaagcgtaaagtgagccggatggaacgcctcgtctacgaggtgcggcagaagtgcagaaacatcgaggacatctgcatctcctgcggatctctgaacgtgaccctggagcacccactgttcatcggcggcatgtgccagaactgtaaaaactgttttctggagtgtgcctatcaatacgacgatgacggctaccagagctactgcaccatctgttgcggcggaagagaggtgctgatgtgtggaaataacaactgctgccggtgcttctgcgtggaatgcgtggacctgctggtgggccccggcgccgcccaggccgctattaaggaagatccttggaactgctacatgtgcggccacaagggcacatacggcctgctgagacggagagaggactggcctagcagactgcagatgttcttcgccaataaccacgaccaggagttcgacccccctaaggtgtaccctcccgtccccgccgagaagagaaagcccatccgggtcctgagcctgttcgatggcatcgccaccggtctgctggtgctgaaggacctgggcatccaggtggataggtacattgcctccgaggtgtgcgaggactccatcaccgtgggaatggtgcgtcatcagggcaagatcatgtacgtgggcgacgtgcggagcgtgacacagaagcatatccaggagtggggccctttcgacctggtgatcggcggcagcccttgcaatgacctgagcatcgtgaacccagcccggaagggcctgtacgagggaaccggcagactgttcttcgagttttacagactgctgcacgacgcccggcctaaggaaggcgacgaccggcccttcttttggctgttcgagaatgtggtggccatgggagtcagcgacaagcgggatattagccggttcctggagagcaaccccgtgatgatcgatgccaaggaagtgagcgccgcccaccgggccagatacttctggggcaatctgcctggcatgaacagacccctggccagcaccgtgaacgacaagctggagctgcaggagtgcctggagcacggccggatcgccaagttcagcaaggtgagaaccatcaccacccgaagcaacagcatcaaacaaggcaaggaccagcactttcctgtgttcatgaacgagaaggaggacatcctgtggtgtaccgagatggagagagtgttcgggttcccagtccactacacagatgtcagcaacatgtctagactggccagacagagactgctgggaagaagctggtccgtccctgtgatcagacacctgttcgcccctctgaaggagtacttcgcctgcgtgagcagcggcaacagcaacgccaacagccggggccccagcttctctagcggcctggtgccactgtccctgagagggagccacatgggccccatggagatctacaaaaccgtgagcgcctggaagcggcagcctgtgcgcgtgctgagcctgtttcggaatatcgataaagtcctgaaaagcctgggattcctggagagcggctctggctccggcggtggcaccctgaagtacgtggaggatgtgacaaacgtggtcagacgggatgtggagaagtggggccccttcgatctggtgtacggcagcacccaacccctgggcagctcttgtgaccggtgccctggctggtacatgtttcagttccaccggatcctgcagtacgccctgccgagacaggagtcccagcggccattcttttggattttcatggacaacttgctgctgaccgaggatgaccaggaaactaccactcggttcctgcagaccgaagccgtgaccctgcaggacgtgagaggccgggactaccagaacgccatgcgggtgtggtccaacatccctggactgaaaagcaagcacgcacctctgacccctaaagaagaggagtacctgcaggcccaggtgcggagcagaagcaagctggacgcccctaaggtggatctgctggtgaagaattgcctcctgcccctgagagagtacttcaagtatttcagccagaatagtctgcccctgggaggcagcggcggcggcgccctggtgacatttgaggacgtcgccgtgcggttcacccaggaggaatgggctctgctggatccttctcagaaaatcctgtaccgggacgtgatgagagagacataccggaatctgacctccgtgggcatcaactgggaatgttgggaccttgaagcctgcttcagaagcctgggaagaaacctgagagtgcaggtggtgaagagaaagtgcgagctgaccaacagcggcccctgcgccgagggcggcccaagcagcggcgcccctcctcccagcggcggcagcccagccggctccccaacctctaccgaggagggcacctctgagtccgccacccccgagagcggccctggcacctccaccgagcccagcgagggcagcgcacccggcagccctgccggcagccccacctccacagaggagggaaccagcaccgagcccagcgaaggcagcgccccaggcaccagcaccgagcctagtgagcaggagattaaacggatcaacaagatcagaagaagacttgtgaaagacagcaacaccaagaaggccggcaagacaggccccatgaaaaccctgctggttagagtgatgacacccgatctgagagagcggctggaaaacctgagaaagaagcctgaaaatatcccccagcccatcagcaatacatctagagccaacctgaataagctgctgaccgattacaccgaaatgaagaaggcgatcctgcatgtgtactgggaagagttccagaaggaccctgtgggcctgatgagccgggtggcccagcctgccagcaagaagatcgatcagaacaagctgaaacctgagatggacgagaagggcaacctgaccaccgccggctttgcctgctctcagtgtggccagcccctgttcgtgtacaagctggagcaggtgtctgagaagggcaaggcttacaccaactacttcggacggtgcaatgtggccgagcacgaaaagctgatcctgctggcccagctgaagcccgagaaggatagcgacgaagccgtgacatatagcctgggaaagtttgggcagagggccctggatttctacagcattcatgtgaccaaggagtccacccaccccgtgaagcccctggcccagatcgccggaaacagatacgcctccggacctgtgggaaaggccctgagcgacgcatgtatgggcacaatcgcctccttcctgtctaagtaccaggacatcatcatcgaacaccagaaggtggtgaagggcaaccagaagagactggagagcctgcgggagctggccggcaaggaaaacctggaataccctagcgtgaccctgccacctcagcctcacaccaaggagggcgttgatgcctacaacgaagtgatcgcccgggtgcgaatgtgggtgaacctgaacctgtggcagaagctgaagctaagcagagatgatgccaagcctctgctgagactgaagggattcccttcctttcctctggtcgagagacaggccaacgaagtggactggtgggacatggtgtgtaacgtgaagaagctgatcaacgagaaaaaggaggatggcaaggtgttttggcagaatctggctggctacaagagacaggaagccctgagaccatacctgagcagcgaggaagatcggaagaagggaaagaaattcgctcggtaccagctgggcgacctgctgctgcacctggaaaagaagcacggcgaggactggggaaaggtgtacgacgaggcctgggagcggattgacaagaaagtggaaggcctgagcaagcacatcaagctggaagaggaacggagaagcgaggacgcccagagcaaggccgccctgaccgactggctgcgggctaaggccagcttcgtgatcgagggcctgaaggaggccgacaaggacgagttctgcagatgcgagctgaagctgcagaagtggtacggggacctgcggggaaagcccttcgccatcgaagccgagaacagcatcctggacatcagcggcttcagcaagcagtacaactgtgccttcatctggcagaaggacggcgtgaagaagctgaacctgtacctgatcatcaactacttcaagggcggcaagctgcggttcaagaagatcaaacctgaagccttcgaagccaacagattctacaccgtgatcaacaaaaagagcggcgagatcgtgcccatggaggtgaacttcaacttcgacgaccccaacctgatcatcctgcctctggcctttggcaagagacagggcagagaattcatctggaacgacctgctgtccctggaaaccggcagcctgaagctggccaacggaagagtgatcgagaagacactgtacaacagaagaacccggcaggatgagcctgccctgttcgtggccctgaccttcgagcggcgggaggtcctggactcctccaatatcaaaccaatgaacctgatcggcgtggcaagaggcgaaaacatccccgccgtgatcgccctgaccgaccccgagggctgcccactgagccggtttaaggatagcctgggaaacccaacccacatcctgagaatcggcgagagctataaggagaagcagcggaccatccaggccaagaaggaggtggagcagcggagagccggcggctacagccggaagtacgccagcaaagccaagaatctggcagacgatatggtgagaaacaccgctagagatctgctgtactacgccgtgacccaggatgccatgctgatcttcgccaacctgagccggggcttcggccggcagggcaagcggaccttcatggccgagagacagtacacacggatggaggactggctgaccgccaagctggcctacgagggcctgagcaagacctacctgtccaagacactggcccagtacacctccaagacatgcagcaactgtgggtttaccatcaccagcgccgactacgacagggtgctggagaagctgaagaagacagcaacaggctggatgaccacaattaacggcaaggagctgaaggtggagggccagattacctactacaacagatacaagagacagaacgtagtcaaggacctgtccgtcgagctggatagactgagcgaagaatctgtgaacaacgacatctcctcctggacaaagggcagaagcggagaagctctgagcctcctgaagaaaagattctcccatagacccgtgcaggagaagttcgtgtgcctgaactgcggcttcgagacacacgcagccgagcaagccgccctgaacatcgccagatcctggctgttcctgcggagccaggagtacaagaaataccagacaaacaagacaaccggcaacaccgataagagagccttcgtcgagacctggcagtccttttaccggaagaagcttaaggaggtgtggaaacctgccgtgcggtctggcggatctggcggaggctccctgcagggccagctgaccttcagggacgtggccatcgagttcagcgaggaggagtggaggtgcctgacccacacccagaggcagctgtacagggacatgatgctggagaactacaggcacctgctgttcctgggcctgatcgtgagcaagcccgacctggtgagcttcctggagcagaagaaggacccctgggacgtgaagaggaagaagaccgtggtgttcgaccccggcaggtgggagtggggcggcccaagcagcggcgcccctcctcccagcggcggcagcccagccggctccccaacctctaccgaggagggcacctctgagtccgccacccccgagagcggccctggcacctccaccgagcccagcgagggcagcgcacccggcagccctgccggcagccccacctccacagaggagggaaccagcaccgagcccagcgaaggcagcgccccaggcaccagcaccgagcctagtgagcaggagattaaacggatcaacaagatcagaagaagacttgtgaaagacagcaacaccaagaaggccggcaagacaggccccatgaaaaccctgctggttagagtgatgacacccgatctgagagagcggctggaaaacctgagaaagaagcctgaaaatatcccccagcccatcagcaatacatctagagccaacctgaataagctgctgaccgattacaccgaaatgaagaaggcgatcctgcatgtgtactgggaagagttccagaaggaccctgtgggcctgatgagccgggtggcccagcctgccagcaagaagatcgatcagaacaagctgaaacctgagatggacgagaagggcaacctgaccaccgccggctttgcctgctctcagtgtggccagcccctgttcgtgtacaagctggagcaggtgtctgagaagggcaaggcttacaccaactacttcggacggtgcaatgtggccgagcacgaaaagctgatcctgctggcccagctgaagcccgagaaggatagcgacgaagccgtgacatatagcctgggaaagtttgggcagagggccctggatttctacagcattcatgtgaccaaggagtccacccaccccgtgaagcccctggcccagatcgccggaaacagatacgcctccggacctgtgggaaaggccctgagcgacgcatgtatgggcacaatcgcctccttcctgtctaagtaccaggacatcatcatcgaacaccagaaggtggtgaagggcaaccagaagagactggagagcctgcgggagctggccggcaaggaaaacctggaataccctagcgtgaccctgccacctcagcctcacaccaaggagggcgttgatgcctacaacgaagtgatcgcccgggtgcgaatgtgggtgaacctgaacctgtggcagaagctgaagctaagcagagatgatgccaagcctctgctgagactgaagggattcccttcctttcctctggtcgagagacaggccaacgaagtggactggtgggacatggtgtgtaacgtgaagaagctgatcaacgagaaaaaggaggatggcaaggtgttttggcagaatctggctggctacaagagacaggaagccctgagaccatacctgagcagcgaggaagatcggaagaagggaaagaaattcgctcggtaccagctgggcgacctgctgctgcacctggaaaagaagcacggcgaggactggggaaaggtgtacgacgaggcctgggagcggattgacaagaaagtggaaggcctgagcaagcacatcaagctggaagaggaacggagaagcgaggacgcccagagcaaggccgccctgaccgactggctgcgggctaaggccagcttcgtgatcgagggcctgaaggaggccgacaaggacgagttctgcagatgcgagctgaagctgcagaagtggtacggggacctgcggggaaagcccttcgccatcgaagccgagaacagcatcctggacatcagcggcttcagcaagcagtacaactgtgccttcatctggcagaaggacggcgtgaagaagctgaacctgtacctgatcatcaactacttcaagggcggcaagctgcggttcaagaagatcaaacctgaagccttcgaagccaacagattctacaccgtgatcaacaaaaagagcggcgagatcgtgcccatggaggtgaacttcaacttcgacgaccccaacctgatcatcctgcctctggcctttggcaagagacagggcagagaattcatctggaacgacctgctgtccctggaaaccggcagcctgaagctggccaacggaagagtgatcgagaagacactgtacaacagaagaacccggcaggatgagcctgccctgttcgtggccctgaccttcgagcggcgggaggtcctggactcctccaatatcaaaccaatgaacctgatcggcgtggcaagaggcgaaaacatccccgccgtgatcgccctgaccgaccccgagggctgcccactgagccggtttaaggatagcctgggaaacccaacccacatcctgagaatcggcgagagctataaggagaagcagcggaccatccaggccaagaaggaggtggagcagcggagagccggcggctacagccggaagtacgccagcaaagccaagaatctggcagacgatatggtgagaaacaccgctagagatctgctgtactacgccgtgacccaggatgccatgctgatcttcgccaacctgagccggggcttcggccggcagggcaagcggaccttcatggccgagagacagtacacacggatggaggactggctgaccgccaagctggcctacgagggcctgagcaagacctacctgtccaagacactggcccagtacacctccaagacatgcagcaactgtgggtttaccatcaccagcgccgactacgacagggtgctggagaagctgaagaagacagcaacaggctggatgaccacaattaacggcaaggagctgaaggtggagggccagattacctactacaacagatacaagagacagaacgtagtcaaggacctgtccgtcgagctggatagactgagcgaagaatctgtgaacaacgacatctcctcctggacaaagggcagaagcggagaagctctgagcctcctgaagaaaagattctcccatagacccgtgcaggagaagttcgtgtgcctgaactgcggcttcgagacacacgcagccgagcaagccgccctgaacatcgccagatcctggctgttcctgcggagccaggagtacaagaaataccagacaaacaagacaaccggcaacaccgataagagagccttcgtcgagacctggcagtccttttaccggaagaagcttaaggaggtgtggaaacctgccgtgcggtctggcggatctggcggaggctcctctgcagggccagctgaccttcagggacgtggccatcgagttcagcgaggaggagtggaggtgcctgacccacacccagaggcagctgtacagggacatgatgctggagaactacaggcacctgctgttcctgggcctgatcgtgagcaagcccgacctggtgagcttcctggagcagaagaaggacccctgggacgtgaagaggaagaagaccgtggtgttcgaccccggcaggtgggagtggggatctggctccggcagcggccccaagaaaaagagaaaagtctaagctgccttctgcggggcttgccttctggccatgcccttcttctctcccttgcacctgtacctcttggtctttgaataaagcctgagtaggaaggctagcaaaaaaaaaaaaaaaaaaaaaaaaaaaaaaaaaaaaaaaaaaaaaaaaaaaaaaaaaaaaaaaaaaaaaaaaaaaaaaaa

SEQ ID NO: 16448 - RNA, 9485 nt, synthetic construct
  source 1..9485: mol_type = other RNA
aggaaataagagagaaaagaagagtaagaagaaatataagagccaccatggcccctaagaagaagcgtaaagtgagccggatggaacgcctcgtctacgaggtgcggcagaagtgcagaaacatcgaggacatctgcatctcctgcggatctctgaacgtgaccctggagcacccactgttcatcggcggcatgtgccagaactgtaaaaactgttttctggagtgtgcctatcaatacgacgatgacggctaccagagctactgcaccatctgttgcggcggaagagaggtgctgatgtgtggaaataacaactgctgccggtgcttctgcgtggaatgcgtggacctgctggtgggccccggcgccgcccaggccgctattaaggaagatccttggaactgctacatgtgcggccacaagggcacatacggcctgctgagacggagagaggactggcctagcagactgcagatgttcttcgccaataaccacgaccaggagttcgacccccctaaggtgtaccctcccgtccccgccgagaagagaaagcccatccgggtcctgagcctgttcgatggcatcgccaccggtctgctggtgctgaaggacctgggcatccaggtggataggtacattgcctccgaggtgtgcgaggactccatcaccgtgggaatggtgcgtcatcagggcaagatcatgtacgtgggcgacgtgcggagcgtgacacagaagcatatccaggagtggggccctttcgacctggtgatcggcggcagcccttgcaatgacctgagcatcgtgaacccagcccggaagggcctgtacgagggaaccggcagactgttcttcgagttttacagactgctgcacgacgcccggcctaaggaaggcgacgaccggcccttcttttggctgttcgagaatgtggtggccatgggagtcagcgacaagcgggatattagccggttcctggagagcaaccccgtgatgatcgatgccaaggaagtgagcgccgcccaccgggccagatacttctggggcaatctgcctggcatgaacagacccctggccagcaccgtgaacgacaagctggagctgcaggagtgcctggagcacggccggatcgccaagttcagcaaggtgagaaccatcaccacccgaagcaacagcatcaaacaaggcaaggaccagcactttcctgtgttcatgaacgagaaggaggacatcctgtggtgtaccgagatggagagagtgttcgggttcccagtccactacacagatgtcagcaacatgtctagactggccagacagagactgctgggaagaagctggtccgtccctgtgatcagacacctgttcgcccctctgaaggagtacttcgcctgcgtgagcagcggcaacagcaacgccaacagccggggccccagcttctctagcggcctggtgccactgtccctgagagggagccacatgggccccatggagatctacaaaaccgtgagcgcctggaagcggcagcctgtgcgcgtgctgagcctgtttcggaatatcgataaagtcctgaaaagcctgggattcctggagagcggctctggctccggcggtggcaccctgaagtacgtggaggatgtgacaaacgtggtcagacgggatgtggagaagtggggccccttcgatctggtgtacggcagcacccaacccctgggcagctcttgtgaccggtgccctggctggtacatgtttcagttccaccggatcctgcagtacgccctgccgagacaggagtcccagcggccattcttttggattttcatggacaacttgctgctgaccgaggatgaccaggaaactaccactcggttcctgcagaccgaagccgtgaccctgcaggacgtgagaggccgggactaccagaacgccatgcgggtgtggtccaacatccctggactgaaaagcaagcacgcacctctgacccctaaagaagaggagtacctgcaggcccaggtgcggagcagaagcaagctggacgcccctaaggtggatctgctggtgaagaattgcctcctgcccctgagagagtacttcaagtatttcagccagaatagtctgcccctgggaggcagcggcggcggcgccctggtgacatttgaggacgtcgccgtgcggttcacccaggaggaatgggctctgctggatccttctcagaaaatcctgtaccgggacgtgatgagagagacataccggaatctgacctccgtgggcatcaactgggaatgttgggaccttgaagcctgcttcagaagcctgggaagaaacctgagagtgcaggtggtgaagagaaagtgcgagctgaccaacagcggcccctgcgccgagggcggcccaagcagcggcgcccctcctcccagcggcggcagcccagccggctccccaacctctaccgaggagggcacctctgagtccgccacccccgagagcggccctggcacctccaccgagcccagcgagggcagcgcacccggcagccctgccggcagccccacctccacagaggagggaaccagcaccgagcccagcgaaggcagcgccccaggcaccagcaccgagcctagtgagcaggagattaaacggatcaacaagatcagaagaagacttgtgaaagacagcaacaccaagaaggccggcaagacaggccccatgaaaaccctgctggttagagtgatgacacccgatctgagagagcggctggaaaacctgagaaagaagcctgaaaatatcccccagcccatcagcaatacatctagagccaacctgaataagctgctgaccgattacaccgaaatgaagaaggcgatcctgcatgtgtactgggaagagttccagaaggaccctgtgggcctgatgagccgggtggcccagcctgccagcaagaagatcgatcagaacaagctgaaacctgagatggacgagaagggcaacctgaccaccgccggctttgcctgctctcagtgtggccagcccctgttcgtgtacaagctggagcaggtgtctgagaagggcaaggcttacaccaactacttcggacggtgcaatgtggccgagcacgaaaagctgatcctgctggcccagctgaagcccgagaaggatagcgacgaagccgtgacatatagcctgggaaagtttgggcagagggccctggatttctacagcattcatgtgaccaaggagtccacccaccccgtgaagcccctggcccagatcgccggaaacagatacgcctccggacctgtgggaaaggccctgagcgacgcatgtatgggcacaatcgcctccttcctgtctaagtaccaggacatcatcatcgaacaccagaaggtggtgaagggcaaccagaagagactggagagcctgcgggagctggccggcaaggaaaacctggaataccctagcgtgaccctgccacctcagcctcacaccaaggagggcgttgatgcctacaacgaagtgatcgcccgggtgcgaatgtgggtgaacctgaacctgtggcagaagctgaagctaagcagagatgatgccaagcctctgctgagactgaagggattcccttcctttcctctggtcgagagacaggccaacgaagtggactggtgggacatggtgtgtaacgtgaagaagctgatcaacgagaaaaaggaggatggcaaggtgttttggcagaatctggctggctacaagagacaggaagccctgagaccatacctgagcagcgaggaagatcggaagaagggaaagaaattcgctcggtaccagctgggcgacctgctgctgcacctggaaaagaagcacggcgaggactggggaaaggtgtacgacgaggcctgggagcggattgacaagaaagtggaaggcctgagcaagcacatcaagctggaagaggaacggagaagcgaggacgcccagagcaaggccgccctgaccgactggctgcgggctaaggccagcttcgtgatcgagggcctgaaggaggccgacaaggacgagttctgcagatgcgagctgaagctgcagaagtggtacggggacctgcggggaaagcccttcgccatcgaagccgagaacagcatcctggacatcagcggcttcagcaagcagtacaactgtgccttcatctggcagaaggacggcgtgaagaagctgaacctgtacctgatcatcaactacttcaagggcggcaagctgcggttcaagaagatcaaacctgaagccttcgaagccaacagattctacaccgtgatcaacaaaaagagcggcgagatcgtgcccatggaggtgaacttcaacttcgacgaccccaacctgatcatcctgcctctggcctttggcaagagacagggcagagaattcatctggaacgacctgctgtccctggaaaccggcagcctgaagctggccaacggaagagtgatcgagaagacactgtacaacagaagaacccggcaggatgagcctgccctgttcgtggccctgaccttcgagcggcgggaggtcctggactcctccaatatcaaaccaatgaacctgatcggcgtggcaagaggcgaaaacatccccgccgtgatcgccctgaccgaccccgagggctgcccactgagccggtttaaggatagcctgggaaacccaacccacatcctgagaatcggcgagagctataaggagaagcagcggaccatccaggccaagaaggaggtggagcagcggagagccggcggctacagccggaagtacgccagcaaagccaagaatctggcagacgatatggtgagaaacaccgctagagatctgctgtactacgccgtgacccaggatgccatgctgatcttcgccaacctgagccggggcttcggccggcagggcaagcggaccttcatggccgagagacagtacacacggatggaggactggctgaccgccaagctggcctacgagggcctgagcaagacctacctgtccaagacactggcccagtacacctccaagacatgcagcaactgtgggtttaccatcaccagcgccgactacgacagggtgctggagaagctgaagaagacagcaacaggctggatgaccacaattaacggcaaggagctgaaggtggagggccagattacctactacaacagatacaagagacagaacgtagtcaaggacctgtccgtcgagctggatagactgagcgaagaatctgtgaacaacgacatctcctcctggacaaagggcagaagcggagaagctctgagcctcctgaagaaaagattctcccatagacccgtgcaggagaagttcgtgtgcctgaactgcggcttcgagacacacgcagccgagcaagccgccctgaacatcgccagatcctggctgttcctgcggagccaggagtacaagaaataccagacaaacaagacaaccggcaacaccgataagagagccttcgtcgagacctggcagtccttttaccggaagaagcttaaggaggtgtggaaacctgccgtgcggtctggcggatctggcggaggctccagccaggagcccgtgaccttcgccgacgtggccgtggtgttcacccccgaggagtgggtgttcctggacagcacccagaggagcctgtacagggacgtgatgctggagaactacaggaacctggccagcgtggccgaccagctgtgcaagcccaacgccagcagctacctggagcagaggggcgagcagtggaccaccgacaggggcatcctggccgacacctgcgccgagccccagctgcagggcggcccaagcagcggcgcccctcctcccagcggcggcagcccagccggctccccaacctctaccgaggagggcacctctgagtccgccacccccgagagcggccctggcacctccaccgagcccagcgagggcagcgcacccggcagccctgccggcagccccacctccacagaggagggaaccagcaccgagcccagcgaaggcagcgccccaggcaccagcaccgagcctagtgagcaggagattaaacggatcaacaagatcagaagaagacttgtgaaagacagcaacaccaagaaggccggcaagacaggccccatgaaaaccctgctggttagagtgatgacacccgatctgagagagcggctggaaaacctgagaaagaagcctgaaaatatcccccagcccatcagcaatacatctagagccaacctgaataagctgctgaccgattacaccgaaatgaagaaggcgatcctgcatgtgtactgggaagagttccagaaggaccctgtgggcctgatgagccgggtggcccagcctgccagcaagaagatcgatcagaacaagctgaaacctgagatggacgagaagggcaacctgaccaccgccggctttgcctgctctcagtgtggccagcccctgttcgtgtacaagctggagcaggtgtctgagaagggcaaggcttacaccaactacttcggacggtgcaatgtggccgagcacgaaaagctgatcctgctggcccagctgaagcccgagaaggatagcgacgaagccgtgacatatagcctgggaaagtttgggcagagggccctggatttctacagcattcatgtgaccaaggagtccacccaccccgtgaagcccctggcccagatcgccggaaacagatacgcctccggacctgtgggaaaggccctgagcgacgcatgtatgggcacaatcgcctccttcctgtctaagtaccaggacatcatcatcgaacaccagaaggtggtgaagggcaaccagaagagactggagagcctgcgggagctggccggcaaggaaaacctggaataccctagcgtgaccctgccacctcagcctcacaccaaggagggcgttgatgcctacaacgaagtgatcgcccgggtgcgaatgtgggtgaacctgaacctgtggcagaagctgaagctaagcagagatgatgccaagcctctgctgagactgaagggattcccttcctttcctctggtcgagagacaggccaacgaagtggactggtgggacatggtgtgtaacgtgaagaagctgatcaacgagaaaaaggaggatggcaaggtgttttggcagaatctggctggctacaagagacaggaagccctgagaccatacctgagcagcgaggaagatcggaagaagggaaagaaattcgctcggtaccagctgggcgacctgctgctgcacctggaaaagaagcacggcgaggactggggaaaggtgtacgacgaggcctgggagcggattgacaagaaagtggaaggcctgagcaagcacatcaagctggaagaggaacggagaagcgaggacgcccagagcaaggccgccctgaccgactggctgcgggctaaggccagcttcgtgatcgagggcctgaaggaggccgacaaggacgagttctgcagatgcgagctgaagctgcagaagtggtacggggacctgcggggaaagcccttcgccatcgaagccgagaacagcatcctggacatcagcggcttcagcaagcagtacaactgtgccttcatctggcagaaggacggcgtgaagaagctgaacctgtacctgatcatcaactacttcaagggcggcaagctgcggttcaagaagatcaaacctgaagccttcgaagccaacagattctacaccgtgatcaacaaaaagagcggcgagatcgtgcccatggaggtgaacttcaacttcgacgaccccaacctgatcatcctgcctctggcctttggcaagagacagggcagagaattcatctggaacgacctgctgtccctggaaaccggcagcctgaagctggccaacggaagagtgatcgagaagacactgtacaacagaagaacccggcaggatgagcctgccctgttcgtggccctgaccttcgagcggcgggaggtcctggactcctccaatatcaaaccaatgaacctgatcggcgtggcaagaggcgaaaacatccccgccgtgatcgccctgaccgaccccgagggctgcccactgagccggtttaaggatagcctgggaaacccaacccacatcctgagaatcggcgagagctataaggagaagcagcggaccatccaggccaagaaggaggtggagcagcggagagccggcggctacagccggaagtacgccagcaaagccaagaatctggcagacgatatggtgagaaacaccgctagagatctgctgtactacgccgtgacccaggatgccatgctgatcttcgccaacctgagccggggcttcggccggcagggcaagcggaccttcatggccgagagacagtacacacggatggaggactggctgaccgccaagctggcctacgagggcctgagcaagacctacctgtccaagacactggcccagtacacctccaagacatgcagcaactgtgggtttaccatcaccagcgccgactacgacagggtgctggagaagctgaagaagacagcaacaggctggatgaccacaattaacggcaaggagctgaaggtggagggccagattacctactacaacagatacaagagacagaacgtagtcaaggacctgtccgtcgagctggatagactgagcgaagaatctgtgaacaacgacatctcctcctggacaaagggcagaagcggagaagctctgagcctcctgaagaaaagattctcccatagacccgtgcaggagaagttcgtgtgcctgaactgcggcttcgagacacacgcagccgagcaagccgccctgaacatcgccagatcctggctgttcctgcggagccaggagtacaagaaataccagacaaacaagacaaccggcaacaccgataagagagccttcgtcgagacctggcagtccttttaccggaagaagcttaaggaggtgtggaaacctgccgtgcggtctggcggatctggcggaggctcctagccaggagcccgtgaccttcgccgacgtggccgtggtgttcacccccgaggagtgggtgttcctggacagcacccagaggagcctgtacagggacgtgatgctggagaactacaggaacctggccagcgtggccgaccagctgtgcaagcccaacgccagcagctacctggagcagaggggcgagcagtggaccaccgacaggggcatcctggccgacacctgcgccgagccccagctgcagggatctggctccggcagcggccccaagaaaaagagaaaagtctaagctgccttctgcggggcttgccttctggccatgcccttcttctctcccttgcacctgtacctcttggtctttgaataaagcctgagtaggaaggctagcaaaaaaaaaaaaaaaaaaaaaaaaaaaaaaaaaaaaaaaaaaaaaaaaaaaaaaaaaaaaaaaaaaaaaaaaaaaaaaaa

SEQ ID NO: 16449 - RNA, 9485 nt, synthetic construct
  source 1..9485: mol_type = other RNA
aggaaataagagagaaaagaagagtaagaagaaatataagagccaccatggcccctaagaagaagcgtaaagtgagccggatggaacgcctcgtctacgaggtgcggcagaagtgcagaaacatcgaggacatctgcatctcctgcggatctctgaacgtgaccctggagcacccactgttcatcggcggcatgtgccagaactgtaaaaactgttttctggagtgtgcctatcaatacgacgatgacggctaccagagctactgcaccatctgttgcggcggaagagaggtgctgatgtgtggaaataacaactgctgccggtgcttctgcgtggaatgcgtggacctgctggtgggccccggcgccgcccaggccgctattaaggaagatccttggaactgctacatgtgcggccacaagggcacatacggcctgctgagacggagagaggactggcctagcagactgcagatgttcttcgccaataaccacgaccaggagttcgacccccctaaggtgtaccctcccgtccccgccgagaagagaaagcccatccgggtcctgagcctgttcgatggcatcgccaccggtctgctggtgctgaaggacctgggcatccaggtggataggtacattgcctccgaggtgtgcgaggactccatcaccgtgggaatggtgcgtcatcagggcaagatcatgtacgtgggcgacgtgcggagcgtgacacagaagcatatccaggagtggggccctttcgacctggtgatcggcggcagcccttgcaatgacctgagcatcgtgaacccagcccggaagggcctgtacgagggaaccggcagactgttcttcgagttttacagactgctgcacgacgcccggcctaaggaaggcgacgaccggcccttcttttggctgttcgagaatgtggtggccatgggagtcagcgacaagcgggatattagccggttcctggagagcaaccccgtgatgatcgatgccaaggaagtgagcgccgcccaccgggccagatacttctggggcaatctgcctggcatgaacagacccctggccagcaccgtgaacgacaagctggagctgcaggagtgcctggagcacggccggatcgccaagttcagcaaggtgagaaccatcaccacccgaagcaacagcatcaaacaaggcaaggaccagcactttcctgtgttcatgaacgagaaggaggacatcctgtggtgtaccgagatggagagagtgttcgggttcccagtccactacacagatgtcagcaacatgtctagactggccagacagagactgctgggaagaagctggtccgtccctgtgatcagacacctgttcgcccctctgaaggagtacttcgcctgcgtgagcagcggcaacagcaacgccaacagccggggccccagcttctctagcggcctggtgccactgtccctgagagggagccacatgggccccatggagatctacaaaaccgtgagcgcctggaagcggcagcctgtgcgcgtgctgagcctgtttcggaatatcgataaagtcctgaaaagcctgggattcctggagagcggctctggctccggcggtggcaccctgaagtacgtggaggatgtgacaaacgtggtcagacgggatgtggagaagtggggccccttcgatctggtgtacggcagcacccaacccctgggcagctcttgtgaccggtgccctggctggtacatgtttcagttccaccggatcctgcagtacgccctgccgagacaggagtcccagcggccattcttttggattttcatggacaacttgctgctgaccgaggatgaccaggaaactaccactcggttcctgcagaccgaagccgtgaccctgcaggacgtgagaggccgggactaccagaacgccatgcgggtgtggtccaacatccctggactgaaaagcaagcacgcacctctgacccctaaagaagaggagtacctgcaggcccaggtgcggagcagaagcaagctggacgcccctaaggtggatctgctggtgaagaattgcctcctgcccctgagagagtacttcaagtatttcagccagaatagtctgcccctgggaggcagcggcggcggcgccctggtgacatttgaggacgtcgccgtgcggttcacccaggaggaatgggctctgctggatccttctcagaaaatcctgtaccgggacgtgatgagagagacataccggaatctgacctccgtgggcatcaactgggaatgttgggaccttgaagcctgcttcagaagcctgggaagaaacctgagagtgcaggtggtgaagagaaagtgcgagctgaccaacagcggcccctgcgccgagggcggcccaagcagcggcgcccctcctcccagcggcggcagcccagccggctccccaacctctaccgaggagggcacctctgagtccgccacccccgagagcggccctggcacctccaccgagcccagcgagggcagcgcacccggcagccctgccggcagccccacctccacagaggagggaaccagcaccgagcccagcgaaggcagcgccccaggcaccagcaccgagcctagtgagcaggagattaaacggatcaacaagatcagaagaagacttgtgaaagacagcaacaccaagaaggccggcaagacaggccccatgaaaaccctgctggttagagtgatgacacccgatctgagagagcggctggaaaacctgagaaagaagcctgaaaatatcccccagcccatcagcaatacatctagagccaacctgaataagctgctgaccgattacaccgaaatgaagaaggcgatcctgcatgtgtactgggaagagttccagaaggaccctgtgggcctgatgagccgggtggcccagcctgccagcaagaagatcgatcagaacaagctgaaacctgagatggacgagaagggcaacctgaccaccgccggctttgcctgctctcagtgtggccagcccctgttcgtgtacaagctggagcaggtgtctgagaagggcaaggcttacaccaactacttcggacggtgcaatgtggccgagcacgaaaagctgatcctgctggcccagctgaagcccgagaaggatagcgacgaagccgtgacatatagcctgggaaagtttgggcagagggccctggatttctacagcattcatgtgaccaaggagtccacccaccccgtgaagcccctggcccagatcgccggaaacagatacgcctccggacctgtgggaaaggccctgagcgacgcatgtatgggcacaatcgcctccttcctgtctaagtaccaggacatcatcatcgaacaccagaaggtggtgaagggcaaccagaagagactggagagcctgcgggagctggccggcaaggaaaacctggaataccctagcgtgaccctgccacctcagcctcacaccaaggagggcgttgatgcctacaacgaagtgatcgcccgggtgcgaatgtgggtgaacctgaacctgtggcagaagctgaagctaagcagagatgatgccaagcctctgctgagactgaagggattcccttcctttcctctggtcgagagacaggccaacgaagtggactggtgggacatggtgtgtaacgtgaagaagctgatcaacgagaaaaaggaggatggcaaggtgttttggcagaatctggctggctacaagagacaggaagccctgagaccatacctgagcagcgaggaagatcggaagaagggaaagaaattcgctcggtaccagctgggcgacctgctgctgcacctggaaaagaagcacggcgaggactggggaaaggtgtacgacgaggcctgggagcggattgacaagaaagtggaaggcctgagcaagcacatcaagctggaagaggaacggagaagcgaggacgcccagagcaaggccgccctgaccgactggctgcgggctaaggccagcttcgtgatcgagggcctgaaggaggccgacaaggacgagttctgcagatgcgagctgaagctgcagaagtggtacggggacctgcggggaaagcccttcgccatcgaagccgagaacagcatcctggacatcagcggcttcagcaagcagtacaactgtgccttcatctggcagaaggacggcgtgaagaagctgaacctgtacctgatcatcaactacttcaagggcggcaagctgcggttcaagaagatcaaacctgaagccttcgaagccaacagattctacaccgtgatcaacaaaaagagcggcgagatcgtgcccatggaggtgaacttcaacttcgacgaccccaacctgatcatcctgcctctggcctttggcaagagacagggcagagaattcatctggaacgacctgctgtccctggaaaccggcagcctgaagctggccaacggaagagtgatcgagaagacactgtacaacagaagaacccggcaggatgagcctgccctgttcgtggccctgaccttcgagcggcgggaggtcctggactcctccaatatcaaaccaatgaacctgatcggcgtggcaagaggcgaaaacatccccgccgtgatcgccctgaccgaccccgagggctgcccactgagccggtttaaggatagcctgggaaacccaacccacatcctgagaatcggcgagagctataaggagaagcagcggaccatccaggccaagaaggaggtggagcagcggagagccggcggctacagccggaagtacgccagcaaagccaagaatctggcagacgatatggtgagaaacaccgctagagatctgctgtactacgccgtgacccaggatgccatgctgatcttcgccaacctgagccggggcttcggccggcagggcaagcggaccttcatggccgagagacagtacacacggatggaggactggctgaccgccaagctggcctacgagggcctgagcaagacctacctgtccaagacactggcccagtacacctccaagacatgcagcaactgtgggtttaccatcaccagcgccgactacgacagggtgctggagaagctgaagaagacagcaacaggctggatgaccacaattaacggcaaggagctgaaggtggagggccagattacctactacaacagatacaagagacagaacgtagtcaaggacctgtccgtcgagctggatagactgagcgaagaatctgtgaacaacgacatctcctcctggacaaagggcagaagcggagaagctctgagcctcctgaagaaaagattctcccatagacccgtgcaggagaagttcgtgtgcctgaactgcggcttcgagacacacgcagccgagcaagccgccctgaacatcgccagatcctggctgttcctgcggagccaggagtacaagaaataccagacaaacaagacaaccggcaacaccgataagagagccttcgtcgagacctggcagtccttttaccggaagaagcttaaggaggtgtggaaacctgccgtgcggtctggcggatctggcggaggctccgacgtggtgacctacgaggacgtgcacgtgaacttcacccaggaggagtgggccctgctggaccccagccagaagaggctgtacaaggtggtgatgctggagacctacaagaacctgagcgccatcggctacatctgggaggaccacaccatcgagcagcacttccagagcagcaggagccacggcaggcacaagaggcacaggaccggcgagcagcccagcgagctgatccagcacggcaagggcggcccaagcagcggcgcccctcctcccagcggcggcagcccagccggctccccaacctctaccgaggagggcacctctgagtccgccacccccgagagcggccctggcacctccaccgagcccagcgagggcagcgcacccggcagccctgccggcagccccacctccacagaggagggaaccagcaccgagcccagcgaaggcagcgccccaggcaccagcaccgagcctagtgagcaggagattaaacggatcaacaagatcagaagaagacttgtgaaagacagcaacaccaagaaggccggcaagacaggccccatgaaaaccctgctggttagagtgatgacacccgatctgagagagcggctggaaaacctgagaaagaagcctgaaaatatcccccagcccatcagcaatacatctagagccaacctgaataagctgctgaccgattacaccgaaatgaagaaggcgatcctgcatgtgtactgggaagagttccagaaggaccctgtgggcctgatgagccgggtggcccagcctgccagcaagaagatcgatcagaacaagctgaaacctgagatggacgagaagggcaacctgaccaccgccggctttgcctgctctcagtgtggccagcccctgttcgtgtacaagctggagcaggtgtctgagaagggcaaggcttacaccaactacttcggacggtgcaatgtggccgagcacgaaaagctgatcctgctggcccagctgaagcccgagaaggatagcgacgaagccgtgacatatagcctgggaaagtttgggcagagggccctggatttctacagcattcatgtgaccaaggagtccacccaccccgtgaagcccctggcccagatcgccggaaacagatacgcctccggacctgtgggaaaggccctgagcgacgcatgtatgggcacaatcgcctccttcctgtctaagtaccaggacatcatcatcgaacaccagaaggtggtgaagggcaaccagaagagactggagagcctgcgggagctggccggcaaggaaaacctggaataccctagcgtgaccctgccacctcagcctcacaccaaggagggcgttgatgcctacaacgaagtgatcgcccgggtgcgaatgtgggtgaacctgaacctgtggcagaagctgaagctaagcagagatgatgccaagcctctgctgagactgaagggattcccttcctttcctctggtcgagagacaggccaacgaagtggactggtgggacatggtgtgtaacgtgaagaagctgatcaacgagaaaaaggaggatggcaaggtgttttggcagaatctggctggctacaagagacaggaagccctgagaccatacctgagcagcgaggaagatcggaagaagggaaagaaattcgctcggtaccagctgggcgacctgctgctgcacctggaaaagaagcacggcgaggactggggaaaggtgtacgacgaggcctgggagcggattgacaagaaagtggaaggcctgagcaagcacatcaagctggaagaggaacggagaagcgaggacgcccagagcaaggccgccctgaccgactggctgcgggctaaggccagcttcgtgatcgagggcctgaaggaggccgacaaggacgagttctgcagatgcgagctgaagctgcagaagtggtacggggacctgcggggaaagcccttcgccatcgaagccgagaacagcatcctggacatcagcggcttcagcaagcagtacaactgtgccttcatctggcagaaggacggcgtgaagaagctgaacctgtacctgatcatcaactacttcaagggcggcaagctgcggttcaagaagatcaaacctgaagccttcgaagccaacagattctacaccgtgatcaacaaaaagagcggcgagatcgtgcccatggaggtgaacttcaacttcgacgaccccaacctgatcatcctgcctctggcctttggcaagagacagggcagagaattcatctggaacgacctgctgtccctggaaaccggcagcctgaagctggccaacggaagagtgatcgagaagacactgtacaacagaagaacccggcaggatgagcctgccctgttcgtggccctgaccttcgagcggcgggaggtcctggactcctccaatatcaaaccaatgaacctgatcggcgtggcaagaggcgaaaacatccccgccgtgatcgccctgaccgaccccgagggctgcccactgagccggtttaaggatagcctgggaaacccaacccacatcctgagaatcggcgagagctataaggagaagcagcggaccatccaggccaagaaggaggtggagcagcggagagccggcggctacagccggaagtacgccagcaaagccaagaatctggcagacgatatggtgagaaacaccgctagagatctgctgtactacgccgtgacccaggatgccatgctgatcttcgccaacctgagccggggcttcggccggcagggcaagcggaccttcatggccgagagacagtacacacggatggaggactggctgaccgccaagctggcctacgagggcctgagcaagacctacctgtccaagacactggcccagtacacctccaagacatgcagcaactgtgggtttaccatcaccagcgccgactacgacagggtgctggagaagctgaagaagacagcaacaggctggatgaccacaattaacggcaaggagctgaaggtggagggccagattacctactacaacagatacaagagacagaacgtagtcaaggacctgtccgtcgagctggatagactgagcgaagaatctgtgaacaacgacatctcctcctggacaaagggcagaagcggagaagctctgagcctcctgaagaaaagattctcccatagacccgtgcaggagaagttcgtgtgcctgaactgcggcttcgagacacacgcagccgagcaagccgccctgaacatcgccagatcctggctgttcctgcggagccaggagtacaagaaataccagacaaacaagacaaccggcaacaccgataagagagccttcgtcgagacctggcagtccttttaccggaagaagcttaaggaggtgtggaaacctgccgtgcggtctggcggatctggcggaggctcctgacgtggtgacctacgaggacgtgcacgtgaacttcacccaggaggagtgggccctgctggaccccagccagaagaggctgtacaaggtggtgatgctggagacctacaagaacctgagcgccatcggctacatctgggaggaccacaccatcgagcagcacttccagagcagcaggagccacggcaggcacaagaggcacaggaccggcgagcagcccagcgagctgatccagcacggcaagggatctggctccggcagcggccccaagaaaaagagaaaagtctaagctgccttctgcggggcttgccttctggccatgcccttcttctctcccttgcacctgtacctcttggtctttgaataaagcctgagtaggaaggctagcaaaaaaaaaaaaaaaaaaaaaaaaaaaaaaaaaaaaaaaaaaaaaaaaaaaaaaaaaaaaaaaaaaaaaaaaaaaaaaaa

SEQ ID NO: 16450 - RNA, 9485 nt, synthetic construct
  source 1..9485: mol_type = other RNA
aggaaataagagagaaaagaagagtaagaagaaatataagagccaccatggcccctaagaagaagcgtaaagtgagccggatggaacgcctcgtctacgaggtgcggcagaagtgcagaaacatcgaggacatctgcatctcctgcggatctctgaacgtgaccctggagcacccactgttcatcggcggcatgtgccagaactgtaaaaactgttttctggagtgtgcctatcaatacgacgatgacggctaccagagctactgcaccatctgttgcggcggaagagaggtgctgatgtgtggaaataacaactgctgccggtgcttctgcgtggaatgcgtggacctgctggtgggccccggcgccgcccaggccgctattaaggaagatccttggaactgctacatgtgcggccacaagggcacatacggcctgctgagacggagagaggactggcctagcagactgcagatgttcttcgccaataaccacgaccaggagttcgacccccctaaggtgtaccctcccgtccccgccgagaagagaaagcccatccgggtcctgagcctgttcgatggcatcgccaccggtctgctggtgctgaaggacctgggcatccaggtggataggtacattgcctccgaggtgtgcgaggactccatcaccgtgggaatggtgcgtcatcagggcaagatcatgtacgtgggcgacgtgcggagcgtgacacagaagcatatccaggagtggggccctttcgacctggtgatcggcggcagcccttgcaatgacctgagcatcgtgaacccagcccggaagggcctgtacgagggaaccggcagactgttcttcgagttttacagactgctgcacgacgcccggcctaaggaaggcgacgaccggcccttcttttggctgttcgagaatgtggtggccatgggagtcagcgacaagcgggatattagccggttcctggagagcaaccccgtgatgatcgatgccaaggaagtgagcgccgcccaccgggccagatacttctggggcaatctgcctggcatgaacagacccctggccagcaccgtgaacgacaagctggagctgcaggagtgcctggagcacggccggatcgccaagttcagcaaggtgagaaccatcaccacccgaagcaacagcatcaaacaaggcaaggaccagcactttcctgtgttcatgaacgagaaggaggacatcctgtggtgtaccgagatggagagagtgttcgggttcccagtccactacacagatgtcagcaacatgtctagactggccagacagagactgctgggaagaagctggtccgtccctgtgatcagacacctgttcgcccctctgaaggagtacttcgcctgcgtgagcagcggcaacagcaacgccaacagccggggccccagcttctctagcggcctggtgccactgtccctgagagggagccacatgggccccatggagatctacaaaaccgtgagcgcctggaagcggcagcctgtgcgcgtgctgagcctgtttcggaatatcgataaagtcctgaaaagcctgggattcctggagagcggctctggctccggcggtggcaccctgaagtacgtggaggatgtgacaaacgtggtcagacgggatgtggagaagtggggccccttcgatctggtgtacggcagcacccaacccctgggcagctcttgtgaccggtgccctggctggtacatgtttcagttccaccggatcctgcagtacgccctgccgagacaggagtcccagcggccattcttttggattttcatggacaacttgctgctgaccgaggatgaccaggaaactaccactcggttcctgcagaccgaagccgtgaccctgcaggacgtgagaggccgggactaccagaacgccatgcgggtgtggtccaacatccctggactgaaaagcaagcacgcacctctgacccctaaagaagaggagtacctgcaggcccaggtgcggagcagaagcaagctggacgcccctaaggtggatctgctggtgaagaattgcctcctgcccctgagagagtacttcaagtatttcagccagaatagtctgcccctgggaggcagcggcggcggcgccctggtgacatttgaggacgtcgccgtgcggttcacccaggaggaatgggctctgctggatccttctcagaaaatcctgtaccgggacgtgatgagagagacataccggaatctgacctccgtgggcatcaactgggaatgttgggaccttgaagcctgcttcagaagcctgggaagaaacctgagagtgcaggtggtgaagagaaagtgcgagctgaccaacagcggcccctgcgccgagggcggcccaagcagcggcgcccctcctcccagcggcggcagcccagccggctccccaacctctaccgaggagggcacctctgagtccgccacccccgagagcggccctggcacctccaccgagcccagcgagggcagcgcacccggcagccctgccggcagccccacctccacagaggagggaaccagcaccgagcccagcgaaggcagcgccccaggcaccagcaccgagcctagtgagcaggagattaaacggatcaacaagatcagaagaagacttgtgaaagacagcaacaccaagaaggccggcaagacaggccccatgaaaaccctgctggttagagtgatgacacccgatctgagagagcggctggaaaacctgagaaagaagcctgaaaatatcccccagcccatcagcaatacatctagagccaacctgaataagctgctgaccgattacaccgaaatgaagaaggcgatcctgcatgtgtactgggaagagttccagaaggaccctgtgggcctgatgagccgggtggcccagcctgccagcaagaagatcgatcagaacaagctgaaacctgagatggacgagaagggcaacctgaccaccgccggctttgcctgctctcagtgtggccagcccctgttcgtgtacaagctggagcaggtgtctgagaagggcaaggcttacaccaactacttcggacggtgcaatgtggccgagcacgaaaagctgatcctgctggcccagctgaagcccgagaaggatagcgacgaagccgtgacatatagcctgggaaagtttgggcagagggccctggatttctacagcattcatgtgaccaaggagtccacccaccccgtgaagcccctggcccagatcgccggaaacagatacgcctccggacctgtgggaaaggccctgagcgacgcatgtatgggcacaatcgcctccttcctgtctaagtaccaggacatcatcatcgaacaccagaaggtggtgaagggcaaccagaagagactggagagcctgcgggagctggccggcaaggaaaacctggaataccctagcgtgaccctgccacctcagcctcacaccaaggagggcgttgatgcctacaacgaagtgatcgcccgggtgcgaatgtgggtgaacctgaacctgtggcagaagctgaagctaagcagagatgatgccaagcctctgctgagactgaagggattcccttcctttcctctggtcgagagacaggccaacgaagtggactggtgggacatggtgtgtaacgtgaagaagctgatcaacgagaaaaaggaggatggcaaggtgttttggcagaatctggctggctacaagagacaggaagccctgagaccatacctgagcagcgaggaagatcggaagaagggaaagaaattcgctcggtaccagctgggcgacctgctgctgcacctggaaaagaagcacggcgaggactggggaaaggtgtacgacgaggcctgggagcggattgacaagaaagtggaaggcctgagcaagcacatcaagctggaagaggaacggagaagcgaggacgcccagagcaaggccgccctgaccgactggctgcgggctaaggccagcttcgtgatcgagggcctgaaggaggccgacaaggacgagttctgcagatgcgagctgaagctgcagaagtggtacggggacctgcggggaaagcccttcgccatcgaagccgagaacagcatcctggacatcagcggcttcagcaagcagtacaactgtgccttcatctggcagaaggacggcgtgaagaagctgaacctgtacctgatcatcaactacttcaagggcggcaagctgcggttcaagaagatcaaacctgaagccttcgaagccaacagattctacaccgtgatcaacaaaaagagcggcgagatcgtgcccatggaggtgaacttcaacttcgacgaccccaacctgatcatcctgcctctggcctttggcaagagacagggcagagaattcatctggaacgacctgctgtccctggaaaccggcagcctgaagctggccaacggaagagtgatcgagaagacactgtacaacagaagaacccggcaggatgagcctgccctgttcgtggccctgaccttcgagcggcgggaggtcctggactcctccaatatcaaaccaatgaacctgatcggcgtggcaagaggcgaaaacatccccgccgtgatcgccctgaccgaccccgagggctgcccactgagccggtttaaggatagcctgggaaacccaacccacatcctgagaatcggcgagagctataaggagaagcagcggaccatccaggccaagaaggaggtggagcagcggagagccggcggctacagccggaagtacgccagcaaagccaagaatctggcagacgatatggtgagaaacaccgctagagatctgctgtactacgccgtgacccaggatgccatgctgatcttcgccaacctgagccggggcttcggccggcagggcaagcggaccttcatggccgagagacagtacacacggatggaggactggctgaccgccaagctggcctacgagggcctgagcaagacctacctgtccaagacactggcccagtacacctccaagacatgcagcaactgtgggtttaccatcaccagcgccgactacgacagggtgctggagaagctgaagaagacagcaacaggctggatgaccacaattaacggcaaggagctgaaggtggagggccagattacctactacaacagatacaagagacagaacgtagtcaaggacctgtccgtcgagctggatagactgagcgaagaatctgtgaacaacgacatctcctcctggacaaagggcagaagcggagaagctctgagcctcctgaagaaaagattctcccatagacccgtgcaggagaagttcgtgtgcctgaactgcggcttcgagacacacgcagccgagcaagccgccctgaacatcgccagatcctggctgttcctgcggagccaggagtacaagaaataccagacaaacaagacaaccggcaacaccgataagagagccttcgtcgagacctggcagtccttttaccggaagaagcttaaggaggtgtggaaacctgccgtgcggtctggcggatctggcggaggctccatggacgccgtgacctacgaggacgtgcacgtgaacttcagcagggaggagtgggtgctgctggaccccagccagaagagcctgtacaaggacgtgatgctggagacctactggaacctgacctgcatcggctacaagtggaaggaccacgacaacgaggagtactgccagaacagcggcaggcacggcaggtgcatcaactgccccagcgcctacggcaagaagcagtgcaccaacctgttcggcggcccaagcagcggcgcccctcctcccagcggcggcagcccagccggctccccaacctctaccgaggagggcacctctgagtccgccacccccgagagcggccctggcacctccaccgagcccagcgagggcagcgcacccggcagccctgccggcagccccacctccacagaggagggaaccagcaccgagcccagcgaaggcagcgccccaggcaccagcaccgagcctagtgagcaggagattaaacggatcaacaagatcagaagaagacttgtgaaagacagcaacaccaagaaggccggcaagacaggccccatgaaaaccctgctggttagagtgatgacacccgatctgagagagcggctggaaaacctgagaaagaagcctgaaaatatcccccagcccatcagcaatacatctagagccaacctgaataagctgctgaccgattacaccgaaatgaagaaggcgatcctgcatgtgtactgggaagagttccagaaggaccctgtgggcctgatgagccgggtggcccagcctgccagcaagaagatcgatcagaacaagctgaaacctgagatggacgagaagggcaacctgaccaccgccggctttgcctgctctcagtgtggccagcccctgttcgtgtacaagctggagcaggtgtctgagaagggcaaggcttacaccaactacttcggacggtgcaatgtggccgagcacgaaaagctgatcctgctggcccagctgaagcccgagaaggatagcgacgaagccgtgacatatagcctgggaaagtttgggcagagggccctggatttctacagcattcatgtgaccaaggagtccacccaccccgtgaagcccctggcccagatcgccggaaacagatacgcctccggacctgtgggaaaggccctgagcgacgcatgtatgggcacaatcgcctccttcctgtctaagtaccaggacatcatcatcgaacaccagaaggtggtgaagggcaaccagaagagactggagagcctgcgggagctggccggcaaggaaaacctggaataccctagcgtgaccctgccacctcagcctcacaccaaggagggcgttgatgcctacaacgaagtgatcgcccgggtgcgaatgtgggtgaacctgaacctgtggcagaagctgaagctaagcagagatgatgccaagcctctgctgagactgaagggattcccttcctttcctctggtcgagagacaggccaacgaagtggactggtgggacatggtgtgtaacgtgaagaagctgatcaacgagaaaaaggaggatggcaaggtgttttggcagaatctggctggctacaagagacaggaagccctgagaccatacctgagcagcgaggaagatcggaagaagggaaagaaattcgctcggtaccagctgggcgacctgctgctgcacctggaaaagaagcacggcgaggactggggaaaggtgtacgacgaggcctgggagcggattgacaagaaagtggaaggcctgagcaagcacatcaagctggaagaggaacggagaagcgaggacgcccagagcaaggccgccctgaccgactggctgcgggctaaggccagcttcgtgatcgagggcctgaaggaggccgacaaggacgagttctgcagatgcgagctgaagctgcagaagtggtacggggacctgcggggaaagcccttcgccatcgaagccgagaacagcatcctggacatcagcggcttcagcaagcagtacaactgtgccttcatctggcagaaggacggcgtgaagaagctgaacctgtacctgatcatcaactacttcaagggcggcaagctgcggttcaagaagatcaaacctgaagccttcgaagccaacagattctacaccgtgatcaacaaaaagagcggcgagatcgtgcccatggaggtgaacttcaacttcgacgaccccaacctgatcatcctgcctctggcctttggcaagagacagggcagagaattcatctggaacgacctgctgtccctggaaaccggcagcctgaagctggccaacggaagagtgatcgagaagacactgtacaacagaagaacccggcaggatgagcctgccctgttcgtggccctgaccttcgagcggcgggaggtcctggactcctccaatatcaaaccaatgaacctgatcggcgtggcaagaggcgaaaacatccccgccgtgatcgccctgaccgaccccgagggctgcccactgagccggtttaaggatagcctgggaaacccaacccacatcctgagaatcggcgagagctataaggagaagcagcggaccatccaggccaagaaggaggtggagcagcggagagccggcggctacagccggaagtacgccagcaaagccaagaatctggcagacgatatggtgagaaacaccgctagagatctgctgtactacgccgtgacccaggatgccatgctgatcttcgccaacctgagccggggcttcggccggcagggcaagcggaccttcatggccgagagacagtacacacggatggaggactggctgaccgccaagctggcctacgagggcctgagcaagacctacctgtccaagacactggcccagtacacctccaagacatgcagcaactgtgggtttaccatcaccagcgccgactacgacagggtgctggagaagctgaagaagacagcaacaggctggatgaccacaattaacggcaaggagctgaaggtggagggccagattacctactacaacagatacaagagacagaacgtagtcaaggacctgtccgtcgagctggatagactgagcgaagaatctgtgaacaacgacatctcctcctggacaaagggcagaagcggagaagctctgagcctcctgaagaaaagattctcccatagacccgtgcaggagaagttcgtgtgcctgaactgcggcttcgagacacacgcagccgagcaagccgccctgaacatcgccagatcctggctgttcctgcggagccaggagtacaagaaataccagacaaacaagacaaccggcaacaccgataagagagccttcgtcgagacctggcagtccttttaccggaagaagcttaaggaggtgtggaaacctgccgtgcggtctggcggatctggcggaggctcctatggacgccgtgacctacgaggacgtgcacgtgaacttcagcagggaggagtgggtgctgctggaccccagccagaagagcctgtacaaggacgtgatgctggagacctactggaacctgacctgcatcggctacaagtggaaggaccacgacaacgaggagtactgccagaacagcggcaggcacggcaggtgcatcaactgccccagcgcctacggcaagaagcagtgcaccaacctgttcggatctggctccggcagcggccccaagaaaaagagaaaagtctaagctgccttctgcggggcttgccttctggccatgcccttcttctctcccttgcacctgtacctcttggtctttgaataaagcctgagtaggaaggctagcaaaaaaaaaaaaaaaaaaaaaaaaaaaaaaaaaaaaaaaaaaaaaaaaaaaaaaaaaaaaaaaaaaaaaaaaaaaaaaaa

SEQ ID NO: 16451 - RNA, 9485 nt, synthetic construct
  source 1..9485: mol_type = other RNA
aggaaataagagagaaaagaagagtaagaagaaatataagagccaccatggcccctaagaagaagcgtaaagtgagccggatggaacgcctcgtctacgaggtgcggcagaagtgcagaaacatcgaggacatctgcatctcctgcggatctctgaacgtgaccctggagcacccactgttcatcggcggcatgtgccagaactgtaaaaactgttttctggagtgtgcctatcaatacgacgatgacggctaccagagctactgcaccatctgttgcggcggaagagaggtgctgatgtgtggaaataacaactgctgccggtgcttctgcgtggaatgcgtggacctgctggtgggccccggcgccgcccaggccgctattaaggaagatccttggaactgctacatgtgcggccacaagggcacatacggcctgctgagacggagagaggactggcctagcagactgcagatgttcttcgccaataaccacgaccaggagttcgacccccctaaggtgtaccctcccgtccccgccgagaagagaaagcccatccgggtcctgagcctgttcgatggcatcgccaccggtctgctggtgctgaaggacctgggcatccaggtggataggtacattgcctccgaggtgtgcgaggactccatcaccgtgggaatggtgcgtcatcagggcaagatcatgtacgtgggcgacgtgcggagcgtgacacagaagcatatccaggagtggggccctttcgacctggtgatcggcggcagcccttgcaatgacctgagcatcgtgaacccagcccggaagggcctgtacgagggaaccggcagactgttcttcgagttttacagactgctgcacgacgcccggcctaaggaaggcgacgaccggcccttcttttggctgttcgagaatgtggtggccatgggagtcagcgacaagcgggatattagccggttcctggagagcaaccccgtgatgatcgatgccaaggaagtgagcgccgcccaccgggccagatacttctggggcaatctgcctggcatgaacagacccctggccagcaccgtgaacgacaagctggagctgcaggagtgcctggagcacggccggatcgccaagttcagcaaggtgagaaccatcaccacccgaagcaacagcatcaaacaaggcaaggaccagcactttcctgtgttcatgaacgagaaggaggacatcctgtggtgtaccgagatggagagagtgttcgggttcccagtccactacacagatgtcagcaacatgtctagactggccagacagagactgctgggaagaagctggtccgtccctgtgatcagacacctgttcgcccctctgaaggagtacttcgcctgcgtgagcagcggcaacagcaacgccaacagccggggccccagcttctctagcggcctggtgccactgtccctgagagggagccacatgggccccatggagatctacaaaaccgtgagcgcctggaagcggcagcctgtgcgcgtgctgagcctgtttcggaatatcgataaagtcctgaaaagcctgggattcctggagagcggctctggctccggcggtggcaccctgaagtacgtggaggatgtgacaaacgtggtcagacgggatgtggagaagtggggccccttcgatctggtgtacggcagcacccaacccctgggcagctcttgtgaccggtgccctggctggtacatgtttcagttccaccggatcctgcagtacgccctgccgagacaggagtcccagcggccattcttttggattttcatggacaacttgctgctgaccgaggatgaccaggaaactaccactcggttcctgcagaccgaagccgtgaccctgcaggacgtgagaggccgggactaccagaacgccatgcgggtgtggtccaacatccctggactgaaaagcaagcacgcacctctgacccctaaagaagaggagtacctgcaggcccaggtgcggagcagaagcaagctggacgcccctaaggtggatctgctggtgaagaattgcctcctgcccctgagagagtacttcaagtatttcagccagaatagtctgcccctgggaggcagcggcggcggcgccctggtgacatttgaggacgtcgccgtgcggttcacccaggaggaatgggctctgctggatccttctcagaaaatcctgtaccgggacgtgatgagagagacataccggaatctgacctccgtgggcatcaactgggaatgttgggaccttgaagcctgcttcagaagcctgggaagaaacctgagagtgcaggtggtgaagagaaagtgcgagctgaccaacagcggcccctgcgccgagggcggcccaagcagcggcgcccctcctcccagcggcggcagcccagccggctccccaacctctaccgaggagggcacctctgagtccgccacccccgagagcggccctggcacctccaccgagcccagcgagggcagcgcacccggcagccctgccggcagccccacctccacagaggagggaaccagcaccgagcccagcgaaggcagcgccccaggcaccagcaccgagcctagtgagcaggagattaaacggatcaacaagatcagaagaagacttgtgaaagacagcaacaccaagaaggccggcaagacaggccccatgaaaaccctgctggttagagtgatgacacccgatctgagagagcggctggaaaacctgagaaagaagcctgaaaatatcccccagcccatcagcaatacatctagagccaacctgaataagctgctgaccgattacaccgaaatgaagaaggcgatcctgcatgtgtactgggaagagttccagaaggaccctgtgggcctgatgagccgggtggcccagcctgccagcaagaagatcgatcagaacaagctgaaacctgagatggacgagaagggcaacctgaccaccgccggctttgcctgctctcagtgtggccagcccctgttcgtgtacaagctggagcaggtgtctgagaagggcaaggcttacaccaactacttcggacggtgcaatgtggccgagcacgaaaagctgatcctgctggcccagctgaagcccgagaaggatagcgacgaagccgtgacatatagcctgggaaagtttgggcagagggccctggatttctacagcattcatgtgaccaaggagtccacccaccccgtgaagcccctggcccagatcgccggaaacagatacgcctccggacctgtgggaaaggccctgagcgacgcatgtatgggcacaatcgcctccttcctgtctaagtaccaggacatcatcatcgaacaccagaaggtggtgaagggcaaccagaagagactggagagcctgcgggagctggccggcaaggaaaacctggaataccctagcgtgaccctgccacctcagcctcacaccaaggagggcgttgatgcctacaacgaagtgatcgcccgggtgcgaatgtgggtgaacctgaacctgtggcagaagctgaagctaagcagagatgatgccaagcctctgctgagactgaagggattcccttcctttcctctggtcgagagacaggccaacgaagtggactggtgggacatggtgtgtaacgtgaagaagctgatcaacgagaaaaaggaggatggcaaggtgttttggcagaatctggctggctacaagagacaggaagccctgagaccatacctgagcagcgaggaagatcggaagaagggaaagaaattcgctcggtaccagctgggcgacctgctgctgcacctggaaaagaagcacggcgaggactggggaaaggtgtacgacgaggcctgggagcggattgacaagaaagtggaaggcctgagcaagcacatcaagctggaagaggaacggagaagcgaggacgcccagagcaaggccgccctgaccgactggctgcgggctaaggccagcttcgtgatcgagggcctgaaggaggccgacaaggacgagttctgcagatgcgagctgaagctgcagaagtggtacggggacctgcggggaaagcccttcgccatcgaagccgagaacagcatcctggacatcagcggcttcagcaagcagtacaactgtgccttcatctggcagaaggacggcgtgaagaagctgaacctgtacctgatcatcaactacttcaagggcggcaagctgcggttcaagaagatcaaacctgaagccttcgaagccaacagattctacaccgtgatcaacaaaaagagcggcgagatcgtgcccatggaggtgaacttcaacttcgacgaccccaacctgatcatcctgcctctggcctttggcaagagacagggcagagaattcatctggaacgacctgctgtccctggaaaccggcagcctgaagctggccaacggaagagtgatcgagaagacactgtacaacagaagaacccggcaggatgagcctgccctgttcgtggccctgaccttcgagcggcgggaggtcctggactcctccaatatcaaaccaatgaacctgatcggcgtggcaagaggcgaaaacatccccgccgtgatcgccctgaccgaccccgagggctgcccactgagccggtttaaggatagcctgggaaacccaacccacatcctgagaatcggcgagagctataaggagaagcagcggaccatccaggccaagaaggaggtggagcagcggagagccggcggctacagccggaagtacgccagcaaagccaagaatctggcagacgatatggtgagaaacaccgctagagatctgctgtactacgccgtgacccaggatgccatgctgatcttcgccaacctgagccggggcttcggccggcagggcaagcggaccttcatggccgagagacagtacacacggatggaggactggctgaccgccaagctggcctacgagggcctgagcaagacctacctgtccaagacactggcccagtacacctccaagacatgcagcaactgtgggtttaccatcaccagcgccgactacgacagggtgctggagaagctgaagaagacagcaacaggctggatgaccacaattaacggcaaggagctgaaggtggagggccagattacctactacaacagatacaagagacagaacgtagtcaaggacctgtccgtcgagctggatagactgagcgaagaatctgtgaacaacgacatctcctcctggacaaagggcagaagcggagaagctctgagcctcctgaagaaaagattctcccatagacccgtgcaggagaagttcgtgtgcctgaactgcggcttcgagacacacgcagccgagcaagccgccctgaacatcgccagatcctggctgttcctgcggagccaggagtacaagaaataccagacaaacaagacaaccggcaacaccgataagagagccttcgtcgagacctggcagtccttttaccggaagaagcttaaggaggtgtggaaacctgccgtgcggtctggcggatctggcggaggctccggcagccagggcaacctgccccaggccgagatcaccctgatgaaccaggcccaggagagcgtgaccttcgaggacgtggccgtgaacttcaccaacagggagtggcagtgcctgacctacgcccagaggcacctgtacaaggacgtgatgctggagaactacggcaacatggtgagcctgggcttccccttccccaagccccccctgatcagccacctggagagggaggtggacccctgcgtgggcggcccaagcagcggcgcccctcctcccagcggcggcagcccagccggctccccaacctctaccgaggagggcacctctgagtccgccacccccgagagcggccctggcacctccaccgagcccagcgagggcagcgcacccggcagccctgccggcagccccacctccacagaggagggaaccagcaccgagcccagcgaaggcagcgccccaggcaccagcaccgagcctagtgagcaggagattaaacggatcaacaagatcagaagaagacttgtgaaagacagcaacaccaagaaggccggcaagacaggccccatgaaaaccctgctggttagagtgatgacacccgatctgagagagcggctggaaaacctgagaaagaagcctgaaaatatcccccagcccatcagcaatacatctagagccaacctgaataagctgctgaccgattacaccgaaatgaagaaggcgatcctgcatgtgtactgggaagagttccagaaggaccctgtgggcctgatgagccgggtggcccagcctgccagcaagaagatcgatcagaacaagctgaaacctgagatggacgagaagggcaacctgaccaccgccggctttgcctgctctcagtgtggccagcccctgttcgtgtacaagctggagcaggtgtctgagaagggcaaggcttacaccaactacttcggacggtgcaatgtggccgagcacgaaaagctgatcctgctggcccagctgaagcccgagaaggatagcgacgaagccgtgacatatagcctgggaaagtttgggcagagggccctggatttctacagcattcatgtgaccaaggagtccacccaccccgtgaagcccctggcccagatcgccggaaacagatacgcctccggacctgtgggaaaggccctgagcgacgcatgtatgggcacaatcgcctccttcctgtctaagtaccaggacatcatcatcgaacaccagaaggtggtgaagggcaaccagaagagactggagagcctgcgggagctggccggcaaggaaaacctggaataccctagcgtgaccctgccacctcagcctcacaccaaggagggcgttgatgcctacaacgaagtgatcgcccgggtgcgaatgtgggtgaacctgaacctgtggcagaagctgaagctaagcagagatgatgccaagcctctgctgagactgaagggattcccttcctttcctctggtcgagagacaggccaacgaagtggactggtgggacatggtgtgtaacgtgaagaagctgatcaacgagaaaaaggaggatggcaaggtgttttggcagaatctggctggctacaagagacaggaagccctgagaccatacctgagcagcgaggaagatcggaagaagggaaagaaattcgctcggtaccagctgggcgacctgctgctgcacctggaaaagaagcacggcgaggactggggaaaggtgtacgacgaggcctgggagcggattgacaagaaagtggaaggcctgagcaagcacatcaagctggaagaggaacggagaagcgaggacgcccagagcaaggccgccctgaccgactggctgcgggctaaggccagcttcgtgatcgagggcctgaaggaggccgacaaggacgagttctgcagatgcgagctgaagctgcagaagtggtacggggacctgcggggaaagcccttcgccatcgaagccgagaacagcatcctggacatcagcggcttcagcaagcagtacaactgtgccttcatctggcagaaggacggcgtgaagaagctgaacctgtacctgatcatcaactacttcaagggcggcaagctgcggttcaagaagatcaaacctgaagccttcgaagccaacagattctacaccgtgatcaacaaaaagagcggcgagatcgtgcccatggaggtgaacttcaacttcgacgaccccaacctgatcatcctgcctctggcctttggcaagagacagggcagagaattcatctggaacgacctgctgtccctggaaaccggcagcctgaagctggccaacggaagagtgatcgagaagacactgtacaacagaagaacccggcaggatgagcctgccctgttcgtggccctgaccttcgagcggcgggaggtcctggactcctccaatatcaaaccaatgaacctgatcggcgtggcaagaggcgaaaacatccccgccgtgatcgccctgaccgaccccgagggctgcccactgagccggtttaaggatagcctgggaaacccaacccacatcctgagaatcggcgagagctataaggagaagcagcggaccatccaggccaagaaggaggtggagcagcggagagccggcggctacagccggaagtacgccagcaaagccaagaatctggcagacgatatggtgagaaacaccgctagagatctgctgtactacgccgtgacccaggatgccatgctgatcttcgccaacctgagccggggcttcggccggcagggcaagcggaccttcatggccgagagacagtacacacggatggaggactggctgaccgccaagctggcctacgagggcctgagcaagacctacctgtccaagacactggcccagtacacctccaagacatgcagcaactgtgggtttaccatcaccagcgccgactacgacagggtgctggagaagctgaagaagacagcaacaggctggatgaccacaattaacggcaaggagctgaaggtggagggccagattacctactacaacagatacaagagacagaacgtagtcaaggacctgtccgtcgagctggatagactgagcgaagaatctgtgaacaacgacatctcctcctggacaaagggcagaagcggagaagctctgagcctcctgaagaaaagattctcccatagacccgtgcaggagaagttcgtgtgcctgaactgcggcttcgagacacacgcagccgagcaagccgccctgaacatcgccagatcctggctgttcctgcggagccaggagtacaagaaataccagacaaacaagacaaccggcaacaccgataagagagccttcgtcgagacctggcagtccttttaccggaagaagcttaaggaggtgtggaaacctgccgtgcggtctggcggatctggcggaggctcctggcagccagggcaacctgccccaggccgagatcaccctgatgaaccaggcccaggagagcgtgaccttcgaggacgtggccgtgaacttcaccaacagggagtggcagtgcctgacctacgcccagaggcacctgtacaaggacgtgatgctggagaactacggcaacatggtgagcctgggcttccccttccccaagccccccctgatcagccacctggagagggaggtggacccctgcgtgggatctggctccggcagcggccccaagaaaaagagaaaagtctaagctgccttctgcggggcttgccttctggccatgcccttcttctctcccttgcacctgtacctcttggtctttgaataaagcctgagtaggaaggctagcaaaaaaaaaaaaaaaaaaaaaaaaaaaaaaaaaaaaaaaaaaaaaaaaaaaaaaaaaaaaaaaaaaaaaaaaaaaaaaaa

SEQ ID NO: 16452 - RNA, 9485 nt, synthetic construct
  source 1..9485: mol_type = other RNA
aggaaataagagagaaaagaagagtaagaagaaatataagagccaccatggcccctaagaagaagcgtaaagtgagccggatggaacgcctcgtctacgaggtgcggcagaagtgcagaaacatcgaggacatctgcatctcctgcggatctctgaacgtgaccctggagcacccactgttcatcggcggcatgtgccagaactgtaaaaactgttttctggagtgtgcctatcaatacgacgatgacggctaccagagctactgcaccatctgttgcggcggaagagaggtgctgatgtgtggaaataacaactgctgccggtgcttctgcgtggaatgcgtggacctgctggtgggccccggcgccgcccaggccgctattaaggaagatccttggaactgctacatgtgcggccacaagggcacatacggcctgctgagacggagagaggactggcctagcagactgcagatgttcttcgccaataaccacgaccaggagttcgacccccctaaggtgtaccctcccgtccccgccgagaagagaaagcccatccgggtcctgagcctgttcgatggcatcgccaccggtctgctggtgctgaaggacctgggcatccaggtggataggtacattgcctccgaggtgtgcgaggactccatcaccgtgggaatggtgcgtcatcagggcaagatcatgtacgtgggcgacgtgcggagcgtgacacagaagcatatccaggagtggggccctttcgacctggtgatcggcggcagcccttgcaatgacctgagcatcgtgaacccagcccggaagggcctgtacgagggaaccggcagactgttcttcgagttttacagactgctgcacgacgcccggcctaaggaaggcgacgaccggcccttcttttggctgttcgagaatgtggtggccatgggagtcagcgacaagcgggatattagccggttcctggagagcaaccccgtgatgatcgatgccaaggaagtgagcgccgcccaccgggccagatacttctggggcaatctgcctggcatgaacagacccctggccagcaccgtgaacgacaagctggagctgcaggagtgcctggagcacggccggatcgccaagttcagcaaggtgagaaccatcaccacccgaagcaacagcatcaaacaaggcaaggaccagcactttcctgtgttcatgaacgagaaggaggacatcctgtggtgtaccgagatggagagagtgttcgggttcccagtccactacacagatgtcagcaacatgtctagactggccagacagagactgctgggaagaagctggtccgtccctgtgatcagacacctgttcgcccctctgaaggagtacttcgcctgcgtgagcagcggcaacagcaacgccaacagccggggccccagcttctctagcggcctggtgccactgtccctgagagggagccacatgggccccatggagatctacaaaaccgtgagcgcctggaagcggcagcctgtgcgcgtgctgagcctgtttcggaatatcgataaagtcctgaaaagcctgggattcctggagagcggctctggctccggcggtggcaccctgaagtacgtggaggatgtgacaaacgtggtcagacgggatgtggagaagtggggccccttcgatctggtgtacggcagcacccaacccctgggcagctcttgtgaccggtgccctggctggtacatgtttcagttccaccggatcctgcagtacgccctgccgagacaggagtcccagcggccattcttttggattttcatggacaacttgctgctgaccgaggatgaccaggaaactaccactcggttcctgcagaccgaagccgtgaccctgcaggacgtgagaggccgggactaccagaacgccatgcgggtgtggtccaacatccctggactgaaaagcaagcacgcacctctgacccctaaagaagaggagtacctgcaggcccaggtgcggagcagaagcaagctggacgcccctaaggtggatctgctggtgaagaattgcctcctgcccctgagagagtacttcaagtatttcagccagaatagtctgcccctgggaggcagcggcggcggcgccctggtgacatttgaggacgtcgccgtgcggttcacccaggaggaatgggctctgctggatccttctcagaaaatcctgtaccgggacgtgatgagagagacataccggaatctgacctccgtgggcatcaactgggaatgttgggaccttgaagcctgcttcagaagcctgggaagaaacctgagagtgcaggtggtgaagagaaagtgcgagctgaccaacagcggcccctgcgccgagggcggcccaagcagcggcgcccctcctcccagcggcggcagcccagccggctccccaacctctaccgaggagggcacctctgagtccgccacccccgagagcggccctggcacctccaccgagcccagcgagggcagcgcacccggcagccctgccggcagccccacctccacagaggagggaaccagcaccgagcccagcgaaggcagcgccccaggcaccagcaccgagcctagtgagcaggagattaaacggatcaacaagatcagaagaagacttgtgaaagacagcaacaccaagaaggccggcaagacaggccccatgaaaaccctgctggttagagtgatgacacccgatctgagagagcggctggaaaacctgagaaagaagcctgaaaatatcccccagcccatcagcaatacatctagagccaacctgaataagctgctgaccgattacaccgaaatgaagaaggcgatcctgcatgtgtactgggaagagttccagaaggaccctgtgggcctgatgagccgggtggcccagcctgccagcaagaagatcgatcagaacaagctgaaacctgagatggacgagaagggcaacctgaccaccgccggctttgcctgctctcagtgtggccagcccctgttcgtgtacaagctggagcaggtgtctgagaagggcaaggcttacaccaactacttcggacggtgcaatgtggccgagcacgaaaagctgatcctgctggcccagctgaagcccgagaaggatagcgacgaagccgtgacatatagcctgggaaagtttgggcagagggccctggatttctacagcattcatgtgaccaaggagtccacccaccccgtgaagcccctggcccagatcgccggaaacagatacgcctccggacctgtgggaaaggccctgagcgacgcatgtatgggcacaatcgcctccttcctgtctaagtaccaggacatcatcatcgaacaccagaaggtggtgaagggcaaccagaagagactggagagcctgcgggagctggccggcaaggaaaacctggaataccctagcgtgaccctgccacctcagcctcacaccaaggagggcgttgatgcctacaacgaagtgatcgcccgggtgcgaatgtgggtgaacctgaacctgtggcagaagctgaagctaagcagagatgatgccaagcctctgctgagactgaagggattcccttcctttcctctggtcgagagacaggccaacgaagtggactggtgggacatggtgtgtaacgtgaagaagctgatcaacgagaaaaaggaggatggcaaggtgttttggcagaatctggctggctacaagagacaggaagccctgagaccatacctgagcagcgaggaagatcggaagaagggaaagaaattcgctcggtaccagctgggcgacctgctgctgcacctggaaaagaagcacggcgaggactggggaaaggtgtacgacgaggcctgggagcggattgacaagaaagtggaaggcctgagcaagcacatcaagctggaagaggaacggagaagcgaggacgcccagagcaaggccgccctgaccgactggctgcgggctaaggccagcttcgtgatcgagggcctgaaggaggccgacaaggacgagttctgcagatgcgagctgaagctgcagaagtggtacggggacctgcggggaaagcccttcgccatcgaagccgagaacagcatcctggacatcagcggcttcagcaagcagtacaactgtgccttcatctggcagaaggacggcgtgaagaagctgaacctgtacctgatcatcaactacttcaagggcggcaagctgcggttcaagaagatcaaacctgaagccttcgaagccaacagattctacaccgtgatcaacaaaaagagcggcgagatcgtgcccatggaggtgaacttcaacttcgacgaccccaacctgatcatcctgcctctggcctttggcaagagacagggcagagaattcatctggaacgacctgctgtccctggaaaccggcagcctgaagctggccaacggaagagtgatcgagaagacactgtacaacagaagaacccggcaggatgagcctgccctgttcgtggccctgaccttcgagcggcgggaggtcctggactcctccaatatcaaaccaatgaacctgatcggcgtggcaagaggcgaaaacatccccgccgtgatcgccctgaccgaccccgagggctgcccactgagccggtttaaggatagcctgggaaacccaacccacatcctgagaatcggcgagagctataaggagaagcagcggaccatccaggccaagaaggaggtggagcagcggagagccggcggctacagccggaagtacgccagcaaagccaagaatctggcagacgatatggtgagaaacaccgctagagatctgctgtactacgccgtgacccaggatgccatgctgatcttcgccaacctgagccggggcttcggccggcagggcaagcggaccttcatggccgagagacagtacacacggatggaggactggctgaccgccaagctggcctacgagggcctgagcaagacctacctgtccaagacactggcccagtacacctccaagacatgcagcaactgtgggtttaccatcaccagcgccgactacgacagggtgctggagaagctgaagaagacagcaacaggctggatgaccacaattaacggcaaggagctgaaggtggagggccagattacctactacaacagatacaagagacagaacgtagtcaaggacctgtccgtcgagctggatagactgagcgaagaatctgtgaacaacgacatctcctcctggacaaagggcagaagcggagaagctctgagcctcctgaagaaaagattctcccatagacccgtgcaggagaagttcgtgtgcctgaactgcggcttcgagacacacgcagccgagcaagccgccctgaacatcgccagatcctggctgttcctgcggagccaggagtacaagaaataccagacaaacaagacaaccggcaacaccgataagagagccttcgtcgagacctggcagtccttttaccggaagaagcttaaggaggtgtggaaacctgccgtgcggtctggcggatctggcggaggctcccaggtgcccgtgaccttcgaggacctggccgtgaggttcagcgccgaggagtggcacctgctggaggagtggcagagggagttccacagggacgtgatgagggagaactacgagatgctggtgagcctgggcaccgcccagctgctgcccctgagcgccttcctgagcctgaccgagccccaggaggacatgggcgacaacggctgcagcgacggcgagtgggagaggcccggcggcggcctgggcggcccaagcagcggcgcccctcctcccagcggcggcagcccagccggctccccaacctctaccgaggagggcacctctgagtccgccacccccgagagcggccctggcacctccaccgagcccagcgagggcagcgcacccggcagccctgccggcagccccacctccacagaggagggaaccagcaccgagcccagcgaaggcagcgccccaggcaccagcaccgagcctagtgagcaggagattaaacggatcaacaagatcagaagaagacttgtgaaagacagcaacaccaagaaggccggcaagacaggccccatgaaaaccctgctggttagagtgatgacacccgatctgagagagcggctggaaaacctgagaaagaagcctgaaaatatcccccagcccatcagcaatacatctagagccaacctgaataagctgctgaccgattacaccgaaatgaagaaggcgatcctgcatgtgtactgggaagagttccagaaggaccctgtgggcctgatgagccgggtggcccagcctgccagcaagaagatcgatcagaacaagctgaaacctgagatggacgagaagggcaacctgaccaccgccggctttgcctgctctcagtgtggccagcccctgttcgtgtacaagctggagcaggtgtctgagaagggcaaggcttacaccaactacttcggacggtgcaatgtggccgagcacgaaaagctgatcctgctggcccagctgaagcccgagaaggatagcgacgaagccgtgacatatagcctgggaaagtttgggcagagggccctggatttctacagcattcatgtgaccaaggagtccacccaccccgtgaagcccctggcccagatcgccggaaacagatacgcctccggacctgtgggaaaggccctgagcgacgcatgtatgggcacaatcgcctccttcctgtctaagtaccaggacatcatcatcgaacaccagaaggtggtgaagggcaaccagaagagactggagagcctgcgggagctggccggcaaggaaaacctggaataccctagcgtgaccctgccacctcagcctcacaccaaggagggcgttgatgcctacaacgaagtgatcgcccgggtgcgaatgtgggtgaacctgaacctgtggcagaagctgaagctaagcagagatgatgccaagcctctgctgagactgaagggattcccttcctttcctctggtcgagagacaggccaacgaagtggactggtgggacatggtgtgtaacgtgaagaagctgatcaacgagaaaaaggaggatggcaaggtgttttggcagaatctggctggctacaagagacaggaagccctgagaccatacctgagcagcgaggaagatcggaagaagggaaagaaattcgctcggtaccagctgggcgacctgctgctgcacctggaaaagaagcacggcgaggactggggaaaggtgtacgacgaggcctgggagcggattgacaagaaagtggaaggcctgagcaagcacatcaagctggaagaggaacggagaagcgaggacgcccagagcaaggccgccctgaccgactggctgcgggctaaggccagcttcgtgatcgagggcctgaaggaggccgacaaggacgagttctgcagatgcgagctgaagctgcagaagtggtacggggacctgcggggaaagcccttcgccatcgaagccgagaacagcatcctggacatcagcggcttcagcaagcagtacaactgtgccttcatctggcagaaggacggcgtgaagaagctgaacctgtacctgatcatcaactacttcaagggcggcaagctgcggttcaagaagatcaaacctgaagccttcgaagccaacagattctacaccgtgatcaacaaaaagagcggcgagatcgtgcccatggaggtgaacttcaacttcgacgaccccaacctgatcatcctgcctctggcctttggcaagagacagggcagagaattcatctggaacgacctgctgtccctggaaaccggcagcctgaagctggccaacggaagagtgatcgagaagacactgtacaacagaagaacccggcaggatgagcctgccctgttcgtggccctgaccttcgagcggcgggaggtcctggactcctccaatatcaaaccaatgaacctgatcggcgtggcaagaggcgaaaacatccccgccgtgatcgccctgaccgaccccgagggctgcccactgagccggtttaaggatagcctgggaaacccaacccacatcctgagaatcggcgagagctataaggagaagcagcggaccatccaggccaagaaggaggtggagcagcggagagccggcggctacagccggaagtacgccagcaaagccaagaatctggcagacgatatggtgagaaacaccgctagagatctgctgtactacgccgtgacccaggatgccatgctgatcttcgccaacctgagccggggcttcggccggcagggcaagcggaccttcatggccgagagacagtacacacggatggaggactggctgaccgccaagctggcctacgagggcctgagcaagacctacctgtccaagacactggcccagtacacctccaagacatgcagcaactgtgggtttaccatcaccagcgccgactacgacagggtgctggagaagctgaagaagacagcaacaggctggatgaccacaattaacggcaaggagctgaaggtggagggccagattacctactacaacagatacaagagacagaacgtagtcaaggacctgtccgtcgagctggatagactgagcgaagaatctgtgaacaacgacatctcctcctggacaaagggcagaagcggagaagctctgagcctcctgaagaaaagattctcccatagacccgtgcaggagaagttcgtgtgcctgaactgcggcttcgagacacacgcagccgagcaagccgccctgaacatcgccagatcctggctgttcctgcggagccaggagtacaagaaataccagacaaacaagacaaccggcaacaccgataagagagccttcgtcgagacctggcagtccttttaccggaagaagcttaaggaggtgtggaaacctgccgtgcggtctggcggatctggcggaggctcctcaggtgcccgtgaccttcgaggacctggccgtgaggttcagcgccgaggagtggcacctgctggaggagtggcagagggagttccacagggacgtgatgagggagaactacgagatgctggtgagcctgggcaccgcccagctgctgcccctgagcgccttcctgagcctgaccgagccccaggaggacatgggcgacaacggctgcagcgacggcgagtgggagaggcccggcggcggcctgggatctggctccggcagcggccccaagaaaaagagaaaagtctaagctgccttctgcggggcttgccttctggccatgcccttcttctctcccttgcacctgtacctcttggtctttgaataaagcctgagtaggaaggctagcaaaaaaaaaaaaaaaaaaaaaaaaaaaaaaaaaaaaaaaaaaaaaaaaaaaaaaaaaaaaaaaaaaaaaaaaaaaaaaaa

SEQ ID NO: 16453 - RNA, 9485 nt, synthetic construct
  source 1..9485: mol_type = other RNA
aggaaataagagagaaaagaagagtaagaagaaatataagagccaccatggcccctaagaagaagcgtaaagtgagccggatggaacgcctcgtctacgaggtgcggcagaagtgcagaaacatcgaggacatctgcatctcctgcggatctctgaacgtgaccctggagcacccactgttcatcggcggcatgtgccagaactgtaaaaactgttttctggagtgtgcctatcaatacgacgatgacggctaccagagctactgcaccatctgttgcggcggaagagaggtgctgatgtgtggaaataacaactgctgccggtgcttctgcgtggaatgcgtggacctgctggtgggccccggcgccgcccaggccgctattaaggaagatccttggaactgctacatgtgcggccacaagggcacatacggcctgctgagacggagagaggactggcctagcagactgcagatgttcttcgccaataaccacgaccaggagttcgacccccctaaggtgtaccctcccgtccccgccgagaagagaaagcccatccgggtcctgagcctgttcgatggcatcgccaccggtctgctggtgctgaaggacctgggcatccaggtggataggtacattgcctccgaggtgtgcgaggactccatcaccgtgggaatggtgcgtcatcagggcaagatcatgtacgtgggcgacgtgcggagcgtgacacagaagcatatccaggagtggggccctttcgacctggtgatcggcggcagcccttgcaatgacctgagcatcgtgaacccagcccggaagggcctgtacgagggaaccggcagactgttcttcgagttttacagactgctgcacgacgcccggcctaaggaaggcgacgaccggcccttcttttggctgttcgagaatgtggtggccatgggagtcagcgacaagcgggatattagccggttcctggagagcaaccccgtgatgatcgatgccaaggaagtgagcgccgcccaccgggccagatacttctggggcaatctgcctggcatgaacagacccctggccagcaccgtgaacgacaagctggagctgcaggagtgcctggagcacggccggatcgccaagttcagcaaggtgagaaccatcaccacccgaagcaacagcatcaaacaaggcaaggaccagcactttcctgtgttcatgaacgagaaggaggacatcctgtggtgtaccgagatggagagagtgttcgggttcccagtccactacacagatgtcagcaacatgtctagactggccagacagagactgctgggaagaagctggtccgtccctgtgatcagacacctgttcgcccctctgaaggagtacttcgcctgcgtgagcagcggcaacagcaacgccaacagccggggccccagcttctctagcggcctggtgccactgtccctgagagggagccacatgggccccatggagatctacaaaaccgtgagcgcctggaagcggcagcctgtgcgcgtgctgagcctgtttcggaatatcgataaagtcctgaaaagcctgggattcctggagagcggctctggctccggcggtggcaccctgaagtacgtggaggatgtgacaaacgtggtcagacgggatgtggagaagtggggccccttcgatctggtgtacggcagcacccaacccctgggcagctcttgtgaccggtgccctggctggtacatgtttcagttccaccggatcctgcagtacgccctgccgagacaggagtcccagcggccattcttttggattttcatggacaacttgctgctgaccgaggatgaccaggaaactaccactcggttcctgcagaccgaagccgtgaccctgcaggacgtgagaggccgggactaccagaacgccatgcgggtgtggtccaacatccctggactgaaaagcaagcacgcacctctgacccctaaagaagaggagtacctgcaggcccaggtgcggagcagaagcaagctggacgcccctaaggtggatctgctggtgaagaattgcctcctgcccctgagagagtacttcaagtatttcagccagaatagtctgcccctgggaggcagcggcggcggcgccctggtgacatttgaggacgtcgccgtgcggttcacccaggaggaatgggctctgctggatccttctcagaaaatcctgtaccgggacgtgatgagagagacataccggaatctgacctccgtgggcatcaactgggaatgttgggaccttgaagcctgcttcagaagcctgggaagaaacctgagagtgcaggtggtgaagagaaagtgcgagctgaccaacagcggcccctgcgccgagggcggcccaagcagcggcgcccctcctcccagcggcggcagcccagccggctccccaacctctaccgaggagggcacctctgagtccgccacccccgagagcggccctggcacctccaccgagcccagcgagggcagcgcacccggcagccctgccggcagccccacctccacagaggagggaaccagcaccgagcccagcgaaggcagcgccccaggcaccagcaccgagcctagtgagcaggagattaaacggatcaacaagatcagaagaagacttgtgaaagacagcaacaccaagaaggccggcaagacaggccccatgaaaaccctgctggttagagtgatgacacccgatctgagagagcggctggaaaacctgagaaagaagcctgaaaatatcccccagcccatcagcaatacatctagagccaacctgaataagctgctgaccgattacaccgaaatgaagaaggcgatcctgcatgtgtactgggaagagttccagaaggaccctgtgggcctgatgagccgggtggcccagcctgccagcaagaagatcgatcagaacaagctgaaacctgagatggacgagaagggcaacctgaccaccgccggctttgcctgctctcagtgtggccagcccctgttcgtgtacaagctggagcaggtgtctgagaagggcaaggcttacaccaactacttcggacggtgcaatgtggccgagcacgaaaagctgatcctgctggcccagctgaagcccgagaaggatagcgacgaagccgtgacatatagcctgggaaagtttgggcagagggccctggatttctacagcattcatgtgaccaaggagtccacccaccccgtgaagcccctggcccagatcgccggaaacagatacgcctccggacctgtgggaaaggccctgagcgacgcatgtatgggcacaatcgcctccttcctgtctaagtaccaggacatcatcatcgaacaccagaaggtggtgaagggcaaccagaagagactggagagcctgcgggagctggccggcaaggaaaacctggaataccctagcgtgaccctgccacctcagcctcacaccaaggagggcgttgatgcctacaacgaagtgatcgcccgggtgcgaatgtgggtgaacctgaacctgtggcagaagctgaagctaagcagagatgatgccaagcctctgctgagactgaagggattcccttcctttcctctggtcgagagacaggccaacgaagtggactggtgggacatggtgtgtaacgtgaagaagctgatcaacgagaaaaaggaggatggcaaggtgttttggcagaatctggctggctacaagagacaggaagccctgagaccatacctgagcagcgaggaagatcggaagaagggaaagaaattcgctcggtaccagctgggcgacctgctgctgcacctggaaaagaagcacggcgaggactggggaaaggtgtacgacgaggcctgggagcggattgacaagaaagtggaaggcctgagcaagcacatcaagctggaagaggaacggagaagcgaggacgcccagagcaaggccgccctgaccgactggctgcgggctaaggccagcttcgtgatcgagggcctgaaggaggccgacaaggacgagttctgcagatgcgagctgaagctgcagaagtggtacggggacctgcggggaaagcccttcgccatcgaagccgagaacagcatcctggacatcagcggcttcagcaagcagtacaactgtgccttcatctggcagaaggacggcgtgaagaagctgaacctgtacctgatcatcaactacttcaagggcggcaagctgcggttcaagaagatcaaacctgaagccttcgaagccaacagattctacaccgtgatcaacaaaaagagcggcgagatcgtgcccatggaggtgaacttcaacttcgacgaccccaacctgatcatcctgcctctggcctttggcaagagacagggcagagaattcatctggaacgacctgctgtccctggaaaccggcagcctgaagctggccaacggaagagtgatcgagaagacactgtacaacagaagaacccggcaggatgagcctgccctgttcgtggccctgaccttcgagcggcgggaggtcctggactcctccaatatcaaaccaatgaacctgatcggcgtggcaagaggcgaaaacatccccgccgtgatcgccctgaccgaccccgagggctgcccactgagccggtttaaggatagcctgggaaacccaacccacatcctgagaatcggcgagagctataaggagaagcagcggaccatccaggccaagaaggaggtggagcagcggagagccggcggctacagccggaagtacgccagcaaagccaagaatctggcagacgatatggtgagaaacaccgctagagatctgctgtactacgccgtgacccaggatgccatgctgatcttcgccaacctgagccggggcttcggccggcagggcaagcggaccttcatggccgagagacagtacacacggatggaggactggctgaccgccaagctggcctacgagggcctgagcaagacctacctgtccaagacactggcccagtacacctccaagacatgcagcaactgtgggtttaccatcaccagcgccgactacgacagggtgctggagaagctgaagaagacagcaacaggctggatgaccacaattaacggcaaggagctgaaggtggagggccagattacctactacaacagatacaagagacagaacgtagtcaaggacctgtccgtcgagctggatagactgagcgaagaatctgtgaacaacgacatctcctcctggacaaagggcagaagcggagaagctctgagcctcctgaagaaaagattctcccatagacccgtgcaggagaagttcgtgtgcctgaactgcggcttcgagacacacgcagccgagcaagccgccctgaacatcgccagatcctggctgttcctgcggagccaggagtacaagaaataccagacaaacaagacaaccggcaacaccgataagagagccttcgtcgagacctggcagtccttttaccggaagaagcttaaggaggtgtggaaacctgccgtgcggtctggcggatctggcggaggctccctgcaggaggccgtgaccttcaaggacgtggccgtggtgttcaccgaggaggagctgggcctgctggacagcacccagaggaccctgtacagggacgtgatgctggagaacttcaggaacctggtgagcctgggccaccagagcttcaagcccgacgtgatcagccagctggagagggaggagaagctgtggctgaagaagctgcagacccagaggggcaggaggagcggcggcaggagccagggcggcccaagcagcggcgcccctcctcccagcggcggcagcccagccggctccccaacctctaccgaggagggcacctctgagtccgccacccccgagagcggccctggcacctccaccgagcccagcgagggcagcgcacccggcagccctgccggcagccccacctccacagaggagggaaccagcaccgagcccagcgaaggcagcgccccaggcaccagcaccgagcctagtgagcaggagattaaacggatcaacaagatcagaagaagacttgtgaaagacagcaacaccaagaaggccggcaagacaggccccatgaaaaccctgctggttagagtgatgacacccgatctgagagagcggctggaaaacctgagaaagaagcctgaaaatatcccccagcccatcagcaatacatctagagccaacctgaataagctgctgaccgattacaccgaaatgaagaaggcgatcctgcatgtgtactgggaagagttccagaaggaccctgtgggcctgatgagccgggtggcccagcctgccagcaagaagatcgatcagaacaagctgaaacctgagatggacgagaagggcaacctgaccaccgccggctttgcctgctctcagtgtggccagcccctgttcgtgtacaagctggagcaggtgtctgagaagggcaaggcttacaccaactacttcggacggtgcaatgtggccgagcacgaaaagctgatcctgctggcccagctgaagcccgagaaggatagcgacgaagccgtgacatatagcctgggaaagtttgggcagagggccctggatttctacagcattcatgtgaccaaggagtccacccaccccgtgaagcccctggcccagatcgccggaaacagatacgcctccggacctgtgggaaaggccctgagcgacgcatgtatgggcacaatcgcctccttcctgtctaagtaccaggacatcatcatcgaacaccagaaggtggtgaagggcaaccagaagagactggagagcctgcgggagctggccggcaaggaaaacctggaataccctagcgtgaccctgccacctcagcctcacaccaaggagggcgttgatgcctacaacgaagtgatcgcccgggtgcgaatgtgggtgaacctgaacctgtggcagaagctgaagctaagcagagatgatgccaagcctctgctgagactgaagggattcccttcctttcctctggtcgagagacaggccaacgaagtggactggtgggacatggtgtgtaacgtgaagaagctgatcaacgagaaaaaggaggatggcaaggtgttttggcagaatctggctggctacaagagacaggaagccctgagaccatacctgagcagcgaggaagatcggaagaagggaaagaaattcgctcggtaccagctgggcgacctgctgctgcacctggaaaagaagcacggcgaggactggggaaaggtgtacgacgaggcctgggagcggattgacaagaaagtggaaggcctgagcaagcacatcaagctggaagaggaacggagaagcgaggacgcccagagcaaggccgccctgaccgactggctgcgggctaaggccagcttcgtgatcgagggcctgaaggaggccgacaaggacgagttctgcagatgcgagctgaagctgcagaagtggtacggggacctgcggggaaagcccttcgccatcgaagccgagaacagcatcctggacatcagcggcttcagcaagcagtacaactgtgccttcatctggcagaaggacggcgtgaagaagctgaacctgtacctgatcatcaactacttcaagggcggcaagctgcggttcaagaagatcaaacctgaagccttcgaagccaacagattctacaccgtgatcaacaaaaagagcggcgagatcgtgcccatggaggtgaacttcaacttcgacgaccccaacctgatcatcctgcctctggcctttggcaagagacagggcagagaattcatctggaacgacctgctgtccctggaaaccggcagcctgaagctggccaacggaagagtgatcgagaagacactgtacaacagaagaacccggcaggatgagcctgccctgttcgtggccctgaccttcgagcggcgggaggtcctggactcctccaatatcaaaccaatgaacctgatcggcgtggcaagaggcgaaaacatccccgccgtgatcgccctgaccgaccccgagggctgcccactgagccggtttaaggatagcctgggaaacccaacccacatcctgagaatcggcgagagctataaggagaagcagcggaccatccaggccaagaaggaggtggagcagcggagagccggcggctacagccggaagtacgccagcaaagccaagaatctggcagacgatatggtgagaaacaccgctagagatctgctgtactacgccgtgacccaggatgccatgctgatcttcgccaacctgagccggggcttcggccggcagggcaagcggaccttcatggccgagagacagtacacacggatggaggactggctgaccgccaagctggcctacgagggcctgagcaagacctacctgtccaagacactggcccagtacacctccaagacatgcagcaactgtgggtttaccatcaccagcgccgactacgacagggtgctggagaagctgaagaagacagcaacaggctggatgaccacaattaacggcaaggagctgaaggtggagggccagattacctactacaacagatacaagagacagaacgtagtcaaggacctgtccgtcgagctggatagactgagcgaagaatctgtgaacaacgacatctcctcctggacaaagggcagaagcggagaagctctgagcctcctgaagaaaagattctcccatagacccgtgcaggagaagttcgtgtgcctgaactgcggcttcgagacacacgcagccgagcaagccgccctgaacatcgccagatcctggctgttcctgcggagccaggagtacaagaaataccagacaaacaagacaaccggcaacaccgataagagagccttcgtcgagacctggcagtccttttaccggaagaagcttaaggaggtgtggaaacctgccgtgcggtctggcggatctggcggaggctcctctgcaggaggccgtgaccttcaaggacgtggccgtggtgttcaccgaggaggagctgggcctgctggacagcacccagaggaccctgtacagggacgtgatgctggagaacttcaggaacctggtgagcctgggccaccagagcttcaagcccgacgtgatcagccagctggagagggaggagaagctgtggctgaagaagctgcagacccagaggggcaggaggagcggcggcaggagccagggatctggctccggcagcggccccaagaaaaagagaaaagtctaagctgccttctgcggggcttgccttctggccatgcccttcttctctcccttgcacctgtacctcttggtctttgaataaagcctgagtaggaaggctagcaaaaaaaaaaaaaaaaaaaaaaaaaaaaaaaaaaaaaaaaaaaaaaaaaaaaaaaaaaaaaaaaaaaaaaaaaaaaaaaa

SEQ ID NO: 16454 - RNA, 9551 nt, synthetic construct
  source 1..9551: mol_type = other RNA
aggaaataagagagaaaagaagagtaagaagaaatataagagccaccatggcccctaagaagaagcgtaaagtgagccggatggaacgcctcgtctacgaggtgcggcagaagtgcagaaacatcgaggacatctgcatctcctgcggatctctgaacgtgaccctggagcacccactgttcatcggcggcatgtgccagaactgtaaaaactgttttctggagtgtgcctatcaatacgacgatgacggctaccagagctactgcaccatctgttgcggcggaagagaggtgctgatgtgtggaaataacaactgctgccggtgcttctgcgtggaatgcgtggacctgctggtgggccccggcgccgcccaggccgctattaaggaagatccttggaactgctacatgtgcggccacaagggcacatacggcctgctgagacggagagaggactggcctagcagactgcagatgttcttcgccaataaccacgaccaggagttcgacccccctaaggtgtaccctcccgtccccgccgagaagagaaagcccatccgggtcctgagcctgttcgatggcatcgccaccggtctgctggtgctgaaggacctgggcatccaggtggataggtacattgcctccgaggtgtgcgaggactccatcaccgtgggaatggtgcgtcatcagggcaagatcatgtacgtgggcgacgtgcggagcgtgacacagaagcatatccaggagtggggccctttcgacctggtgatcggcggcagcccttgcaatgacctgagcatcgtgaacccagcccggaagggcctgtacgagggaaccggcagactgttcttcgagttttacagactgctgcacgacgcccggcctaaggaaggcgacgaccggcccttcttttggctgttcgagaatgtggtggccatgggagtcagcgacaagcgggatattagccggttcctggagagcaaccccgtgatgatcgatgccaaggaagtgagcgccgcccaccgggccagatacttctggggcaatctgcctggcatgaacagacccctggccagcaccgtgaacgacaagctggagctgcaggagtgcctggagcacggccggatcgccaagttcagcaaggtgagaaccatcaccacccgaagcaacagcatcaaacaaggcaaggaccagcactttcctgtgttcatgaacgagaaggaggacatcctgtggtgtaccgagatggagagagtgttcgggttcccagtccactacacagatgtcagcaacatgtctagactggccagacagagactgctgggaagaagctggtccgtccctgtgatcagacacctgttcgcccctctgaaggagtacttcgcctgcgtgagcagcggcaacagcaacgccaacagccggggccccagcttctctagcggcctggtgccactgtccctgagagggagccacatgggccccatggagatctacaaaaccgtgagcgcctggaagcggcagcctgtgcgcgtgctgagcctgtttcggaatatcgataaagtcctgaaaagcctgggattcctggagagcggctctggctccggcggtggcaccctgaagtacgtggaggatgtgacaaacgtggtcagacgggatgtggagaagtggggccccttcgatctggtgtacggcagcacccaacccctgggcagctcttgtgaccggtgccctggctggtacatgtttcagttccaccggatcctgcagtacgccctgccgagacaggagtcccagcggccattcttttggattttcatggacaacttgctgctgaccgaggatgaccaggaaactaccactcggttcctgcagaccgaagccgtgaccctgcaggacgtgagaggccgggactaccagaacgccatgcgggtgtggtccaacatccctggactgaaaagcaagcacgcacctctgacccctaaagaagaggagtacctgcaggcccaggtgcggagcagaagcaagctggacgcccctaaggtggatctgctggtgaagaattgcctcctgcccctgagagagtacttcaagtatttcagccagaatagtctgcccctgggaggcagcggcggcggcgccctggtgacatttgaggacgtcgccgtgcggttcacccaggaggaatgggctctgctggatccttctcagaaaatcctgtaccgggacgtgatgagagagacataccggaatctgacctccgtgggcatcaactgggaatgttgggaccttgaagcctgcttcagaagcctgggaagaaacctgagagtgcaggtggtgaagagaaagtgcgagctgaccaacagcggcccctgcgccgagggcggcccaagcagcggcgcccctcctcccagcggcggcagcccagccggctccccaacctctaccgaggagggcacctctgagtccgccacccccgagagcggccctggcacctccaccgagcccagcgagggcagcgcacccggcagccctgccggcagccccacctccacagaggagggaaccagcaccgagcccagcgaaggcagcgccccaggcaccagcaccgagcctagtgagcaggagattaaacggatcaacaagatcagaagaagacttgtgaaagacagcaacaccaagaaggccggcaagacaggccccatgaaaaccctgctggttagagtgatgacacccgatctgagagagcggctggaaaacctgagaaagaagcctgaaaatatcccccagcccatcagcaatacatctagagccaacctgaataagctgctgaccgattacaccgaaatgaagaaggcgatcctgcatgtgtactgggaagagttccagaaggaccctgtgggcctgatgagccgggtggcccagcctgccagcaagaagatcgatcagaacaagctgaaacctgagatggacgagaagggcaacctgaccaccgccggctttgcctgctctcagtgtggccagcccctgttcgtgtacaagctggagcaggtgtctgagaagggcaaggcttacaccaactacttcggacggtgcaatgtggccgagcacgaaaagctgatcctgctggcccagctgaagcccgagaaggatagcgacgaagccgtgacatatagcctgggaaagtttgggcagagggccctggatttctacagcattcatgtgaccaaggagtccacccaccccgtgaagcccctggcccagatcgccggaaacagatacgcctccggacctgtgggaaaggccctgagcgacgcatgtatgggcacaatcgcctccttcctgtctaagtaccaggacatcatcatcgaacaccagaaggtggtgaagggcaaccagaagagactggagagcctgcgggagctggccggcaaggaaaacctggaataccctagcgtgaccctgccacctcagcctcacaccaaggagggcgttgatgcctacaacgaagtgatcgcccgggtgcgaatgtgggtgaacctgaacctgtggcagaagctgaagctaagcagagatgatgccaagcctctgctgagactgaagggattcccttcctttcctctggtcgagagacaggccaacgaagtggactggtgggacatggtgtgtaacgtgaagaagctgatcaacgagaaaaaggaggatggcaaggtgttttggcagaatctggctggctacaagagacaggaagccctgagaccatacctgagcagcgaggaagatcggaagaagggaaagaaattcgctcggtaccagctgggcgacctgctgctgcacctggaaaagaagcacggcgaggactggggaaaggtgtacgacgaggcctgggagcggattgacaagaaagtggaaggcctgagcaagcacatcaagctggaagaggaacggagaagcgaggacgcccagagcaaggccgccctgaccgactggctgcgggctaaggccagcttcgtgatcgagggcctgaaggaggccgacaaggacgagttctgcagatgcgagctgaagctgcagaagtggtacggggacctgcggggaaagcccttcgccatcgaagccgagaacagcatcctggacatcagcggcttcagcaagcagtacaactgtgccttcatctggcagaaggacggcgtgaagaagctgaacctgtacctgatcatcaactacttcaagggcggcaagctgcggttcaagaagatcaaacctgaagccttcgaagccaacagattctacaccgtgatcaacaaaaagagcggcgagatcgtgcccatggaggtgaacttcaacttcgacgaccccaacctgatcatcctgcctctggcctttggcaagagacagggcagagaattcatctggaacgacctgctgtccctggaaaccggcagcctgaagctggccaacggaagagtgatcgagaagacactgtacaacagaagaacccggcaggatgagcctgccctgttcgtggccctgaccttcgagcggcgggaggtcctggactcctccaatatcaaaccaatgaacctgatcggcgtggcaagaggcgaaaacatccccgccgtgatcgccctgaccgaccccgagggctgcccactgagccggtttaaggatagcctgggaaacccaacccacatcctgagaatcggcgagagctataaggagaagcagcggaccatccaggccaagaaggaggtggagcagcggagagccggcggctacagccggaagtacgccagcaaagccaagaatctggcagacgatatggtgagaaacaccgctagagatctgctgtactacgccgtgacccaggatgccatgctgatcttcgccaacctgagccggggcttcggccggcagggcaagcggaccttcatggccgagagacagtacacacggatggaggactggctgaccgccaagctggcctacgagggcctgagcaagacctacctgtccaagacactggcccagtacacctccaagacatgcagcaactgtgggtttaccatcaccagcgccgactacgacagggtgctggagaagctgaagaagacagcaacaggctggatgaccacaattaacggcaaggagctgaaggtggagggccagattacctactacaacagatacaagagacagaacgtagtcaaggacctgtccgtcgagctggatagactgagcgaagaatctgtgaacaacgacatctcctcctggacaaagggcagaagcggagaagctctgagcctcctgaagaaaagattctcccatagacccgtgcaggagaagttcgtgtgcctgaactgcggcttcgagacacacgcagccgagcaagccgccctgaacatcgccagatcctggctgttcctgcggagccaggagtacaagaaataccagacaaacaagacaaccggcaacaccgataagagagccttcgtcgagacctggcagtccttttaccggaagaagcttaaggaggtgtggaaacctgccgtgcggtctggcggatctggcggaggctccgtggtgttcgaggacgtggccgtgtacttcagccaggaggagtggggcctgctggacgaggcccagaggcacctgtaccacgccgtgatgaccgagaacttcgccctggtgaccagcctgggctgctggcacggcgcccaggacgaggaggcccccagcgagcagagcatcagcgtgggcatgagcgaggtgggcacccccaagcccgaccccagcaccaagaagggccagccctacgagatgtgcgagcccctgagcaaggacctgctgcacctgggcggcccaagcagcggcgcccctcctcccagcggcggcagcccagccggctccccaacctctaccgaggagggcacctctgagtccgccacccccgagagcggccctggcacctccaccgagcccagcgagggcagcgcacccggcagccctgccggcagccccacctccacagaggagggaaccagcaccgagcccagcgaaggcagcgccccaggcaccagcaccgagcctagtgagcaggagattaaacggatcaacaagatcagaagaagacttgtgaaagacagcaacaccaagaaggccggcaagacaggccccatgaaaaccctgctggttagagtgatgacacccgatctgagagagcggctggaaaacctgagaaagaagcctgaaaatatcccccagcccatcagcaatacatctagagccaacctgaataagctgctgaccgattacaccgaaatgaagaaggcgatcctgcatgtgtactgggaagagttccagaaggaccctgtgggcctgatgagccgggtggcccagcctgccagcaagaagatcgatcagaacaagctgaaacctgagatggacgagaagggcaacctgaccaccgccggctttgcctgctctcagtgtggccagcccctgttcgtgtacaagctggagcaggtgtctgagaagggcaaggcttacaccaactacttcggacggtgcaatgtggccgagcacgaaaagctgatcctgctggcccagctgaagcccgagaaggatagcgacgaagccgtgacatatagcctgggaaagtttgggcagagggccctggatttctacagcattcatgtgaccaaggagtccacccaccccgtgaagcccctggcccagatcgccggaaacagatacgcctccggacctgtgggaaaggccctgagcgacgcatgtatgggcacaatcgcctccttcctgtctaagtaccaggacatcatcatcgaacaccagaaggtggtgaagggcaaccagaagagactggagagcctgcgggagctggccggcaaggaaaacctggaataccctagcgtgaccctgccacctcagcctcacaccaaggagggcgttgatgcctacaacgaagtgatcgcccgggtgcgaatgtgggtgaacctgaacctgtggcagaagctgaagctaagcagagatgatgccaagcctctgctgagactgaagggattcccttcctttcctctggtcgagagacaggccaacgaagtggactggtgggacatggtgtgtaacgtgaagaagctgatcaacgagaaaaaggaggatggcaaggtgttttggcagaatctggctggctacaagagacaggaagccctgagaccatacctgagcagcgaggaagatcggaagaagggaaagaaattcgctcggtaccagctgggcgacctgctgctgcacctggaaaagaagcacggcgaggactggggaaaggtgtacgacgaggcctgggagcggattgacaagaaagtggaaggcctgagcaagcacatcaagctggaagaggaacggagaagcgaggacgcccagagcaaggccgccctgaccgactggctgcgggctaaggccagcttcgtgatcgagggcctgaaggaggccgacaaggacgagttctgcagatgcgagctgaagctgcagaagtggtacggggacctgcggggaaagcccttcgccatcgaagccgagaacagcatcctggacatcagcggcttcagcaagcagtacaactgtgccttcatctggcagaaggacggcgtgaagaagctgaacctgtacctgatcatcaactacttcaagggcggcaagctgcggttcaagaagatcaaacctgaagccttcgaagccaacagattctacaccgtgatcaacaaaaagagcggcgagatcgtgcccatggaggtgaacttcaacttcgacgaccccaacctgatcatcctgcctctggcctttggcaagagacagggcagagaattcatctggaacgacctgctgtccctggaaaccggcagcctgaagctggccaacggaagagtgatcgagaagacactgtacaacagaagaacccggcaggatgagcctgccctgttcgtggccctgaccttcgagcggcgggaggtcctggactcctccaatatcaaaccaatgaacctgatcggcgtggcaagaggcgaaaacatccccgccgtgatcgccctgaccgaccccgagggctgcccactgagccggtttaaggatagcctgggaaacccaacccacatcctgagaatcggcgagagctataaggagaagcagcggaccatccaggccaagaaggaggtggagcagcggagagccggcggctacagccggaagtacgccagcaaagccaagaatctggcagacgatatggtgagaaacaccgctagagatctgctgtactacgccgtgacccaggatgccatgctgatcttcgccaacctgagccggggcttcggccggcagggcaagcggaccttcatggccgagagacagtacacacggatggaggactggctgaccgccaagctggcctacgagggcctgagcaagacctacctgtccaagacactggcccagtacacctccaagacatgcagcaactgtgggtttaccatcaccagcgccgactacgacagggtgctggagaagctgaagaagacagcaacaggctggatgaccacaattaacggcaaggagctgaaggtggagggccagattacctactacaacagatacaagagacagaacgtagtcaaggacctgtccgtcgagctggatagactgagcgaagaatctgtgaacaacgacatctcctcctggacaaagggcagaagcggagaagctctgagcctcctgaagaaaagattctcccatagacccgtgcaggagaagttcgtgtgcctgaactgcggcttcgagacacacgcagccgagcaagccgccctgaacatcgccagatcctggctgttcctgcggagccaggagtacaagaaataccagacaaacaagacaaccggcaacaccgataagagagccttcgtcgagacctggcagtccttttaccggaagaagcttaaggaggtgtggaaacctgccgtgcggtctggcggatctggcggaggctcctgtggtgttcgaggacgtggccgtgtacttcagccaggaggagtggggcctgctggacgaggcccagaggcacctgtaccacgccgtgatgaccgagaacttcgccctggtgaccagcctgggctgctggcacggcgcccaggacgaggaggcccccagcgagcagagcatcagcgtgggcatgagcgaggtgggcacccccaagcccgaccccagcaccaagaagggccagccctacgagatgtgcgagcccctgagcaaggacctgctgcacctgggatctggctccggcagcggccccaagaaaaagagaaaagtctaagctgccttctgcggggcttgccttctggccatgcccttcttctctcccttgcacctgtacctcttggtctttgaataaagcctgagtaggaaggctagcaaaaaaaaaaaaaaaaaaaaaaaaaaaaaaaaaaaaaaaaaaaaaaaaaaaaaaaaaaaaaaaaaaaaaaaaaaaaaaaa

SEQ ID NO: 16455 - RNA, 9485 nt, synthetic construct
  source 1..9485: mol_type = other RNA
aggaaataagagagaaaagaagagtaagaagaaatataagagccaccatggcccctaagaagaagcgtaaagtgagccggatggaacgcctcgtctacgaggtgcggcagaagtgcagaaacatcgaggacatctgcatctcctgcggatctctgaacgtgaccctggagcacccactgttcatcggcggcatgtgccagaactgtaaaaactgttttctggagtgtgcctatcaatacgacgatgacggctaccagagctactgcaccatctgttgcggcggaagagaggtgctgatgtgtggaaataacaactgctgccggtgcttctgcgtggaatgcgtggacctgctggtgggccccggcgccgcccaggccgctattaaggaagatccttggaactgctacatgtgcggccacaagggcacatacggcctgctgagacggagagaggactggcctagcagactgcagatgttcttcgccaataaccacgaccaggagttcgacccccctaaggtgtaccctcccgtccccgccgagaagagaaagcccatccgggtcctgagcctgttcgatggcatcgccaccggtctgctggtgctgaaggacctgggcatccaggtggataggtacattgcctccgaggtgtgcgaggactccatcaccgtgggaatggtgcgtcatcagggcaagatcatgtacgtgggcgacgtgcggagcgtgacacagaagcatatccaggagtggggccctttcgacctggtgatcggcggcagcccttgcaatgacctgagcatcgtgaacccagcccggaagggcctgtacgagggaaccggcagactgttcttcgagttttacagactgctgcacgacgcccggcctaaggaaggcgacgaccggcccttcttttggctgttcgagaatgtggtggccatgggagtcagcgacaagcgggatattagccggttcctggagagcaaccccgtgatgatcgatgccaaggaagtgagcgccgcccaccgggccagatacttctggggcaatctgcctggcatgaacagacccctggccagcaccgtgaacgacaagctggagctgcaggagtgcctggagcacggccggatcgccaagttcagcaaggtgagaaccatcaccacccgaagcaacagcatcaaacaaggcaaggaccagcactttcctgtgttcatgaacgagaaggaggacatcctgtggtgtaccgagatggagagagtgttcgggttcccagtccactacacagatgtcagcaacatgtctagactggccagacagagactgctgggaagaagctggtccgtccctgtgatcagacacctgttcgcccctctgaaggagtacttcgcctgcgtgagcagcggcaacagcaacgccaacagccggggccccagcttctctagcggcctggtgccactgtccctgagagggagccacatgggccccatggagatctacaaaaccgtgagcgcctggaagcggcagcctgtgcgcgtgctgagcctgtttcggaatatcgataaagtcctgaaaagcctgggattcctggagagcggctctggctccggcggtggcaccctgaagtacgtggaggatgtgacaaacgtggtcagacgggatgtggagaagtggggccccttcgatctggtgtacggcagcacccaacccctgggcagctcttgtgaccggtgccctggctggtacatgtttcagttccaccggatcctgcagtacgccctgccgagacaggagtcccagcggccattcttttggattttcatggacaacttgctgctgaccgaggatgaccaggaaactaccactcggttcctgcagaccgaagccgtgaccctgcaggacgtgagaggccgggactaccagaacgccatgcgggtgtggtccaacatccctggactgaaaagcaagcacgcacctctgacccctaaagaagaggagtacctgcaggcccaggtgcggagcagaagcaagctggacgcccctaaggtggatctgctggtgaagaattgcctcctgcccctgagagagtacttcaagtatttcagccagaatagtctgcccctgggaggcagcggcggcggcgccctggtgacatttgaggacgtcgccgtgcggttcacccaggaggaatgggctctgctggatccttctcagaaaatcctgtaccgggacgtgatgagagagacataccggaatctgacctccgtgggcatcaactgggaatgttgggaccttgaagcctgcttcagaagcctgggaagaaacctgagagtgcaggtggtgaagagaaagtgcgagctgaccaacagcggcccctgcgccgagggcggcccaagcagcggcgcccctcctcccagcggcggcagcccagccggctccccaacctctaccgaggagggcacctctgagtccgccacccccgagagcggccctggcacctccaccgagcccagcgagggcagcgcacccggcagccctgccggcagccccacctccacagaggagggaaccagcaccgagcccagcgaaggcagcgccccaggcaccagcaccgagcctagtgagcaggagattaaacggatcaacaagatcagaagaagacttgtgaaagacagcaacaccaagaaggccggcaagacaggccccatgaaaaccctgctggttagagtgatgacacccgatctgagagagcggctggaaaacctgagaaagaagcctgaaaatatcccccagcccatcagcaatacatctagagccaacctgaataagctgctgaccgattacaccgaaatgaagaaggcgatcctgcatgtgtactgggaagagttccagaaggaccctgtgggcctgatgagccgggtggcccagcctgccagcaagaagatcgatcagaacaagctgaaacctgagatggacgagaagggcaacctgaccaccgccggctttgcctgctctcagtgtggccagcccctgttcgtgtacaagctggagcaggtgtctgagaagggcaaggcttacaccaactacttcggacggtgcaatgtggccgagcacgaaaagctgatcctgctggcccagctgaagcccgagaaggatagcgacgaagccgtgacatatagcctgggaaagtttgggcagagggccctggatttctacagcattcatgtgaccaaggagtccacccaccccgtgaagcccctggcccagatcgccggaaacagatacgcctccggacctgtgggaaaggccctgagcgacgcatgtatgggcacaatcgcctccttcctgtctaagtaccaggacatcatcatcgaacaccagaaggtggtgaagggcaaccagaagagactggagagcctgcgggagctggccggcaaggaaaacctggaataccctagcgtgaccctgccacctcagcctcacaccaaggagggcgttgatgcctacaacgaagtgatcgcccgggtgcgaatgtgggtgaacctgaacctgtggcagaagctgaagctaagcagagatgatgccaagcctctgctgagactgaagggattcccttcctttcctctggtcgagagacaggccaacgaagtggactggtgggacatggtgtgtaacgtgaagaagctgatcaacgagaaaaaggaggatggcaaggtgttttggcagaatctggctggctacaagagacaggaagccctgagaccatacctgagcagcgaggaagatcggaagaagggaaagaaattcgctcggtaccagctgggcgacctgctgctgcacctggaaaagaagcacggcgaggactggggaaaggtgtacgacgaggcctgggagcggattgacaagaaagtggaaggcctgagcaagcacatcaagctggaagaggaacggagaagcgaggacgcccagagcaaggccgccctgaccgactggctgcgggctaaggccagcttcgtgatcgagggcctgaaggaggccgacaaggacgagttctgcagatgcgagctgaagctgcagaagtggtacggggacctgcggggaaagcccttcgccatcgaagccgagaacagcatcctggacatcagcggcttcagcaagcagtacaactgtgccttcatctggcagaaggacggcgtgaagaagctgaacctgtacctgatcatcaactacttcaagggcggcaagctgcggttcaagaagatcaaacctgaagccttcgaagccaacagattctacaccgtgatcaacaaaaagagcggcgagatcgtgcccatggaggtgaacttcaacttcgacgaccccaacctgatcatcctgcctctggcctttggcaagagacagggcagagaattcatctggaacgacctgctgtccctggaaaccggcagcctgaagctggccaacggaagagtgatcgagaagacactgtacaacagaagaacccggcaggatgagcctgccctgttcgtggccctgaccttcgagcggcgggaggtcctggactcctccaatatcaaaccaatgaacctgatcggcgtggcaagaggcgaaaacatccccgccgtgatcgccctgaccgaccccgagggctgcccactgagccggtttaaggatagcctgggaaacccaacccacatcctgagaatcggcgagagctataaggagaagcagcggaccatccaggccaagaaggaggtggagcagcggagagccggcggctacagccggaagtacgccagcaaagccaagaatctggcagacgatatggtgagaaacaccgctagagatctgctgtactacgccgtgacccaggatgccatgctgatcttcgccaacctgagccggggcttcggccggcagggcaagcggaccttcatggccgagagacagtacacacggatggaggactggctgaccgccaagctggcctacgagggcctgagcaagacctacctgtccaagacactggcccagtacacctccaagacatgcagcaactgtgggtttaccatcaccagcgccgactacgacagggtgctggagaagctgaagaagacagcaacaggctggatgaccacaattaacggcaaggagctgaaggtggagggccagattacctactacaacagatacaagagacagaacgtagtcaaggacctgtccgtcgagctggatagactgagcgaagaatctgtgaacaacgacatctcctcctggacaaagggcagaagcggagaagctctgagcctcctgaagaaaagattctcccatagacccgtgcaggagaagttcgtgtgcctgaactgcggcttcgagacacacgcagccgagcaagccgccctgaacatcgccagatcctggctgttcctgcggagccaggagtacaagaaataccagacaaacaagacaaccggcaacaccgataagagagccttcgtcgagacctggcagtccttttaccggaagaagcttaaggaggtgtggaaacctgccgtgcggtctggcggatctggcggaggctccccccaggagcccgtgaccttcgccgacgtggccgtgctgttcacccccgaggagtggctgttcctggacagcgcccagaagagcctgtacagggacgtgatgctggagaactacaggaacctggccagcgtgggcgaccagctgtgcaagaccaggatgagcagccacctggagcagagggaggagctgtgcgtgaccgagaggggcatcttccccggcgcccacctgggcccccacttccagggcggcccaagcagcggcgcccctcctcccagcggcggcagcccagccggctccccaacctctaccgaggagggcacctctgagtccgccacccccgagagcggccctggcacctccaccgagcccagcgagggcagcgcacccggcagccctgccggcagccccacctccacagaggagggaaccagcaccgagcccagcgaaggcagcgccccaggcaccagcaccgagcctagtgagcaggagattaaacggatcaacaagatcagaagaagacttgtgaaagacagcaacaccaagaaggccggcaagacaggccccatgaaaaccctgctggttagagtgatgacacccgatctgagagagcggctggaaaacctgagaaagaagcctgaaaatatcccccagcccatcagcaatacatctagagccaacctgaataagctgctgaccgattacaccgaaatgaagaaggcgatcctgcatgtgtactgggaagagttccagaaggaccctgtgggcctgatgagccgggtggcccagcctgccagcaagaagatcgatcagaacaagctgaaacctgagatggacgagaagggcaacctgaccaccgccggctttgcctgctctcagtgtggccagcccctgttcgtgtacaagctggagcaggtgtctgagaagggcaaggcttacaccaactacttcggacggtgcaatgtggccgagcacgaaaagctgatcctgctggcccagctgaagcccgagaaggatagcgacgaagccgtgacatatagcctgggaaagtttgggcagagggccctggatttctacagcattcatgtgaccaaggagtccacccaccccgtgaagcccctggcccagatcgccggaaacagatacgcctccggacctgtgggaaaggccctgagcgacgcatgtatgggcacaatcgcctccttcctgtctaagtaccaggacatcatcatcgaacaccagaaggtggtgaagggcaaccagaagagactggagagcctgcgggagctggccggcaaggaaaacctggaataccctagcgtgaccctgccacctcagcctcacaccaaggagggcgttgatgcctacaacgaagtgatcgcccgggtgcgaatgtgggtgaacctgaacctgtggcagaagctgaagctaagcagagatgatgccaagcctctgctgagactgaagggattcccttcctttcctctggtcgagagacaggccaacgaagtggactggtgggacatggtgtgtaacgtgaagaagctgatcaacgagaaaaaggaggatggcaaggtgttttggcagaatctggctggctacaagagacaggaagccctgagaccatacctgagcagcgaggaagatcggaagaagggaaagaaattcgctcggtaccagctgggcgacctgctgctgcacctggaaaagaagcacggcgaggactggggaaaggtgtacgacgaggcctgggagcggattgacaagaaagtggaaggcctgagcaagcacatcaagctggaagaggaacggagaagcgaggacgcccagagcaaggccgccctgaccgactggctgcgggctaaggccagcttcgtgatcgagggcctgaaggaggccgacaaggacgagttctgcagatgcgagctgaagctgcagaagtggtacggggacctgcggggaaagcccttcgccatcgaagccgagaacagcatcctggacatcagcggcttcagcaagcagtacaactgtgccttcatctggcagaaggacggcgtgaagaagctgaacctgtacctgatcatcaactacttcaagggcggcaagctgcggttcaagaagatcaaacctgaagccttcgaagccaacagattctacaccgtgatcaacaaaaagagcggcgagatcgtgcccatggaggtgaacttcaacttcgacgaccccaacctgatcatcctgcctctggcctttggcaagagacagggcagagaattcatctggaacgacctgctgtccctggaaaccggcagcctgaagctggccaacggaagagtgatcgagaagacactgtacaacagaagaacccggcaggatgagcctgccctgttcgtggccctgaccttcgagcggcgggaggtcctggactcctccaatatcaaaccaatgaacctgatcggcgtggcaagaggcgaaaacatccccgccgtgatcgccctgaccgaccccgagggctgcccactgagccggtttaaggatagcctgggaaacccaacccacatcctgagaatcggcgagagctataaggagaagcagcggaccatccaggccaagaaggaggtggagcagcggagagccggcggctacagccggaagtacgccagcaaagccaagaatctggcagacgatatggtgagaaacaccgctagagatctgctgtactacgccgtgacccaggatgccatgctgatcttcgccaacctgagccggggcttcggccggcagggcaagcggaccttcatggccgagagacagtacacacggatggaggactggctgaccgccaagctggcctacgagggcctgagcaagacctacctgtccaagacactggcccagtacacctccaagacatgcagcaactgtgggtttaccatcaccagcgccgactacgacagggtgctggagaagctgaagaagacagcaacaggctggatgaccacaattaacggcaaggagctgaaggtggagggccagattacctactacaacagatacaagagacagaacgtagtcaaggacctgtccgtcgagctggatagactgagcgaagaatctgtgaacaacgacatctcctcctggacaaagggcagaagcggagaagctctgagcctcctgaagaaaagattctcccatagacccgtgcaggagaagttcgtgtgcctgaactgcggcttcgagacacacgcagccgagcaagccgccctgaacatcgccagatcctggctgttcctgcggagccaggagtacaagaaataccagacaaacaagacaaccggcaacaccgataagagagccttcgtcgagacctggcagtccttttaccggaagaagcttaaggaggtgtggaaacctgccgtgcggtctggcggatctggcggaggctcctccccaggagcccgtgaccttcgccgacgtggccgtgctgttcacccccgaggagtggctgttcctggacagcgcccagaagagcctgtacagggacgtgatgctggagaactacaggaacctggccagcgtgggcgaccagctgtgcaagaccaggatgagcagccacctggagcagagggaggagctgtgcgtgaccgagaggggcatcttccccggcgcccacctgggcccccacttccagggatctggctccggcagcggccccaagaaaaagagaaaagtctaagctgccttctgcggggcttgccttctggccatgcccttcttctctcccttgcacctgtacctcttggtctttgaataaagcctgagtaggaaggctagcaaaaaaaaaaaaaaaaaaaaaaaaaaaaaaaaaaaaaaaaaaaaaaaaaaaaaaaaaaaaaaaaaaaaaaaaaaaaaaaa

SEQ ID NO: 16456 - RNA, 9479 nt, synthetic construct
  source 1..9479: mol_type = other RNA
aggaaataagagagaaaagaagagtaagaagaaatataagagccaccatggcccctaagaagaagcgtaaagtgagccggatggaacgcctcgtctacgaggtgcggcagaagtgcagaaacatcgaggacatctgcatctcctgcggatctctgaacgtgaccctggagcacccactgttcatcggcggcatgtgccagaactgtaaaaactgttttctggagtgtgcctatcaatacgacgatgacggctaccagagctactgcaccatctgttgcggcggaagagaggtgctgatgtgtggaaataacaactgctgccggtgcttctgcgtggaatgcgtggacctgctggtgggccccggcgccgcccaggccgctattaaggaagatccttggaactgctacatgtgcggccacaagggcacatacggcctgctgagacggagagaggactggcctagcagactgcagatgttcttcgccaataaccacgaccaggagttcgacccccctaaggtgtaccctcccgtccccgccgagaagagaaagcccatccgggtcctgagcctgttcgatggcatcgccaccggtctgctggtgctgaaggacctgggcatccaggtggataggtacattgcctccgaggtgtgcgaggactccatcaccgtgggaatggtgcgtcatcagggcaagatcatgtacgtgggcgacgtgcggagcgtgacacagaagcatatccaggagtggggccctttcgacctggtgatcggcggcagcccttgcaatgacctgagcatcgtgaacccagcccggaagggcctgtacgagggaaccggcagactgttcttcgagttttacagactgctgcacgacgcccggcctaaggaaggcgacgaccggcccttcttttggctgttcgagaatgtggtggccatgggagtcagcgacaagcgggatattagccggttcctggagagcaaccccgtgatgatcgatgccaaggaagtgagcgccgcccaccgggccagatacttctggggcaatctgcctggcatgaacagacccctggccagcaccgtgaacgacaagctggagctgcaggagtgcctggagcacggccggatcgccaagttcagcaaggtgagaaccatcaccacccgaagcaacagcatcaaacaaggcaaggaccagcactttcctgtgttcatgaacgagaaggaggacatcctgtggtgtaccgagatggagagagtgttcgggttcccagtccactacacagatgtcagcaacatgtctagactggccagacagagactgctgggaagaagctggtccgtccctgtgatcagacacctgttcgcccctctgaaggagtacttcgcctgcgtgagcagcggcaacagcaacgccaacagccggggccccagcttctctagcggcctggtgccactgtccctgagagggagccacatgggccccatggagatctacaaaaccgtgagcgcctggaagcggcagcctgtgcgcgtgctgagcctgtttcggaatatcgataaagtcctgaaaagcctgggattcctggagagcggctctggctccggcggtggcaccctgaagtacgtggaggatgtgacaaacgtggtcagacgggatgtggagaagtggggccccttcgatctggtgtacggcagcacccaacccctgggcagctcttgtgaccggtgccctggctggtacatgtttcagttccaccggatcctgcagtacgccctgccgagacaggagtcccagcggccattcttttggattttcatggacaacttgctgctgaccgaggatgaccaggaaactaccactcggttcctgcagaccgaagccgtgaccctgcaggacgtgagaggccgggactaccagaacgccatgcgggtgtggtccaacatccctggactgaaaagcaagcacgcacctctgacccctaaagaagaggagtacctgcaggcccaggtgcggagcagaagcaagctggacgcccctaaggtggatctgctggtgaagaattgcctcctgcccctgagagagtacttcaagtatttcagccagaatagtctgcccctgggaggcagcggcggcggcgccctggtgacatttgaggacgtcgccgtgcggttcacccaggaggaatgggctctgctggatccttctcagaaaatcctgtaccgggacgtgatgagagagacataccggaatctgacctccgtgggcatcaactgggaatgttgggaccttgaagcctgcttcagaagcctgggaagaaacctgagagtgcaggtggtgaagagaaagtgcgagctgaccaacagcggcccctgcgccgagggcggcccaagcagcggcgcccctcctcccagcggcggcagcccagccggctccccaacctctaccgaggagggcacctctgagtccgccacccccgagagcggccctggcacctccaccgagcccagcgagggcagcgcacccggcagccctgccggcagccccacctccacagaggagggaaccagcaccgagcccagcgaaggcagcgccccaggcaccagcaccgagcctagtgagcaggagattaaacggatcaacaagatcagaagaagacttgtgaaagacagcaacaccaagaaggccggcaagacaggccccatgaaaaccctgctggttagagtgatgacacccgatctgagagagcggctggaaaacctgagaaagaagcctgaaaatatcccccagcccatcagcaatacatctagagccaacctgaataagctgctgaccgattacaccgaaatgaagaaggcgatcctgcatgtgtactgggaagagttccagaaggaccctgtgggcctgatgagccgggtggcccagcctgccagcaagaagatcgatcagaacaagctgaaacctgagatggacgagaagggcaacctgaccaccgccggctttgcctgctctcagtgtggccagcccctgttcgtgtacaagctggagcaggtgtctgagaagggcaaggcttacaccaactacttcggacggtgcaatgtggccgagcacgaaaagctgatcctgctggcccagctgaagcccgagaaggatagcgacgaagccgtgacatatagcctgggaaagtttgggcagagggccctggatttctacagcattcatgtgaccaaggagtccacccaccccgtgaagcccctggcccagatcgccggaaacagatacgcctccggacctgtgggaaaggccctgagcgacgcatgtatgggcacaatcgcctccttcctgtctaagtaccaggacatcatcatcgaacaccagaaggtggtgaagggcaaccagaagagactggagagcctgcgggagctggccggcaaggaaaacctggaataccctagcgtgaccctgccacctcagcctcacaccaaggagggcgttgatgcctacaacgaagtgatcgcccgggtgcgaatgtgggtgaacctgaacctgtggcagaagctgaagctaagcagagatgatgccaagcctctgctgagactgaagggattcccttcctttcctctggtcgagagacaggccaacgaagtggactggtgggacatggtgtgtaacgtgaagaagctgatcaacgagaaaaaggaggatggcaaggtgttttggcagaatctggctggctacaagagacaggaagccctgagaccatacctgagcagcgaggaagatcggaagaagggaaagaaattcgctcggtaccagctgggcgacctgctgctgcacctggaaaagaagcacggcgaggactggggaaaggtgtacgacgaggcctgggagcggattgacaagaaagtggaaggcctgagcaagcacatcaagctggaagaggaacggagaagcgaggacgcccagagcaaggccgccctgaccgactggctgcgggctaaggccagcttcgtgatcgagggcctgaaggaggccgacaaggacgagttctgcagatgcgagctgaagctgcagaagtggtacggggacctgcggggaaagcccttcgccatcgaagccgagaacagcatcctggacatcagcggcttcagcaagcagtacaactgtgccttcatctggcagaaggacggcgtgaagaagctgaacctgtacctgatcatcaactacttcaagggcggcaagctgcggttcaagaagatcaaacctgaagccttcgaagccaacagattctacaccgtgatcaacaaaaagagcggcgagatcgtgcccatggaggtgaacttcaacttcgacgaccccaacctgatcatcctgcctctggcctttggcaagagacagggcagagaattcatctggaacgacctgctgtccctggaaaccggcagcctgaagctggccaacggaagagtgatcgagaagacactgtacaacagaagaacccggcaggatgagcctgccctgttcgtggccctgaccttcgagcggcgggaggtcctggactcctccaatatcaaaccaatgaacctgatcggcgtggcaagaggcgaaaacatccccgccgtgatcgccctgaccgaccccgagggctgcccactgagccggtttaaggatagcctgggaaacccaacccacatcctgagaatcggcgagagctataaggagaagcagcggaccatccaggccaagaaggaggtggagcagcggagagccggcggctacagccggaagtacgccagcaaagccaagaatctggcagacgatatggtgagaaacaccgctagagatctgctgtactacgccgtgacccaggatgccatgctgatcttcgccaacctgagccggggcttcggccggcagggcaagcggaccttcatggccgagagacagtacacacggatggaggactggctgaccgccaagctggcctacgagggcctgagcaagacctacctgtccaagacactggcccagtacacctccaagacatgcagcaactgtgggtttaccatcaccagcgccgactacgacagggtgctggagaagctgaagaagacagcaacaggctggatgaccacaattaacggcaaggagctgaaggtggagggccagattacctactacaacagatacaagagacagaacgtagtcaaggacctgtccgtcgagctggatagactgagcgaagaatctgtgaacaacgacatctcctcctggacaaagggcagaagcggagaagctctgagcctcctgaagaaaagattctcccatagacccgtgcaggagaagttcgtgtgcctgaactgcggcttcgagacacacgcagccgagcaagccgccctgaacatcgccagatcctggctgttcctgcggagccaggagtacaagaaataccagacaaacaagacaaccggcaacaccgataagagagccttcgtcgagacctggcagtccttttaccggaagaagcttaaggaggtgtggaaacctgccgtgcggtctggcggatctggcggaggctccagagtgctgaccttcagagacgtggccgtggagttcagccccgaggagtgggagtgcctggacagcgcccagcagagactgtacagagacgtgatgctggagaactacggcaacctgttcagcctgggcctggccatcttcaagcccgacctgatcacctacctggagcagagaaaggagccctggaacgccagaagacagaagaccgtggccaagcaccccgccggcagcctgcacttcggcggcccaagcagcggcgcccctcctcccagcggcggcagcccagccggctccccaacctctaccgaggagggcacctctgagtccgccacccccgagagcggccctggcacctccaccgagcccagcgagggcagcgcacccggcagccctgccggcagccccacctccacagaggagggaaccagcaccgagcccagcgaaggcagcgccccaggcaccagcaccgagcctagtgagcaggagattaaacggatcaacaagatcagaagaagacttgtgaaagacagcaacaccaagaaggccggcaagacaggccccatgaaaaccctgctggttagagtgatgacacccgatctgagagagcggctggaaaacctgagaaagaagcctgaaaatatcccccagcccatcagcaatacatctagagccaacctgaataagctgctgaccgattacaccgaaatgaagaaggcgatcctgcatgtgtactgggaagagttccagaaggaccctgtgggcctgatgagccgggtggcccagcctgccagcaagaagatcgatcagaacaagctgaaacctgagatggacgagaagggcaacctgaccaccgccggctttgcctgctctcagtgtggccagcccctgttcgtgtacaagctggagcaggtgtctgagaagggcaaggcttacaccaactacttcggacggtgcaatgtggccgagcacgaaaagctgatcctgctggcccagctgaagcccgagaaggatagcgacgaagccgtgacatatagcctgggaaagtttgggcagagggccctggatttctacagcattcatgtgaccaaggagtccacccaccccgtgaagcccctggcccagatcgccggaaacagatacgcctccggacctgtgggaaaggccctgagcgacgcatgtatgggcacaatcgcctccttcctgtctaagtaccaggacatcatcatcgaacaccagaaggtggtgaagggcaaccagaagagactggagagcctgcgggagctggccggcaaggaaaacctggaataccctagcgtgaccctgccacctcagcctcacaccaaggagggcgttgatgcctacaacgaagtgatcgcccgggtgcgaatgtgggtgaacctgaacctgtggcagaagctgaagctaagcagagatgatgccaagcctctgctgagactgaagggattcccttcctttcctctggtcgagagacaggccaacgaagtggactggtgggacatggtgtgtaacgtgaagaagctgatcaacgagaaaaaggaggatggcaaggtgttttggcagaatctggctggctacaagagacaggaagccctgagaccatacctgagcagcgaggaagatcggaagaagggaaagaaattcgctcggtaccagctgggcgacctgctgctgcacctggaaaagaagcacggcgaggactggggaaaggtgtacgacgaggcctgggagcggattgacaagaaagtggaaggcctgagcaagcacatcaagctggaagaggaacggagaagcgaggacgcccagagcaaggccgccctgaccgactggctgcgggctaaggccagcttcgtgatcgagggcctgaaggaggccgacaaggacgagttctgcagatgcgagctgaagctgcagaagtggtacggggacctgcggggaaagcccttcgccatcgaagccgagaacagcatcctggacatcagcggcttcagcaagcagtacaactgtgccttcatctggcagaaggacggcgtgaagaagctgaacctgtacctgatcatcaactacttcaagggcggcaagctgcggttcaagaagatcaaacctgaagccttcgaagccaacagattctacaccgtgatcaacaaaaagagcggcgagatcgtgcccatggaggtgaacttcaacttcgacgaccccaacctgatcatcctgcctctggcctttggcaagagacagggcagagaattcatctggaacgacctgctgtccctggaaaccggcagcctgaagctggccaacggaagagtgatcgagaagacactgtacaacagaagaacccggcaggatgagcctgccctgttcgtggccctgaccttcgagcggcgggaggtcctggactcctccaatatcaaaccaatgaacctgatcggcgtggcaagaggcgaaaacatccccgccgtgatcgccctgaccgaccccgagggctgcccactgagccggtttaaggatagcctgggaaacccaacccacatcctgagaatcggcgagagctataaggagaagcagcggaccatccaggccaagaaggaggtggagcagcggagagccggcggctacagccggaagtacgccagcaaagccaagaatctggcagacgatatggtgagaaacaccgctagagatctgctgtactacgccgtgacccaggatgccatgctgatcttcgccaacctgagccggggcttcggccggcagggcaagcggaccttcatggccgagagacagtacacacggatggaggactggctgaccgccaagctggcctacgagggcctgagcaagacctacctgtccaagacactggcccagtacacctccaagacatgcagcaactgtgggtttaccatcaccagcgccgactacgacagggtgctggagaagctgaagaagacagcaacaggctggatgaccacaattaacggcaaggagctgaaggtggagggccagattacctactacaacagatacaagagacagaacgtagtcaaggacctgtccgtcgagctggatagactgagcgaagaatctgtgaacaacgacatctcctcctggacaaagggcagaagcggagaagctctgagcctcctgaagaaaagattctcccatagacccgtgcaggagaagttcgtgtgcctgaactgcggcttcgagacacacgcagccgagcaagccgccctgaacatcgccagatcctggctgttcctgcggagccaggagtacaagaaataccagacaaacaagacaaccggcaacaccgataagagagccttcgtcgagacctggcagtccttttaccggaagaagcttaaggaggtgtggaaacctgccgtgcggtctggcggatctggcggaggctcctagagtgctgaccttcagagacgtggccgtggagttcagccccgaggagtgggagtgcctggacagcgcccagcagagactgtacagagacgtgatgctggagaactacggcaacctgttcagcctgggcctggccatcttcaagcccgacctgatcacctacctggagcagagaaaggagccctggaacgccagaagacagaagaccgtggccaagcaccccgccggcagcctgcacttcggatctggctccggcagcggccccaagaaaaagagaaaagtctaagctgccttctgcggggcttgccttctggccatgcccttcttctctcccttgcacctgtacctcttggtctttgaataaagcctgagtaggaaggctagcaaaaaaaaaaaaaaaaaaaaaaaaaaaaaaaaaaaaaaaaaaaaaaaaaaaaaaaaaaaaaaaaaaaaaaaaaaaaaaaa

SEQ ID NO: 16457 - RNA, 9485 nt, synthetic construct
  source 1..9485: mol_type = other RNA
aggaaataagagagaaaagaagagtaagaagaaatataagagccaccatggcccctaagaagaagcgtaaagtgagccggatggaacgcctcgtctacgaggtgcggcagaagtgcagaaacatcgaggacatctgcatctcctgcggatctctgaacgtgaccctggagcacccactgttcatcggcggcatgtgccagaactgtaaaaactgttttctggagtgtgcctatcaatacgacgatgacggctaccagagctactgcaccatctgttgcggcggaagagaggtgctgatgtgtggaaataacaactgctgccggtgcttctgcgtggaatgcgtggacctgctggtgggccccggcgccgcccaggccgctattaaggaagatccttggaactgctacatgtgcggccacaagggcacatacggcctgctgagacggagagaggactggcctagcagactgcagatgttcttcgccaataaccacgaccaggagttcgacccccctaaggtgtaccctcccgtccccgccgagaagagaaagcccatccgggtcctgagcctgttcgatggcatcgccaccggtctgctggtgctgaaggacctgggcatccaggtggataggtacattgcctccgaggtgtgcgaggactccatcaccgtgggaatggtgcgtcatcagggcaagatcatgtacgtgggcgacgtgcggagcgtgacacagaagcatatccaggagtggggccctttcgacctggtgatcggcggcagcccttgcaatgacctgagcatcgtgaacccagcccggaagggcctgtacgagggaaccggcagactgttcttcgagttttacagactgctgcacgacgcccggcctaaggaaggcgacgaccggcccttcttttggctgttcgagaatgtggtggccatgggagtcagcgacaagcgggatattagccggttcctggagagcaaccccgtgatgatcgatgccaaggaagtgagcgccgcccaccgggccagatacttctggggcaatctgcctggcatgaacagacccctggccagcaccgtgaacgacaagctggagctgcaggagtgcctggagcacggccggatcgccaagttcagcaaggtgagaaccatcaccacccgaagcaacagcatcaaacaaggcaaggaccagcactttcctgtgttcatgaacgagaaggaggacatcctgtggtgtaccgagatggagagagtgttcgggttcccagtccactacacagatgtcagcaacatgtctagactggccagacagagactgctgggaagaagctggtccgtccctgtgatcagacacctgttcgcccctctgaaggagtacttcgcctgcgtgagcagcggcaacagcaacgccaacagccggggccccagcttctctagcggcctggtgccactgtccctgagagggagccacatgggccccatggagatctacaaaaccgtgagcgcctggaagcggcagcctgtgcgcgtgctgagcctgtttcggaatatcgataaagtcctgaaaagcctgggattcctggagagcggctctggctccggcggtggcaccctgaagtacgtggaggatgtgacaaacgtggtcagacgggatgtggagaagtggggccccttcgatctggtgtacggcagcacccaacccctgggcagctcttgtgaccggtgccctggctggtacatgtttcagttccaccggatcctgcagtacgccctgccgagacaggagtcccagcggccattcttttggattttcatggacaacttgctgctgaccgaggatgaccaggaaactaccactcggttcctgcagaccgaagccgtgaccctgcaggacgtgagaggccgggactaccagaacgccatgcgggtgtggtccaacatccctggactgaaaagcaagcacgcacctctgacccctaaagaagaggagtacctgcaggcccaggtgcggagcagaagcaagctggacgcccctaaggtggatctgctggtgaagaattgcctcctgcccctgagagagtacttcaagtatttcagccagaatagtctgcccctgggaggcagcggcggcggcgccctggtgacatttgaggacgtcgccgtgcggttcacccaggaggaatgggctctgctggatccttctcagaaaatcctgtaccgggacgtgatgagagagacataccggaatctgacctccgtgggcatcaactgggaatgttgggaccttgaagcctgcttcagaagcctgggaagaaacctgagagtgcaggtggtgaagagaaagtgcgagctgaccaacagcggcccctgcgccgagggcggcccaagcagcggcgcccctcctcccagcggcggcagcccagccggctccccaacctctaccgaggagggcacctctgagtccgccacccccgagagcggccctggcacctccaccgagcccagcgagggcagcgcacccggcagccctgccggcagccccacctccacagaggagggaaccagcaccgagcccagcgaaggcagcgccccaggcaccagcaccgagcctagtgagcaggagattaaacggatcaacaagatcagaagaagacttgtgaaagacagcaacaccaagaaggccggcaagacaggccccatgaaaaccctgctggttagagtgatgacacccgatctgagagagcggctggaaaacctgagaaagaagcctgaaaatatcccccagcccatcagcaatacatctagagccaacctgaataagctgctgaccgattacaccgaaatgaagaaggcgatcctgcatgtgtactgggaagagttccagaaggaccctgtgggcctgatgagccgggtggcccagcctgccagcaagaagatcgatcagaacaagctgaaacctgagatggacgagaagggcaacctgaccaccgccggctttgcctgctctcagtgtggccagcccctgttcgtgtacaagctggagcaggtgtctgagaagggcaaggcttacaccaactacttcggacggtgcaatgtggccgagcacgaaaagctgatcctgctggcccagctgaagcccgagaaggatagcgacgaagccgtgacatatagcctgggaaagtttgggcagagggccctggatttctacagcattcatgtgaccaaggagtccacccaccccgtgaagcccctggcccagatcgccggaaacagatacgcctccggacctgtgggaaaggccctgagcgacgcatgtatgggcacaatcgcctccttcctgtctaagtaccaggacatcatcatcgaacaccagaaggtggtgaagggcaaccagaagagactggagagcctgcgggagctggccggcaaggaaaacctggaataccctagcgtgaccctgccacctcagcctcacaccaaggagggcgttgatgcctacaacgaagtgatcgcccgggtgcgaatgtgggtgaacctgaacctgtggcagaagctgaagctaagcagagatgatgccaagcctctgctgagactgaagggattcccttcctttcctctggtcgagagacaggccaacgaagtggactggtgggacatggtgtgtaacgtgaagaagctgatcaacgagaaaaaggaggatggcaaggtgttttggcagaatctggctggctacaagagacaggaagccctgagaccatacctgagcagcgaggaagatcggaagaagggaaagaaattcgctcggtaccagctgggcgacctgctgctgcacctggaaaagaagcacggcgaggactggggaaaggtgtacgacgaggcctgggagcggattgacaagaaagtggaaggcctgagcaagcacatcaagctggaagaggaacggagaagcgaggacgcccagagcaaggccgccctgaccgactggctgcgggctaaggccagcttcgtgatcgagggcctgaaggaggccgacaaggacgagttctgcagatgcgagctgaagctgcagaagtggtacggggacctgcggggaaagcccttcgccatcgaagccgagaacagcatcctggacatcagcggcttcagcaagcagtacaactgtgccttcatctggcagaaggacggcgtgaagaagctgaacctgtacctgatcatcaactacttcaagggcggcaagctgcggttcaagaagatcaaacctgaagccttcgaagccaacagattctacaccgtgatcaacaaaaagagcggcgagatcgtgcccatggaggtgaacttcaacttcgacgaccccaacctgatcatcctgcctctggcctttggcaagagacagggcagagaattcatctggaacgacctgctgtccctggaaaccggcagcctgaagctggccaacggaagagtgatcgagaagacactgtacaacagaagaacccggcaggatgagcctgccctgttcgtggccctgaccttcgagcggcgggaggtcctggactcctccaatatcaaaccaatgaacctgatcggcgtggcaagaggcgaaaacatccccgccgtgatcgccctgaccgaccccgagggctgcccactgagccggtttaaggatagcctgggaaacccaacccacatcctgagaatcggcgagagctataaggagaagcagcggaccatccaggccaagaaggaggtggagcagcggagagccggcggctacagccggaagtacgccagcaaagccaagaatctggcagacgatatggtgagaaacaccgctagagatctgctgtactacgccgtgacccaggatgccatgctgatcttcgccaacctgagccggggcttcggccggcagggcaagcggaccttcatggccgagagacagtacacacggatggaggactggctgaccgccaagctggcctacgagggcctgagcaagacctacctgtccaagacactggcccagtacacctccaagacatgcagcaactgtgggtttaccatcaccagcgccgactacgacagggtgctggagaagctgaagaagacagcaacaggctggatgaccacaattaacggcaaggagctgaaggtggagggccagattacctactacaacagatacaagagacagaacgtagtcaaggacctgtccgtcgagctggatagactgagcgaagaatctgtgaacaacgacatctcctcctggacaaagggcagaagcggagaagctctgagcctcctgaagaaaagattctcccatagacccgtgcaggagaagttcgtgtgcctgaactgcggcttcgagacacacgcagccgagcaagccgccctgaacatcgccagatcctggctgttcctgcggagccaggagtacaagaaataccagacaaacaagacaaccggcaacaccgataagagagccttcgtcgagacctggcagtccttttaccggaagaagcttaaggaggtgtggaaacctgccgtgcggtctggcggatctggcggaggctccgcccaggagaccgtgaccttcaaggacgtggccgtggacttcacccaggaggagtggggccagctggaccccgtgcagaggaccctgtacagggacgtgatgctggagacctacggccacctgctgagcgtgggcaaccagatcgccaagcccgaggtgatcagcctgctggagcagggcgaggagccctggagcatggacagggtgtaccccccccagaggacctgccccgagtggatgaggggcggcccaagcagcggcgcccctcctcccagcggcggcagcccagccggctccccaacctctaccgaggagggcacctctgagtccgccacccccgagagcggccctggcacctccaccgagcccagcgagggcagcgcacccggcagccctgccggcagccccacctccacagaggagggaaccagcaccgagcccagcgaaggcagcgccccaggcaccagcaccgagcctagtgagcaggagattaaacggatcaacaagatcagaagaagacttgtgaaagacagcaacaccaagaaggccggcaagacaggccccatgaaaaccctgctggttagagtgatgacacccgatctgagagagcggctggaaaacctgagaaagaagcctgaaaatatcccccagcccatcagcaatacatctagagccaacctgaataagctgctgaccgattacaccgaaatgaagaaggcgatcctgcatgtgtactgggaagagttccagaaggaccctgtgggcctgatgagccgggtggcccagcctgccagcaagaagatcgatcagaacaagctgaaacctgagatggacgagaagggcaacctgaccaccgccggctttgcctgctctcagtgtggccagcccctgttcgtgtacaagctggagcaggtgtctgagaagggcaaggcttacaccaactacttcggacggtgcaatgtggccgagcacgaaaagctgatcctgctggcccagctgaagcccgagaaggatagcgacgaagccgtgacatatagcctgggaaagtttgggcagagggccctggatttctacagcattcatgtgaccaaggagtccacccaccccgtgaagcccctggcccagatcgccggaaacagatacgcctccggacctgtgggaaaggccctgagcgacgcatgtatgggcacaatcgcctccttcctgtctaagtaccaggacatcatcatcgaacaccagaaggtggtgaagggcaaccagaagagactggagagcctgcgggagctggccggcaaggaaaacctggaataccctagcgtgaccctgccacctcagcctcacaccaaggagggcgttgatgcctacaacgaagtgatcgcccgggtgcgaatgtgggtgaacctgaacctgtggcagaagctgaagctaagcagagatgatgccaagcctctgctgagactgaagggattcccttcctttcctctggtcgagagacaggccaacgaagtggactggtgggacatggtgtgtaacgtgaagaagctgatcaacgagaaaaaggaggatggcaaggtgttttggcagaatctggctggctacaagagacaggaagccctgagaccatacctgagcagcgaggaagatcggaagaagggaaagaaattcgctcggtaccagctgggcgacctgctgctgcacctggaaaagaagcacggcgaggactggggaaaggtgtacgacgaggcctgggagcggattgacaagaaagtggaaggcctgagcaagcacatcaagctggaagaggaacggagaagcgaggacgcccagagcaaggccgccctgaccgactggctgcgggctaaggccagcttcgtgatcgagggcctgaaggaggccgacaaggacgagttctgcagatgcgagctgaagctgcagaagtggtacggggacctgcggggaaagcccttcgccatcgaagccgagaacagcatcctggacatcagcggcttcagcaagcagtacaactgtgccttcatctggcagaaggacggcgtgaagaagctgaacctgtacctgatcatcaactacttcaagggcggcaagctgcggttcaagaagatcaaacctgaagccttcgaagccaacagattctacaccgtgatcaacaaaaagagcggcgagatcgtgcccatggaggtgaacttcaacttcgacgaccccaacctgatcatcctgcctctggcctttggcaagagacagggcagagaattcatctggaacgacctgctgtccctggaaaccggcagcctgaagctggccaacggaagagtgatcgagaagacactgtacaacagaagaacccggcaggatgagcctgccctgttcgtggccctgaccttcgagcggcgggaggtcctggactcctccaatatcaaaccaatgaacctgatcggcgtggcaagaggcgaaaacatccccgccgtgatcgccctgaccgaccccgagggctgcccactgagccggtttaaggatagcctgggaaacccaacccacatcctgagaatcggcgagagctataaggagaagcagcggaccatccaggccaagaaggaggtggagcagcggagagccggcggctacagccggaagtacgccagcaaagccaagaatctggcagacgatatggtgagaaacaccgctagagatctgctgtactacgccgtgacccaggatgccatgctgatcttcgccaacctgagccggggcttcggccggcagggcaagcggaccttcatggccgagagacagtacacacggatggaggactggctgaccgccaagctggcctacgagggcctgagcaagacctacctgtccaagacactggcccagtacacctccaagacatgcagcaactgtgggtttaccatcaccagcgccgactacgacagggtgctggagaagctgaagaagacagcaacaggctggatgaccacaattaacggcaaggagctgaaggtggagggccagattacctactacaacagatacaagagacagaacgtagtcaaggacctgtccgtcgagctggatagactgagcgaagaatctgtgaacaacgacatctcctcctggacaaagggcagaagcggagaagctctgagcctcctgaagaaaagattctcccatagacccgtgcaggagaagttcgtgtgcctgaactgcggcttcgagacacacgcagccgagcaagccgccctgaacatcgccagatcctggctgttcctgcggagccaggagtacaagaaataccagacaaacaagacaaccggcaacaccgataagagagccttcgtcgagacctggcagtccttttaccggaagaagcttaaggaggtgtggaaacctgccgtgcggtctggcggatctggcggaggctcctgcccaggagaccgtgaccttcaaggacgtggccgtggacttcacccaggaggagtggggccagctggaccccgtgcagaggaccctgtacagggacgtgatgctggagacctacggccacctgctgagcgtgggcaaccagatcgccaagcccgaggtgatcagcctgctggagcagggcgaggagccctggagcatggacagggtgtaccccccccagaggacctgccccgagtggatgaggggatctggctccggcagcggccccaagaaaaagagaaaagtctaagctgccttctgcggggcttgccttctggccatgcccttcttctctcccttgcacctgtacctcttggtctttgaataaagcctgagtaggaaggctagcaaaaaaaaaaaaaaaaaaaaaaaaaaaaaaaaaaaaaaaaaaaaaaaaaaaaaaaaaaaaaaaaaaaaaaaaaaaaaaaa

SEQ ID NO: 16458 - RNA, 9485 nt, synthetic construct
  source 1..9485: mol_type = other RNA
aggaaataagagagaaaagaagagtaagaagaaatataagagccaccatggcccctaagaagaagcgtaaagtgagccggatggaacgcctcgtctacgaggtgcggcagaagtgcagaaacatcgaggacatctgcatctcctgcggatctctgaacgtgaccctggagcacccactgttcatcggcggcatgtgccagaactgtaaaaactgttttctggagtgtgcctatcaatacgacgatgacggctaccagagctactgcaccatctgttgcggcggaagagaggtgctgatgtgtggaaataacaactgctgccggtgcttctgcgtggaatgcgtggacctgctggtgggccccggcgccgcccaggccgctattaaggaagatccttggaactgctacatgtgcggccacaagggcacatacggcctgctgagacggagagaggactggcctagcagactgcagatgttcttcgccaataaccacgaccaggagttcgacccccctaaggtgtaccctcccgtccccgccgagaagagaaagcccatccgggtcctgagcctgttcgatggcatcgccaccggtctgctggtgctgaaggacctgggcatccaggtggataggtacattgcctccgaggtgtgcgaggactccatcaccgtgggaatggtgcgtcatcagggcaagatcatgtacgtgggcgacgtgcggagcgtgacacagaagcatatccaggagtggggccctttcgacctggtgatcggcggcagcccttgcaatgacctgagcatcgtgaacccagcccggaagggcctgtacgagggaaccggcagactgttcttcgagttttacagactgctgcacgacgcccggcctaaggaaggcgacgaccggcccttcttttggctgttcgagaatgtggtggccatgggagtcagcgacaagcgggatattagccggttcctggagagcaaccccgtgatgatcgatgccaaggaagtgagcgccgcccaccgggccagatacttctggggcaatctgcctggcatgaacagacccctggccagcaccgtgaacgacaagctggagctgcaggagtgcctggagcacggccggatcgccaagttcagcaaggtgagaaccatcaccacccgaagcaacagcatcaaacaaggcaaggaccagcactttcctgtgttcatgaacgagaaggaggacatcctgtggtgtaccgagatggagagagtgttcgggttcccagtccactacacagatgtcagcaacatgtctagactggccagacagagactgctgggaagaagctggtccgtccctgtgatcagacacctgttcgcccctctgaaggagtacttcgcctgcgtgagcagcggcaacagcaacgccaacagccggggccccagcttctctagcggcctggtgccactgtccctgagagggagccacatgggccccatggagatctacaaaaccgtgagcgcctggaagcggcagcctgtgcgcgtgctgagcctgtttcggaatatcgataaagtcctgaaaagcctgggattcctggagagcggctctggctccggcggtggcaccctgaagtacgtggaggatgtgacaaacgtggtcagacgggatgtggagaagtggggccccttcgatctggtgtacggcagcacccaacccctgggcagctcttgtgaccggtgccctggctggtacatgtttcagttccaccggatcctgcagtacgccctgccgagacaggagtcccagcggccattcttttggattttcatggacaacttgctgctgaccgaggatgaccaggaaactaccactcggttcctgcagaccgaagccgtgaccctgcaggacgtgagaggccgggactaccagaacgccatgcgggtgtggtccaacatccctggactgaaaagcaagcacgcacctctgacccctaaagaagaggagtacctgcaggcccaggtgcggagcagaagcaagctggacgcccctaaggtggatctgctggtgaagaattgcctcctgcccctgagagagtacttcaagtatttcagccagaatagtctgcccctgggaggcagcggcggcggcgccctggtgacatttgaggacgtcgccgtgcggttcacccaggaggaatgggctctgctggatccttctcagaaaatcctgtaccgggacgtgatgagagagacataccggaatctgacctccgtgggcatcaactgggaatgttgggaccttgaagcctgcttcagaagcctgggaagaaacctgagagtgcaggtggtgaagagaaagtgcgagctgaccaacagcggcccctgcgccgagggcggcccaagcagcggcgcccctcctcccagcggcggcagcccagccggctccccaacctctaccgaggagggcacctctgagtccgccacccccgagagcggccctggcacctccaccgagcccagcgagggcagcgcacccggcagccctgccggcagccccacctccacagaggagggaaccagcaccgagcccagcgaaggcagcgccccaggcaccagcaccgagcctagtgagcaggagattaaacggatcaacaagatcagaagaagacttgtgaaagacagcaacaccaagaaggccggcaagacaggccccatgaaaaccctgctggttagagtgatgacacccgatctgagagagcggctggaaaacctgagaaagaagcctgaaaatatcccccagcccatcagcaatacatctagagccaacctgaataagctgctgaccgattacaccgaaatgaagaaggcgatcctgcatgtgtactgggaagagttccagaaggaccctgtgggcctgatgagccgggtggcccagcctgccagcaagaagatcgatcagaacaagctgaaacctgagatggacgagaagggcaacctgaccaccgccggctttgcctgctctcagtgtggccagcccctgttcgtgtacaagctggagcaggtgtctgagaagggcaaggcttacaccaactacttcggacggtgcaatgtggccgagcacgaaaagctgatcctgctggcccagctgaagcccgagaaggatagcgacgaagccgtgacatatagcctgggaaagtttgggcagagggccctggatttctacagcattcatgtgaccaaggagtccacccaccccgtgaagcccctggcccagatcgccggaaacagatacgcctccggacctgtgggaaaggccctgagcgacgcatgtatgggcacaatcgcctccttcctgtctaagtaccaggacatcatcatcgaacaccagaaggtggtgaagggcaaccagaagagactggagagcctgcgggagctggccggcaaggaaaacctggaataccctagcgtgaccctgccacctcagcctcacaccaaggagggcgttgatgcctacaacgaagtgatcgcccgggtgcgaatgtgggtgaacctgaacctgtggcagaagctgaagctaagcagagatgatgccaagcctctgctgagactgaagggattcccttcctttcctctggtcgagagacaggccaacgaagtggactggtgggacatggtgtgtaacgtgaagaagctgatcaacgagaaaaaggaggatggcaaggtgttttggcagaatctggctggctacaagagacaggaagccctgagaccatacctgagcagcgaggaagatcggaagaagggaaagaaattcgctcggtaccagctgggcgacctgctgctgcacctggaaaagaagcacggcgaggactggggaaaggtgtacgacgaggcctgggagcggattgacaagaaagtggaaggcctgagcaagcacatcaagctggaagaggaacggagaagcgaggacgcccagagcaaggccgccctgaccgactggctgcgggctaaggccagcttcgtgatcgagggcctgaaggaggccgacaaggacgagttctgcagatgcgagctgaagctgcagaagtggtacggggacctgcggggaaagcccttcgccatcgaagccgagaacagcatcctggacatcagcggcttcagcaagcagtacaactgtgccttcatctggcagaaggacggcgtgaagaagctgaacctgtacctgatcatcaactacttcaagggcggcaagctgcggttcaagaagatcaaacctgaagccttcgaagccaacagattctacaccgtgatcaacaaaaagagcggcgagatcgtgcccatggaggtgaacttcaacttcgacgaccccaacctgatcatcctgcctctggcctttggcaagagacagggcagagaattcatctggaacgacctgctgtccctggaaaccggcagcctgaagctggccaacggaagagtgatcgagaagacactgtacaacagaagaacccggcaggatgagcctgccctgttcgtggccctgaccttcgagcggcgggaggtcctggactcctccaatatcaaaccaatgaacctgatcggcgtggcaagaggcgaaaacatccccgccgtgatcgccctgaccgaccccgagggctgcccactgagccggtttaaggatagcctgggaaacccaacccacatcctgagaatcggcgagagctataaggagaagcagcggaccatccaggccaagaaggaggtggagcagcggagagccggcggctacagccggaagtacgccagcaaagccaagaatctggcagacgatatggtgagaaacaccgctagagatctgctgtactacgccgtgacccaggatgccatgctgatcttcgccaacctgagccggggcttcggccggcagggcaagcggaccttcatggccgagagacagtacacacggatggaggactggctgaccgccaagctggcctacgagggcctgagcaagacctacctgtccaagacactggcccagtacacctccaagacatgcagcaactgtgggtttaccatcaccagcgccgactacgacagggtgctggagaagctgaagaagacagcaacaggctggatgaccacaattaacggcaaggagctgaaggtggagggccagattacctactacaacagatacaagagacagaacgtagtcaaggacctgtccgtcgagctggatagactgagcgaagaatctgtgaacaacgacatctcctcctggacaaagggcagaagcggagaagctctgagcctcctgaagaaaagattctcccatagacccgtgcaggagaagttcgtgtgcctgaactgcggcttcgagacacacgcagccgagcaagccgccctgaacatcgccagatcctggctgttcctgcggagccaggagtacaagaaataccagacaaacaagacaaccggcaacaccgataagagagccttcgtcgagacctggcagtccttttaccggaagaagcttaaggaggtgtggaaacctgccgtgcggtctggcggatctggcggaggctccatggccgccgtgagccccaccaccaggtgccaggagagcgtgaccttcgaggacgtggccgtggtgttcaccgacgaggagtggagccacctggtgcccatccagagggacctgtacaaggaggtgatgctggagaactacaacagcatcgtgagcctgggcctgcccgtgccccagcccgacgtgatcttccagctgaagaggggcgacaagccctgggtggtggacctgcacggcagcgagggcggcccaagcagcggcgcccctcctcccagcggcggcagcccagccggctccccaacctctaccgaggagggcacctctgagtccgccacccccgagagcggccctggcacctccaccgagcccagcgagggcagcgcacccggcagccctgccggcagccccacctccacagaggagggaaccagcaccgagcccagcgaaggcagcgccccaggcaccagcaccgagcctagtgagcaggagattaaacggatcaacaagatcagaagaagacttgtgaaagacagcaacaccaagaaggccggcaagacaggccccatgaaaaccctgctggttagagtgatgacacccgatctgagagagcggctggaaaacctgagaaagaagcctgaaaatatcccccagcccatcagcaatacatctagagccaacctgaataagctgctgaccgattacaccgaaatgaagaaggcgatcctgcatgtgtactgggaagagttccagaaggaccctgtgggcctgatgagccgggtggcccagcctgccagcaagaagatcgatcagaacaagctgaaacctgagatggacgagaagggcaacctgaccaccgccggctttgcctgctctcagtgtggccagcccctgttcgtgtacaagctggagcaggtgtctgagaagggcaaggcttacaccaactacttcggacggtgcaatgtggccgagcacgaaaagctgatcctgctggcccagctgaagcccgagaaggatagcgacgaagccgtgacatatagcctgggaaagtttgggcagagggccctggatttctacagcattcatgtgaccaaggagtccacccaccccgtgaagcccctggcccagatcgccggaaacagatacgcctccggacctgtgggaaaggccctgagcgacgcatgtatgggcacaatcgcctccttcctgtctaagtaccaggacatcatcatcgaacaccagaaggtggtgaagggcaaccagaagagactggagagcctgcgggagctggccggcaaggaaaacctggaataccctagcgtgaccctgccacctcagcctcacaccaaggagggcgttgatgcctacaacgaagtgatcgcccgggtgcgaatgtgggtgaacctgaacctgtggcagaagctgaagctaagcagagatgatgccaagcctctgctgagactgaagggattcccttcctttcctctggtcgagagacaggccaacgaagtggactggtgggacatggtgtgtaacgtgaagaagctgatcaacgagaaaaaggaggatggcaaggtgttttggcagaatctggctggctacaagagacaggaagccctgagaccatacctgagcagcgaggaagatcggaagaagggaaagaaattcgctcggtaccagctgggcgacctgctgctgcacctggaaaagaagcacggcgaggactggggaaaggtgtacgacgaggcctgggagcggattgacaagaaagtggaaggcctgagcaagcacatcaagctggaagaggaacggagaagcgaggacgcccagagcaaggccgccctgaccgactggctgcgggctaaggccagcttcgtgatcgagggcctgaaggaggccgacaaggacgagttctgcagatgcgagctgaagctgcagaagtggtacggggacctgcggggaaagcccttcgccatcgaagccgagaacagcatcctggacatcagcggcttcagcaagcagtacaactgtgccttcatctggcagaaggacggcgtgaagaagctgaacctgtacctgatcatcaactacttcaagggcggcaagctgcggttcaagaagatcaaacctgaagccttcgaagccaacagattctacaccgtgatcaacaaaaagagcggcgagatcgtgcccatggaggtgaacttcaacttcgacgaccccaacctgatcatcctgcctctggcctttggcaagagacagggcagagaattcatctggaacgacctgctgtccctggaaaccggcagcctgaagctggccaacggaagagtgatcgagaagacactgtacaacagaagaacccggcaggatgagcctgccctgttcgtggccctgaccttcgagcggcgggaggtcctggactcctccaatatcaaaccaatgaacctgatcggcgtggcaagaggcgaaaacatccccgccgtgatcgccctgaccgaccccgagggctgcccactgagccggtttaaggatagcctgggaaacccaacccacatcctgagaatcggcgagagctataaggagaagcagcggaccatccaggccaagaaggaggtggagcagcggagagccggcggctacagccggaagtacgccagcaaagccaagaatctggcagacgatatggtgagaaacaccgctagagatctgctgtactacgccgtgacccaggatgccatgctgatcttcgccaacctgagccggggcttcggccggcagggcaagcggaccttcatggccgagagacagtacacacggatggaggactggctgaccgccaagctggcctacgagggcctgagcaagacctacctgtccaagacactggcccagtacacctccaagacatgcagcaactgtgggtttaccatcaccagcgccgactacgacagggtgctggagaagctgaagaagacagcaacaggctggatgaccacaattaacggcaaggagctgaaggtggagggccagattacctactacaacagatacaagagacagaacgtagtcaaggacctgtccgtcgagctggatagactgagcgaagaatctgtgaacaacgacatctcctcctggacaaagggcagaagcggagaagctctgagcctcctgaagaaaagattctcccatagacccgtgcaggagaagttcgtgtgcctgaactgcggcttcgagacacacgcagccgagcaagccgccctgaacatcgccagatcctggctgttcctgcggagccaggagtacaagaaataccagacaaacaagacaaccggcaacaccgataagagagccttcgtcgagacctggcagtccttttaccggaagaagcttaaggaggtgtggaaacctgccgtgcggtctggcggatctggcggaggctcctatggccgccgtgagccccaccaccaggtgccaggagagcgtgaccttcgaggacgtggccgtggtgttcaccgacgaggagtggagccacctggtgcccatccagagggacctgtacaaggaggtgatgctggagaactacaacagcatcgtgagcctgggcctgcccgtgccccagcccgacgtgatcttccagctgaagaggggcgacaagccctgggtggtggacctgcacggcagcgagggatctggctccggcagcggccccaagaaaaagagaaaagtctaagctgccttctgcggggcttgccttctggccatgcccttcttctctcccttgcacctgtacctcttggtctttgaataaagcctgagtaggaaggctagcaaaaaaaaaaaaaaaaaaaaaaaaaaaaaaaaaaaaaaaaaaaaaaaaaaaaaaaaaaaaaaaaaaaaaaaaaaaaaaaa

SEQ ID NO: 16459 - RNA, 9485 nt, synthetic construct
  source 1..9485: mol_type = other RNA
aggaaataagagagaaaagaagagtaagaagaaatataagagccaccatggcccctaagaagaagcgtaaagtgagccggatggaacgcctcgtctacgaggtgcggcagaagtgcagaaacatcgaggacatctgcatctcctgcggatctctgaacgtgaccctggagcacccactgttcatcggcggcatgtgccagaactgtaaaaactgttttctggagtgtgcctatcaatacgacgatgacggctaccagagctactgcaccatctgttgcggcggaagagaggtgctgatgtgtggaaataacaactgctgccggtgcttctgcgtggaatgcgtggacctgctggtgggccccggcgccgcccaggccgctattaaggaagatccttggaactgctacatgtgcggccacaagggcacatacggcctgctgagacggagagaggactggcctagcagactgcagatgttcttcgccaataaccacgaccaggagttcgacccccctaaggtgtaccctcccgtccccgccgagaagagaaagcccatccgggtcctgagcctgttcgatggcatcgccaccggtctgctggtgctgaaggacctgggcatccaggtggataggtacattgcctccgaggtgtgcgaggactccatcaccgtgggaatggtgcgtcatcagggcaagatcatgtacgtgggcgacgtgcggagcgtgacacagaagcatatccaggagtggggccctttcgacctggtgatcggcggcagcccttgcaatgacctgagcatcgtgaacccagcccggaagggcctgtacgagggaaccggcagactgttcttcgagttttacagactgctgcacgacgcccggcctaaggaaggcgacgaccggcccttcttttggctgttcgagaatgtggtggccatgggagtcagcgacaagcgggatattagccggttcctggagagcaaccccgtgatgatcgatgccaaggaagtgagcgccgcccaccgggccagatacttctggggcaatctgcctggcatgaacagacccctggccagcaccgtgaacgacaagctggagctgcaggagtgcctggagcacggccggatcgccaagttcagcaaggtgagaaccatcaccacccgaagcaacagcatcaaacaaggcaaggaccagcactttcctgtgttcatgaacgagaaggaggacatcctgtggtgtaccgagatggagagagtgttcgggttcccagtccactacacagatgtcagcaacatgtctagactggccagacagagactgctgggaagaagctggtccgtccctgtgatcagacacctgttcgcccctctgaaggagtacttcgcctgcgtgagcagcggcaacagcaacgccaacagccggggccccagcttctctagcggcctggtgccactgtccctgagagggagccacatgggccccatggagatctacaaaaccgtgagcgcctggaagcggcagcctgtgcgcgtgctgagcctgtttcggaatatcgataaagtcctgaaaagcctgggattcctggagagcggctctggctccggcggtggcaccctgaagtacgtggaggatgtgacaaacgtggtcagacgggatgtggagaagtggggccccttcgatctggtgtacggcagcacccaacccctgggcagctcttgtgaccggtgccctggctggtacatgtttcagttccaccggatcctgcagtacgccctgccgagacaggagtcccagcggccattcttttggattttcatggacaacttgctgctgaccgaggatgaccaggaaactaccactcggttcctgcagaccgaagccgtgaccctgcaggacgtgagaggccgggactaccagaacgccatgcgggtgtggtccaacatccctggactgaaaagcaagcacgcacctctgacccctaaagaagaggagtacctgcaggcccaggtgcggagcagaagcaagctggacgcccctaaggtggatctgctggtgaagaattgcctcctgcccctgagagagtacttcaagtatttcagccagaatagtctgcccctgggaggcagcggcggcggcgccctggtgacatttgaggacgtcgccgtgcggttcacccaggaggaatgggctctgctggatccttctcagaaaatcctgtaccgggacgtgatgagagagacataccggaatctgacctccgtgggcatcaactgggaatgttgggaccttgaagcctgcttcagaagcctgggaagaaacctgagagtgcaggtggtgaagagaaagtgcgagctgaccaacagcggcccctgcgccgagggcggcccaagcagcggcgcccctcctcccagcggcggcagcccagccggctccccaacctctaccgaggagggcacctctgagtccgccacccccgagagcggccctggcacctccaccgagcccagcgagggcagcgcacccggcagccctgccggcagccccacctccacagaggagggaaccagcaccgagcccagcgaaggcagcgccccaggcaccagcaccgagcctagtgagcaggagattaaacggatcaacaagatcagaagaagacttgtgaaagacagcaacaccaagaaggccggcaagacaggccccatgaaaaccctgctggttagagtgatgacacccgatctgagagagcggctggaaaacctgagaaagaagcctgaaaatatcccccagcccatcagcaatacatctagagccaacctgaataagctgctgaccgattacaccgaaatgaagaaggcgatcctgcatgtgtactgggaagagttccagaaggaccctgtgggcctgatgagccgggtggcccagcctgccagcaagaagatcgatcagaacaagctgaaacctgagatggacgagaagggcaacctgaccaccgccggctttgcctgctctcagtgtggccagcccctgttcgtgtacaagctggagcaggtgtctgagaagggcaaggcttacaccaactacttcggacggtgcaatgtggccgagcacgaaaagctgatcctgctggcccagctgaagcccgagaaggatagcgacgaagccgtgacatatagcctgggaaagtttgggcagagggccctggatttctacagcattcatgtgaccaaggagtccacccaccccgtgaagcccctggcccagatcgccggaaacagatacgcctccggacctgtgggaaaggccctgagcgacgcatgtatgggcacaatcgcctccttcctgtctaagtaccaggacatcatcatcgaacaccagaaggtggtgaagggcaaccagaagagactggagagcctgcgggagctggccggcaaggaaaacctggaataccctagcgtgaccctgccacctcagcctcacaccaaggagggcgttgatgcctacaacgaagtgatcgcccgggtgcgaatgtgggtgaacctgaacctgtggcagaagctgaagctaagcagagatgatgccaagcctctgctgagactgaagggattcccttcctttcctctggtcgagagacaggccaacgaagtggactggtgggacatggtgtgtaacgtgaagaagctgatcaacgagaaaaaggaggatggcaaggtgttttggcagaatctggctggctacaagagacaggaagccctgagaccatacctgagcagcgaggaagatcggaagaagggaaagaaattcgctcggtaccagctgggcgacctgctgctgcacctggaaaagaagcacggcgaggactggggaaaggtgtacgacgaggcctgggagcggattgacaagaaagtggaaggcctgagcaagcacatcaagctggaagaggaacggagaagcgaggacgcccagagcaaggccgccctgaccgactggctgcgggctaaggccagcttcgtgatcgagggcctgaaggaggccgacaaggacgagttctgcagatgcgagctgaagctgcagaagtggtacggggacctgcggggaaagcccttcgccatcgaagccgagaacagcatcctggacatcagcggcttcagcaagcagtacaactgtgccttcatctggcagaaggacggcgtgaagaagctgaacctgtacctgatcatcaactacttcaagggcggcaagctgcggttcaagaagatcaaacctgaagccttcgaagccaacagattctacaccgtgatcaacaaaaagagcggcgagatcgtgcccatggaggtgaacttcaacttcgacgaccccaacctgatcatcctgcctctggcctttggcaagagacagggcagagaattcatctggaacgacctgctgtccctggaaaccggcagcctgaagctggccaacggaagagtgatcgagaagacactgtacaacagaagaacccggcaggatgagcctgccctgttcgtggccctgaccttcgagcggcgggaggtcctggactcctccaatatcaaaccaatgaacctgatcggcgtggcaagaggcgaaaacatccccgccgtgatcgccctgaccgaccccgagggctgcccactgagccggtttaaggatagcctgggaaacccaacccacatcctgagaatcggcgagagctataaggagaagcagcggaccatccaggccaagaaggaggtggagcagcggagagccggcggctacagccggaagtacgccagcaaagccaagaatctggcagacgatatggtgagaaacaccgctagagatctgctgtactacgccgtgacccaggatgccatgctgatcttcgccaacctgagccggggcttcggccggcagggcaagcggaccttcatggccgagagacagtacacacggatggaggactggctgaccgccaagctggcctacgagggcctgagcaagacctacctgtccaagacactggcccagtacacctccaagacatgcagcaactgtgggtttaccatcaccagcgccgactacgacagggtgctggagaagctgaagaagacagcaacaggctggatgaccacaattaacggcaaggagctgaaggtggagggccagattacctactacaacagatacaagagacagaacgtagtcaaggacctgtccgtcgagctggatagactgagcgaagaatctgtgaacaacgacatctcctcctggacaaagggcagaagcggagaagctctgagcctcctgaagaaaagattctcccatagacccgtgcaggagaagttcgtgtgcctgaactgcggcttcgagacacacgcagccgagcaagccgccctgaacatcgccagatcctggctgttcctgcggagccaggagtacaagaaataccagacaaacaagacaaccggcaacaccgataagagagccttcgtcgagacctggcagtccttttaccggaagaagcttaaggaggtgtggaaacctgccgtgcggtctggcggatctggcggaggctccttcgagagcgtggtgttcgaggacgtggccgtggacttcacccccgaggagtgggccctgctggaccccgcccagaggaacctgtacagggacgtgatgctggagaccttcaggaacctggccagcgtgggcgagaactggaagtgccacagcatcgaggaccagcacaagaaccagggcacccacctgaggtggagggtggtggagatccccagcgagaacaacgagagcaaccagtgcggcggcggcccaagcagcggcgcccctcctcccagcggcggcagcccagccggctccccaacctctaccgaggagggcacctctgagtccgccacccccgagagcggccctggcacctccaccgagcccagcgagggcagcgcacccggcagccctgccggcagccccacctccacagaggagggaaccagcaccgagcccagcgaaggcagcgccccaggcaccagcaccgagcctagtgagcaggagattaaacggatcaacaagatcagaagaagacttgtgaaagacagcaacaccaagaaggccggcaagacaggccccatgaaaaccctgctggttagagtgatgacacccgatctgagagagcggctggaaaacctgagaaagaagcctgaaaatatcccccagcccatcagcaatacatctagagccaacctgaataagctgctgaccgattacaccgaaatgaagaaggcgatcctgcatgtgtactgggaagagttccagaaggaccctgtgggcctgatgagccgggtggcccagcctgccagcaagaagatcgatcagaacaagctgaaacctgagatggacgagaagggcaacctgaccaccgccggctttgcctgctctcagtgtggccagcccctgttcgtgtacaagctggagcaggtgtctgagaagggcaaggcttacaccaactacttcggacggtgcaatgtggccgagcacgaaaagctgatcctgctggcccagctgaagcccgagaaggatagcgacgaagccgtgacatatagcctgggaaagtttgggcagagggccctggatttctacagcattcatgtgaccaaggagtccacccaccccgtgaagcccctggcccagatcgccggaaacagatacgcctccggacctgtgggaaaggccctgagcgacgcatgtatgggcacaatcgcctccttcctgtctaagtaccaggacatcatcatcgaacaccagaaggtggtgaagggcaaccagaagagactggagagcctgcgggagctggccggcaaggaaaacctggaataccctagcgtgaccctgccacctcagcctcacaccaaggagggcgttgatgcctacaacgaagtgatcgcccgggtgcgaatgtgggtgaacctgaacctgtggcagaagctgaagctaagcagagatgatgccaagcctctgctgagactgaagggattcccttcctttcctctggtcgagagacaggccaacgaagtggactggtgggacatggtgtgtaacgtgaagaagctgatcaacgagaaaaaggaggatggcaaggtgttttggcagaatctggctggctacaagagacaggaagccctgagaccatacctgagcagcgaggaagatcggaagaagggaaagaaattcgctcggtaccagctgggcgacctgctgctgcacctggaaaagaagcacggcgaggactggggaaaggtgtacgacgaggcctgggagcggattgacaagaaagtggaaggcctgagcaagcacatcaagctggaagaggaacggagaagcgaggacgcccagagcaaggccgccctgaccgactggctgcgggctaaggccagcttcgtgatcgagggcctgaaggaggccgacaaggacgagttctgcagatgcgagctgaagctgcagaagtggtacggggacctgcggggaaagcccttcgccatcgaagccgagaacagcatcctggacatcagcggcttcagcaagcagtacaactgtgccttcatctggcagaaggacggcgtgaagaagctgaacctgtacctgatcatcaactacttcaagggcggcaagctgcggttcaagaagatcaaacctgaagccttcgaagccaacagattctacaccgtgatcaacaaaaagagcggcgagatcgtgcccatggaggtgaacttcaacttcgacgaccccaacctgatcatcctgcctctggcctttggcaagagacagggcagagaattcatctggaacgacctgctgtccctggaaaccggcagcctgaagctggccaacggaagagtgatcgagaagacactgtacaacagaagaacccggcaggatgagcctgccctgttcgtggccctgaccttcgagcggcgggaggtcctggactcctccaatatcaaaccaatgaacctgatcggcgtggcaagaggcgaaaacatccccgccgtgatcgccctgaccgaccccgagggctgcccactgagccggtttaaggatagcctgggaaacccaacccacatcctgagaatcggcgagagctataaggagaagcagcggaccatccaggccaagaaggaggtggagcagcggagagccggcggctacagccggaagtacgccagcaaagccaagaatctggcagacgatatggtgagaaacaccgctagagatctgctgtactacgccgtgacccaggatgccatgctgatcttcgccaacctgagccggggcttcggccggcagggcaagcggaccttcatggccgagagacagtacacacggatggaggactggctgaccgccaagctggcctacgagggcctgagcaagacctacctgtccaagacactggcccagtacacctccaagacatgcagcaactgtgggtttaccatcaccagcgccgactacgacagggtgctggagaagctgaagaagacagcaacaggctggatgaccacaattaacggcaaggagctgaaggtggagggccagattacctactacaacagatacaagagacagaacgtagtcaaggacctgtccgtcgagctggatagactgagcgaagaatctgtgaacaacgacatctcctcctggacaaagggcagaagcggagaagctctgagcctcctgaagaaaagattctcccatagacccgtgcaggagaagttcgtgtgcctgaactgcggcttcgagacacacgcagccgagcaagccgccctgaacatcgccagatcctggctgttcctgcggagccaggagtacaagaaataccagacaaacaagacaaccggcaacaccgataagagagccttcgtcgagacctggcagtccttttaccggaagaagcttaaggaggtgtggaaacctgccgtgcggtctggcggatctggcggaggctcctttcgagagcgtggtgttcgaggacgtggccgtggacttcacccccgaggagtgggccctgctggaccccgcccagaggaacctgtacagggacgtgatgctggagaccttcaggaacctggccagcgtgggcgagaactggaagtgccacagcatcgaggaccagcacaagaaccagggcacccacctgaggtggagggtggtggagatccccagcgagaacaacgagagcaaccagtgcggcggatctggctccggcagcggccccaagaaaaagagaaaagtctaagctgccttctgcggggcttgccttctggccatgcccttcttctctcccttgcacctgtacctcttggtctttgaataaagcctgagtaggaaggctagcaaaaaaaaaaaaaaaaaaaaaaaaaaaaaaaaaaaaaaaaaaaaaaaaaaaaaaaaaaaaaaaaaaaaaaaaaaaaaaaa

SEQ ID NO: 16460 - RNA, 9485 nt, synthetic construct
  source 1..9485: mol_type = other RNA
aggaaataagagagaaaagaagagtaagaagaaatataagagccaccatggcccctaagaagaagcgtaaagtgagccggatggaacgcctcgtctacgaggtgcggcagaagtgcagaaacatcgaggacatctgcatctcctgcggatctctgaacgtgaccctggagcacccactgttcatcggcggcatgtgccagaactgtaaaaactgttttctggagtgtgcctatcaatacgacgatgacggctaccagagctactgcaccatctgttgcggcggaagagaggtgctgatgtgtggaaataacaactgctgccggtgcttctgcgtggaatgcgtggacctgctggtgggccccggcgccgcccaggccgctattaaggaagatccttggaactgctacatgtgcggccacaagggcacatacggcctgctgagacggagagaggactggcctagcagactgcagatgttcttcgccaataaccacgaccaggagttcgacccccctaaggtgtaccctcccgtccccgccgagaagagaaagcccatccgggtcctgagcctgttcgatggcatcgccaccggtctgctggtgctgaaggacctgggcatccaggtggataggtacattgcctccgaggtgtgcgaggactccatcaccgtgggaatggtgcgtcatcagggcaagatcatgtacgtgggcgacgtgcggagcgtgacacagaagcatatccaggagtggggccctttcgacctggtgatcggcggcagcccttgcaatgacctgagcatcgtgaacccagcccggaagggcctgtacgagggaaccggcagactgttcttcgagttttacagactgctgcacgacgcccggcctaaggaaggcgacgaccggcccttcttttggctgttcgagaatgtggtggccatgggagtcagcgacaagcgggatattagccggttcctggagagcaaccccgtgatgatcgatgccaaggaagtgagcgccgcccaccgggccagatacttctggggcaatctgcctggcatgaacagacccctggccagcaccgtgaacgacaagctggagctgcaggagtgcctggagcacggccggatcgccaagttcagcaaggtgagaaccatcaccacccgaagcaacagcatcaaacaaggcaaggaccagcactttcctgtgttcatgaacgagaaggaggacatcctgtggtgtaccgagatggagagagtgttcgggttcccagtccactacacagatgtcagcaacatgtctagactggccagacagagactgctgggaagaagctggtccgtccctgtgatcagacacctgttcgcccctctgaaggagtacttcgcctgcgtgagcagcggcaacagcaacgccaacagccggggccccagcttctctagcggcctggtgccactgtccctgagagggagccacatgggccccatggagatctacaaaaccgtgagcgcctggaagcggcagcctgtgcgcgtgctgagcctgtttcggaatatcgataaagtcctgaaaagcctgggattcctggagagcggctctggctccggcggtggcaccctgaagtacgtggaggatgtgacaaacgtggtcagacgggatgtggagaagtggggccccttcgatctggtgtacggcagcacccaacccctgggcagctcttgtgaccggtgccctggctggtacatgtttcagttccaccggatcctgcagtacgccctgccgagacaggagtcccagcggccattcttttggattttcatggacaacttgctgctgaccgaggatgaccaggaaactaccactcggttcctgcagaccgaagccgtgaccctgcaggacgtgagaggccgggactaccagaacgccatgcgggtgtggtccaacatccctggactgaaaagcaagcacgcacctctgacccctaaagaagaggagtacctgcaggcccaggtgcggagcagaagcaagctggacgcccctaaggtggatctgctggtgaagaattgcctcctgcccctgagagagtacttcaagtatttcagccagaatagtctgcccctgggaggcagcggcggcggcgccctggtgacatttgaggacgtcgccgtgcggttcacccaggaggaatgggctctgctggatccttctcagaaaatcctgtaccgggacgtgatgagagagacataccggaatctgacctccgtgggcatcaactgggaatgttgggaccttgaagcctgcttcagaagcctgggaagaaacctgagagtgcaggtggtgaagagaaagtgcgagctgaccaacagcggcccctgcgccgagggcggcccaagcagcggcgcccctcctcccagcggcggcagcccagccggctccccaacctctaccgaggagggcacctctgagtccgccacccccgagagcggccctggcacctccaccgagcccagcgagggcagcgcacccggcagccctgccggcagccccacctccacagaggagggaaccagcaccgagcccagcgaaggcagcgccccaggcaccagcaccgagcctagtgagcaggagattaaacggatcaacaagatcagaagaagacttgtgaaagacagcaacaccaagaaggccggcaagacaggccccatgaaaaccctgctggttagagtgatgacacccgatctgagagagcggctggaaaacctgagaaagaagcctgaaaatatcccccagcccatcagcaatacatctagagccaacctgaataagctgctgaccgattacaccgaaatgaagaaggcgatcctgcatgtgtactgggaagagttccagaaggaccctgtgggcctgatgagccgggtggcccagcctgccagcaagaagatcgatcagaacaagctgaaacctgagatggacgagaagggcaacctgaccaccgccggctttgcctgctctcagtgtggccagcccctgttcgtgtacaagctggagcaggtgtctgagaagggcaaggcttacaccaactacttcggacggtgcaatgtggccgagcacgaaaagctgatcctgctggcccagctgaagcccgagaaggatagcgacgaagccgtgacatatagcctgggaaagtttgggcagagggccctggatttctacagcattcatgtgaccaaggagtccacccaccccgtgaagcccctggcccagatcgccggaaacagatacgcctccggacctgtgggaaaggccctgagcgacgcatgtatgggcacaatcgcctccttcctgtctaagtaccaggacatcatcatcgaacaccagaaggtggtgaagggcaaccagaagagactggagagcctgcgggagctggccggcaaggaaaacctggaataccctagcgtgaccctgccacctcagcctcacaccaaggagggcgttgatgcctacaacgaagtgatcgcccgggtgcgaatgtgggtgaacctgaacctgtggcagaagctgaagctaagcagagatgatgccaagcctctgctgagactgaagggattcccttcctttcctctggtcgagagacaggccaacgaagtggactggtgggacatggtgtgtaacgtgaagaagctgatcaacgagaaaaaggaggatggcaaggtgttttggcagaatctggctggctacaagagacaggaagccctgagaccatacctgagcagcgaggaagatcggaagaagggaaagaaattcgctcggtaccagctgggcgacctgctgctgcacctggaaaagaagcacggcgaggactggggaaaggtgtacgacgaggcctgggagcggattgacaagaaagtggaaggcctgagcaagcacatcaagctggaagaggaacggagaagcgaggacgcccagagcaaggccgccctgaccgactggctgcgggctaaggccagcttcgtgatcgagggcctgaaggaggccgacaaggacgagttctgcagatgcgagctgaagctgcagaagtggtacggggacctgcggggaaagcccttcgccatcgaagccgagaacagcatcctggacatcagcggcttcagcaagcagtacaactgtgccttcatctggcagaaggacggcgtgaagaagctgaacctgtacctgatcatcaactacttcaagggcggcaagctgcggttcaagaagatcaaacctgaagccttcgaagccaacagattctacaccgtgatcaacaaaaagagcggcgagatcgtgcccatggaggtgaacttcaacttcgacgaccccaacctgatcatcctgcctctggcctttggcaagagacagggcagagaattcatctggaacgacctgctgtccctggaaaccggcagcctgaagctggccaacggaagagtgatcgagaagacactgtacaacagaagaacccggcaggatgagcctgccctgttcgtggccctgaccttcgagcggcgggaggtcctggactcctccaatatcaaaccaatgaacctgatcggcgtggcaagaggcgaaaacatccccgccgtgatcgccctgaccgaccccgagggctgcccactgagccggtttaaggatagcctgggaaacccaacccacatcctgagaatcggcgagagctataaggagaagcagcggaccatccaggccaagaaggaggtggagcagcggagagccggcggctacagccggaagtacgccagcaaagccaagaatctggcagacgatatggtgagaaacaccgctagagatctgctgtactacgccgtgacccaggatgccatgctgatcttcgccaacctgagccggggcttcggccggcagggcaagcggaccttcatggccgagagacagtacacacggatggaggactggctgaccgccaagctggcctacgagggcctgagcaagacctacctgtccaagacactggcccagtacacctccaagacatgcagcaactgtgggtttaccatcaccagcgccgactacgacagggtgctggagaagctgaagaagacagcaacaggctggatgaccacaattaacggcaaggagctgaaggtggagggccagattacctactacaacagatacaagagacagaacgtagtcaaggacctgtccgtcgagctggatagactgagcgaagaatctgtgaacaacgacatctcctcctggacaaagggcagaagcggagaagctctgagcctcctgaagaaaagattctcccatagacccgtgcaggagaagttcgtgtgcctgaactgcggcttcgagacacacgcagccgagcaagccgccctgaacatcgccagatcctggctgttcctgcggagccaggagtacaagaaataccagacaaacaagacaaccggcaacaccgataagagagccttcgtcgagacctggcagtccttttaccggaagaagcttaaggaggtgtggaaacctgccgtgcggtctggcggatctggcggaggctccaggcccagggccctgaagttcgccgacgtggccgtgtacttcagccccgaggagtggggctgcctgaggcccgcccagaggctgctgtacagggaggtgatgagggagacctacggcctgctgggcgccctgggctgcgccggccccacccccgccctgatcagctggctggagaggaacaccgacgactgggagcccgccgccctggacccccaggagtacaggaggtgggccaccttccagggcggcccaagcagcggcgcccctcctcccagcggcggcagcccagccggctccccaacctctaccgaggagggcacctctgagtccgccacccccgagagcggccctggcacctccaccgagcccagcgagggcagcgcacccggcagccctgccggcagccccacctccacagaggagggaaccagcaccgagcccagcgaaggcagcgccccaggcaccagcaccgagcctagtgagcaggagattaaacggatcaacaagatcagaagaagacttgtgaaagacagcaacaccaagaaggccggcaagacaggccccatgaaaaccctgctggttagagtgatgacacccgatctgagagagcggctggaaaacctgagaaagaagcctgaaaatatcccccagcccatcagcaatacatctagagccaacctgaataagctgctgaccgattacaccgaaatgaagaaggcgatcctgcatgtgtactgggaagagttccagaaggaccctgtgggcctgatgagccgggtggcccagcctgccagcaagaagatcgatcagaacaagctgaaacctgagatggacgagaagggcaacctgaccaccgccggctttgcctgctctcagtgtggccagcccctgttcgtgtacaagctggagcaggtgtctgagaagggcaaggcttacaccaactacttcggacggtgcaatgtggccgagcacgaaaagctgatcctgctggcccagctgaagcccgagaaggatagcgacgaagccgtgacatatagcctgggaaagtttgggcagagggccctggatttctacagcattcatgtgaccaaggagtccacccaccccgtgaagcccctggcccagatcgccggaaacagatacgcctccggacctgtgggaaaggccctgagcgacgcatgtatgggcacaatcgcctccttcctgtctaagtaccaggacatcatcatcgaacaccagaaggtggtgaagggcaaccagaagagactggagagcctgcgggagctggccggcaaggaaaacctggaataccctagcgtgaccctgccacctcagcctcacaccaaggagggcgttgatgcctacaacgaagtgatcgcccgggtgcgaatgtgggtgaacctgaacctgtggcagaagctgaagctaagcagagatgatgccaagcctctgctgagactgaagggattcccttcctttcctctggtcgagagacaggccaacgaagtggactggtgggacatggtgtgtaacgtgaagaagctgatcaacgagaaaaaggaggatggcaaggtgttttggcagaatctggctggctacaagagacaggaagccctgagaccatacctgagcagcgaggaagatcggaagaagggaaagaaattcgctcggtaccagctgggcgacctgctgctgcacctggaaaagaagcacggcgaggactggggaaaggtgtacgacgaggcctgggagcggattgacaagaaagtggaaggcctgagcaagcacatcaagctggaagaggaacggagaagcgaggacgcccagagcaaggccgccctgaccgactggctgcgggctaaggccagcttcgtgatcgagggcctgaaggaggccgacaaggacgagttctgcagatgcgagctgaagctgcagaagtggtacggggacctgcggggaaagcccttcgccatcgaagccgagaacagcatcctggacatcagcggcttcagcaagcagtacaactgtgccttcatctggcagaaggacggcgtgaagaagctgaacctgtacctgatcatcaactacttcaagggcggcaagctgcggttcaagaagatcaaacctgaagccttcgaagccaacagattctacaccgtgatcaacaaaaagagcggcgagatcgtgcccatggaggtgaacttcaacttcgacgaccccaacctgatcatcctgcctctggcctttggcaagagacagggcagagaattcatctggaacgacctgctgtccctggaaaccggcagcctgaagctggccaacggaagagtgatcgagaagacactgtacaacagaagaacccggcaggatgagcctgccctgttcgtggccctgaccttcgagcggcgggaggtcctggactcctccaatatcaaaccaatgaacctgatcggcgtggcaagaggcgaaaacatccccgccgtgatcgccctgaccgaccccgagggctgcccactgagccggtttaaggatagcctgggaaacccaacccacatcctgagaatcggcgagagctataaggagaagcagcggaccatccaggccaagaaggaggtggagcagcggagagccggcggctacagccggaagtacgccagcaaagccaagaatctggcagacgatatggtgagaaacaccgctagagatctgctgtactacgccgtgacccaggatgccatgctgatcttcgccaacctgagccggggcttcggccggcagggcaagcggaccttcatggccgagagacagtacacacggatggaggactggctgaccgccaagctggcctacgagggcctgagcaagacctacctgtccaagacactggcccagtacacctccaagacatgcagcaactgtgggtttaccatcaccagcgccgactacgacagggtgctggagaagctgaagaagacagcaacaggctggatgaccacaattaacggcaaggagctgaaggtggagggccagattacctactacaacagatacaagagacagaacgtagtcaaggacctgtccgtcgagctggatagactgagcgaagaatctgtgaacaacgacatctcctcctggacaaagggcagaagcggagaagctctgagcctcctgaagaaaagattctcccatagacccgtgcaggagaagttcgtgtgcctgaactgcggcttcgagacacacgcagccgagcaagccgccctgaacatcgccagatcctggctgttcctgcggagccaggagtacaagaaataccagacaaacaagacaaccggcaacaccgataagagagccttcgtcgagacctggcagtccttttaccggaagaagcttaaggaggtgtggaaacctgccgtgcggtctggcggatctggcggaggctcctaggcccagggccctgaagttcgccgacgtggccgtgtacttcagccccgaggagtggggctgcctgaggcccgcccagaggctgctgtacagggaggtgatgagggagacctacggcctgctgggcgccctgggctgcgccggccccacccccgccctgatcagctggctggagaggaacaccgacgactgggagcccgccgccctggacccccaggagtacaggaggtgggccaccttccagggatctggctccggcagcggccccaagaaaaagagaaaagtctaagctgccttctgcggggcttgccttctggccatgcccttcttctctcccttgcacctgtacctcttggtctttgaataaagcctgagtaggaaggctagcaaaaaaaaaaaaaaaaaaaaaaaaaaaaaaaaaaaaaaaaaaaaaaaaaaaaaaaaaaaaaaaaaaaaaaaaaaaaaaaa

SEQ ID NO: 16461 - RNA, 9485 nt, synthetic construct
  source 1..9485: mol_type = other RNA
aggaaataagagagaaaagaagagtaagaagaaatataagagccaccatggcccctaagaagaagcgtaaagtgagccggatggaacgcctcgtctacgaggtgcggcagaagtgcagaaacatcgaggacatctgcatctcctgcggatctctgaacgtgaccctggagcacccactgttcatcggcggcatgtgccagaactgtaaaaactgttttctggagtgtgcctatcaatacgacgatgacggctaccagagctactgcaccatctgttgcggcggaagagaggtgctgatgtgtggaaataacaactgctgccggtgcttctgcgtggaatgcgtggacctgctggtgggccccggcgccgcccaggccgctattaaggaagatccttggaactgctacatgtgcggccacaagggcacatacggcctgctgagacggagagaggactggcctagcagactgcagatgttcttcgccaataaccacgaccaggagttcgacccccctaaggtgtaccctcccgtccccgccgagaagagaaagcccatccgggtcctgagcctgttcgatggcatcgccaccggtctgctggtgctgaaggacctgggcatccaggtggataggtacattgcctccgaggtgtgcgaggactccatcaccgtgggaatggtgcgtcatcagggcaagatcatgtacgtgggcgacgtgcggagcgtgacacagaagcatatccaggagtggggccctttcgacctggtgatcggcggcagcccttgcaatgacctgagcatcgtgaacccagcccggaagggcctgtacgagggaaccggcagactgttcttcgagttttacagactgctgcacgacgcccggcctaaggaaggcgacgaccggcccttcttttggctgttcgagaatgtggtggccatgggagtcagcgacaagcgggatattagccggttcctggagagcaaccccgtgatgatcgatgccaaggaagtgagcgccgcccaccgggccagatacttctggggcaatctgcctggcatgaacagacccctggccagcaccgtgaacgacaagctggagctgcaggagtgcctggagcacggccggatcgccaagttcagcaaggtgagaaccatcaccacccgaagcaacagcatcaaacaaggcaaggaccagcactttcctgtgttcatgaacgagaaggaggacatcctgtggtgtaccgagatggagagagtgttcgggttcccagtccactacacagatgtcagcaacatgtctagactggccagacagagactgctgggaagaagctggtccgtccctgtgatcagacacctgttcgcccctctgaaggagtacttcgcctgcgtgagcagcggcaacagcaacgccaacagccggggccccagcttctctagcggcctggtgccactgtccctgagagggagccacatgggccccatggagatctacaaaaccgtgagcgcctggaagcggcagcctgtgcgcgtgctgagcctgtttcggaatatcgataaagtcctgaaaagcctgggattcctggagagcggctctggctccggcggtggcaccctgaagtacgtggaggatgtgacaaacgtggtcagacgggatgtggagaagtggggccccttcgatctggtgtacggcagcacccaacccctgggcagctcttgtgaccggtgccctggctggtacatgtttcagttccaccggatcctgcagtacgccctgccgagacaggagtcccagcggccattcttttggattttcatggacaacttgctgctgaccgaggatgaccaggaaactaccactcggttcctgcagaccgaagccgtgaccctgcaggacgtgagaggccgggactaccagaacgccatgcgggtgtggtccaacatccctggactgaaaagcaagcacgcacctctgacccctaaagaagaggagtacctgcaggcccaggtgcggagcagaagcaagctggacgcccctaaggtggatctgctggtgaagaattgcctcctgcccctgagagagtacttcaagtatttcagccagaatagtctgcccctgggaggcagcggcggcggcgccctggtgacatttgaggacgtcgccgtgcggttcacccaggaggaatgggctctgctggatccttctcagaaaatcctgtaccgggacgtgatgagagagacataccggaatctgacctccgtgggcatcaactgggaatgttgggaccttgaagcctgcttcagaagcctgggaagaaacctgagagtgcaggtggtgaagagaaagtgcgagctgaccaacagcggcccctgcgccgagggcggcccaagcagcggcgcccctcctcccagcggcggcagcccagccggctccccaacctctaccgaggagggcacctctgagtccgccacccccgagagcggccctggcacctccaccgagcccagcgagggcagcgcacccggcagccctgccggcagccccacctccacagaggagggaaccagcaccgagcccagcgaaggcagcgccccaggcaccagcaccgagcctagtgagcaggagattaaacggatcaacaagatcagaagaagacttgtgaaagacagcaacaccaagaaggccggcaagacaggccccatgaaaaccctgctggttagagtgatgacacccgatctgagagagcggctggaaaacctgagaaagaagcctgaaaatatcccccagcccatcagcaatacatctagagccaacctgaataagctgctgaccgattacaccgaaatgaagaaggcgatcctgcatgtgtactgggaagagttccagaaggaccctgtgggcctgatgagccgggtggcccagcctgccagcaagaagatcgatcagaacaagctgaaacctgagatggacgagaagggcaacctgaccaccgccggctttgcctgctctcagtgtggccagcccctgttcgtgtacaagctggagcaggtgtctgagaagggcaaggcttacaccaactacttcggacggtgcaatgtggccgagcacgaaaagctgatcctgctggcccagctgaagcccgagaaggatagcgacgaagccgtgacatatagcctgggaaagtttgggcagagggccctggatttctacagcattcatgtgaccaaggagtccacccaccccgtgaagcccctggcccagatcgccggaaacagatacgcctccggacctgtgggaaaggccctgagcgacgcatgtatgggcacaatcgcctccttcctgtctaagtaccaggacatcatcatcgaacaccagaaggtggtgaagggcaaccagaagagactggagagcctgcgggagctggccggcaaggaaaacctggaataccctagcgtgaccctgccacctcagcctcacaccaaggagggcgttgatgcctacaacgaagtgatcgcccgggtgcgaatgtgggtgaacctgaacctgtggcagaagctgaagctaagcagagatgatgccaagcctctgctgagactgaagggattcccttcctttcctctggtcgagagacaggccaacgaagtggactggtgggacatggtgtgtaacgtgaagaagctgatcaacgagaaaaaggaggatggcaaggtgttttggcagaatctggctggctacaagagacaggaagccctgagaccatacctgagcagcgaggaagatcggaagaagggaaagaaattcgctcggtaccagctgggcgacctgctgctgcacctggaaaagaagcacggcgaggactggggaaaggtgtacgacgaggcctgggagcggattgacaagaaagtggaaggcctgagcaagcacatcaagctggaagaggaacggagaagcgaggacgcccagagcaaggccgccctgaccgactggctgcgggctaaggccagcttcgtgatcgagggcctgaaggaggccgacaaggacgagttctgcagatgcgagctgaagctgcagaagtggtacggggacctgcggggaaagcccttcgccatcgaagccgagaacagcatcctggacatcagcggcttcagcaagcagtacaactgtgccttcatctggcagaaggacggcgtgaagaagctgaacctgtacctgatcatcaactacttcaagggcggcaagctgcggttcaagaagatcaaacctgaagccttcgaagccaacagattctacaccgtgatcaacaaaaagagcggcgagatcgtgcccatggaggtgaacttcaacttcgacgaccccaacctgatcatcctgcctctggcctttggcaagagacagggcagagaattcatctggaacgacctgctgtccctggaaaccggcagcctgaagctggccaacggaagagtgatcgagaagacactgtacaacagaagaacccggcaggatgagcctgccctgttcgtggccctgaccttcgagcggcgggaggtcctggactcctccaatatcaaaccaatgaacctgatcggcgtggcaagaggcgaaaacatccccgccgtgatcgccctgaccgaccccgagggctgcccactgagccggtttaaggatagcctgggaaacccaacccacatcctgagaatcggcgagagctataaggagaagcagcggaccatccaggccaagaaggaggtggagcagcggagagccggcggctacagccggaagtacgccagcaaagccaagaatctggcagacgatatggtgagaaacaccgctagagatctgctgtactacgccgtgacccaggatgccatgctgatcttcgccaacctgagccggggcttcggccggcagggcaagcggaccttcatggccgagagacagtacacacggatggaggactggctgaccgccaagctggcctacgagggcctgagcaagacctacctgtccaagacactggcccagtacacctccaagacatgcagcaactgtgggtttaccatcaccagcgccgactacgacagggtgctggagaagctgaagaagacagcaacaggctggatgaccacaattaacggcaaggagctgaaggtggagggccagattacctactacaacagatacaagagacagaacgtagtcaaggacctgtccgtcgagctggatagactgagcgaagaatctgtgaacaacgacatctcctcctggacaaagggcagaagcggagaagctctgagcctcctgaagaaaagattctcccatagacccgtgcaggagaagttcgtgtgcctgaactgcggcttcgagacacacgcagccgagcaagccgccctgaacatcgccagatcctggctgttcctgcggagccaggagtacaagaaataccagacaaacaagacaaccggcaacaccgataagagagccttcgtcgagacctggcagtccttttaccggaagaagcttaaggaggtgtggaaacctgccgtgcggtctggcggatctggcggaggctccatccacctgaccgcctggccccagaagagcgtgaccttcgaggacgtggccgtgtacttcacccaggccgagtgggacggcctgagccccgcccagaggaccctgtacagggacgtgatgctggagaactacggcaacgtggccagcctgggcttccccctgctgaagcccgccgtgatcagccagctggagggcggcggcgacctgggcggccccagccccctggccgccggcaccggcctgggcggcccaagcagcggcgcccctcctcccagcggcggcagcccagccggctccccaacctctaccgaggagggcacctctgagtccgccacccccgagagcggccctggcacctccaccgagcccagcgagggcagcgcacccggcagccctgccggcagccccacctccacagaggagggaaccagcaccgagcccagcgaaggcagcgccccaggcaccagcaccgagcctagtgagcaggagattaaacggatcaacaagatcagaagaagacttgtgaaagacagcaacaccaagaaggccggcaagacaggccccatgaaaaccctgctggttagagtgatgacacccgatctgagagagcggctggaaaacctgagaaagaagcctgaaaatatcccccagcccatcagcaatacatctagagccaacctgaataagctgctgaccgattacaccgaaatgaagaaggcgatcctgcatgtgtactgggaagagttccagaaggaccctgtgggcctgatgagccgggtggcccagcctgccagcaagaagatcgatcagaacaagctgaaacctgagatggacgagaagggcaacctgaccaccgccggctttgcctgctctcagtgtggccagcccctgttcgtgtacaagctggagcaggtgtctgagaagggcaaggcttacaccaactacttcggacggtgcaatgtggccgagcacgaaaagctgatcctgctggcccagctgaagcccgagaaggatagcgacgaagccgtgacatatagcctgggaaagtttgggcagagggccctggatttctacagcattcatgtgaccaaggagtccacccaccccgtgaagcccctggcccagatcgccggaaacagatacgcctccggacctgtgggaaaggccctgagcgacgcatgtatgggcacaatcgcctccttcctgtctaagtaccaggacatcatcatcgaacaccagaaggtggtgaagggcaaccagaagagactggagagcctgcgggagctggccggcaaggaaaacctggaataccctagcgtgaccctgccacctcagcctcacaccaaggagggcgttgatgcctacaacgaagtgatcgcccgggtgcgaatgtgggtgaacctgaacctgtggcagaagctgaagctaagcagagatgatgccaagcctctgctgagactgaagggattcccttcctttcctctggtcgagagacaggccaacgaagtggactggtgggacatggtgtgtaacgtgaagaagctgatcaacgagaaaaaggaggatggcaaggtgttttggcagaatctggctggctacaagagacaggaagccctgagaccatacctgagcagcgaggaagatcggaagaagggaaagaaattcgctcggtaccagctgggcgacctgctgctgcacctggaaaagaagcacggcgaggactggggaaaggtgtacgacgaggcctgggagcggattgacaagaaagtggaaggcctgagcaagcacatcaagctggaagaggaacggagaagcgaggacgcccagagcaaggccgccctgaccgactggctgcgggctaaggccagcttcgtgatcgagggcctgaaggaggccgacaaggacgagttctgcagatgcgagctgaagctgcagaagtggtacggggacctgcggggaaagcccttcgccatcgaagccgagaacagcatcctggacatcagcggcttcagcaagcagtacaactgtgccttcatctggcagaaggacggcgtgaagaagctgaacctgtacctgatcatcaactacttcaagggcggcaagctgcggttcaagaagatcaaacctgaagccttcgaagccaacagattctacaccgtgatcaacaaaaagagcggcgagatcgtgcccatggaggtgaacttcaacttcgacgaccccaacctgatcatcctgcctctggcctttggcaagagacagggcagagaattcatctggaacgacctgctgtccctggaaaccggcagcctgaagctggccaacggaagagtgatcgagaagacactgtacaacagaagaacccggcaggatgagcctgccctgttcgtggccctgaccttcgagcggcgggaggtcctggactcctccaatatcaaaccaatgaacctgatcggcgtggcaagaggcgaaaacatccccgccgtgatcgccctgaccgaccccgagggctgcccactgagccggtttaaggatagcctgggaaacccaacccacatcctgagaatcggcgagagctataaggagaagcagcggaccatccaggccaagaaggaggtggagcagcggagagccggcggctacagccggaagtacgccagcaaagccaagaatctggcagacgatatggtgagaaacaccgctagagatctgctgtactacgccgtgacccaggatgccatgctgatcttcgccaacctgagccggggcttcggccggcagggcaagcggaccttcatggccgagagacagtacacacggatggaggactggctgaccgccaagctggcctacgagggcctgagcaagacctacctgtccaagacactggcccagtacacctccaagacatgcagcaactgtgggtttaccatcaccagcgccgactacgacagggtgctggagaagctgaagaagacagcaacaggctggatgaccacaattaacggcaaggagctgaaggtggagggccagattacctactacaacagatacaagagacagaacgtagtcaaggacctgtccgtcgagctggatagactgagcgaagaatctgtgaacaacgacatctcctcctggacaaagggcagaagcggagaagctctgagcctcctgaagaaaagattctcccatagacccgtgcaggagaagttcgtgtgcctgaactgcggcttcgagacacacgcagccgagcaagccgccctgaacatcgccagatcctggctgttcctgcggagccaggagtacaagaaataccagacaaacaagacaaccggcaacaccgataagagagccttcgtcgagacctggcagtccttttaccggaagaagcttaaggaggtgtggaaacctgccgtgcggtctggcggatctggcggaggctcctatccacctgaccgcctggccccagaagagcgtgaccttcgaggacgtggccgtgtacttcacccaggccgagtgggacggcctgagccccgcccagaggaccctgtacagggacgtgatgctggagaactacggcaacgtggccagcctgggcttccccctgctgaagcccgccgtgatcagccagctggagggcggcggcgacctgggcggccccagccccctggccgccggcaccggcctgggatctggctccggcagcggccccaagaaaaagagaaaagtctaagctgccttctgcggggcttgccttctggccatgcccttcttctctcccttgcacctgtacctcttggtctttgaataaagcctgagtaggaaggctagcaaaaaaaaaaaaaaaaaaaaaaaaaaaaaaaaaaaaaaaaaaaaaaaaaaaaaaaaaaaaaaaaaaaaaaaaaaaaaaaa

SEQ ID NO: 16462 - RNA, 9485 nt, synthetic construct
  source 1..9485: mol_type = other RNA
aggaaataagagagaaaagaagagtaagaagaaatataagagccaccatggcccctaagaagaagcgtaaagtgagccggatggaacgcctcgtctacgaggtgcggcagaagtgcagaaacatcgaggacatctgcatctcctgcggatctctgaacgtgaccctggagcacccactgttcatcggcggcatgtgccagaactgtaaaaactgttttctggagtgtgcctatcaatacgacgatgacggctaccagagctactgcaccatctgttgcggcggaagagaggtgctgatgtgtggaaataacaactgctgccggtgcttctgcgtggaatgcgtggacctgctggtgggccccggcgccgcccaggccgctattaaggaagatccttggaactgctacatgtgcggccacaagggcacatacggcctgctgagacggagagaggactggcctagcagactgcagatgttcttcgccaataaccacgaccaggagttcgacccccctaaggtgtaccctcccgtccccgccgagaagagaaagcccatccgggtcctgagcctgttcgatggcatcgccaccggtctgctggtgctgaaggacctgggcatccaggtggataggtacattgcctccgaggtgtgcgaggactccatcaccgtgggaatggtgcgtcatcagggcaagatcatgtacgtgggcgacgtgcggagcgtgacacagaagcatatccaggagtggggccctttcgacctggtgatcggcggcagcccttgcaatgacctgagcatcgtgaacccagcccggaagggcctgtacgagggaaccggcagactgttcttcgagttttacagactgctgcacgacgcccggcctaaggaaggcgacgaccggcccttcttttggctgttcgagaatgtggtggccatgggagtcagcgacaagcgggatattagccggttcctggagagcaaccccgtgatgatcgatgccaaggaagtgagcgccgcccaccgggccagatacttctggggcaatctgcctggcatgaacagacccctggccagcaccgtgaacgacaagctggagctgcaggagtgcctggagcacggccggatcgccaagttcagcaaggtgagaaccatcaccacccgaagcaacagcatcaaacaaggcaaggaccagcactttcctgtgttcatgaacgagaaggaggacatcctgtggtgtaccgagatggagagagtgttcgggttcccagtccactacacagatgtcagcaacatgtctagactggccagacagagactgctgggaagaagctggtccgtccctgtgatcagacacctgttcgcccctctgaaggagtacttcgcctgcgtgagcagcggcaacagcaacgccaacagccggggccccagcttctctagcggcctggtgccactgtccctgagagggagccacatgggccccatggagatctacaaaaccgtgagcgcctggaagcggcagcctgtgcgcgtgctgagcctgtttcggaatatcgataaagtcctgaaaagcctgggattcctggagagcggctctggctccggcggtggcaccctgaagtacgtggaggatgtgacaaacgtggtcagacgggatgtggagaagtggggccccttcgatctggtgtacggcagcacccaacccctgggcagctcttgtgaccggtgccctggctggtacatgtttcagttccaccggatcctgcagtacgccctgccgagacaggagtcccagcggccattcttttggattttcatggacaacttgctgctgaccgaggatgaccaggaaactaccactcggttcctgcagaccgaagccgtgaccctgcaggacgtgagaggccgggactaccagaacgccatgcgggtgtggtccaacatccctggactgaaaagcaagcacgcacctctgacccctaaagaagaggagtacctgcaggcccaggtgcggagcagaagcaagctggacgcccctaaggtggatctgctggtgaagaattgcctcctgcccctgagagagtacttcaagtatttcagccagaatagtctgcccctgggaggcagcggcggcggcgccctggtgacatttgaggacgtcgccgtgcggttcacccaggaggaatgggctctgctggatccttctcagaaaatcctgtaccgggacgtgatgagagagacataccggaatctgacctccgtgggcatcaactgggaatgttgggaccttgaagcctgcttcagaagcctgggaagaaacctgagagtgcaggtggtgaagagaaagtgcgagctgaccaacagcggcccctgcgccgagggcggcccaagcagcggcgcccctcctcccagcggcggcagcccagccggctccccaacctctaccgaggagggcacctctgagtccgccacccccgagagcggccctggcacctccaccgagcccagcgagggcagcgcacccggcagccctgccggcagccccacctccacagaggagggaaccagcaccgagcccagcgaaggcagcgccccaggcaccagcaccgagcctagtgagcaggagattaaacggatcaacaagatcagaagaagacttgtgaaagacagcaacaccaagaaggccggcaagacaggccccatgaaaaccctgctggttagagtgatgacacccgatctgagagagcggctggaaaacctgagaaagaagcctgaaaatatcccccagcccatcagcaatacatctagagccaacctgaataagctgctgaccgattacaccgaaatgaagaaggcgatcctgcatgtgtactgggaagagttccagaaggaccctgtgggcctgatgagccgggtggcccagcctgccagcaagaagatcgatcagaacaagctgaaacctgagatggacgagaagggcaacctgaccaccgccggctttgcctgctctcagtgtggccagcccctgttcgtgtacaagctggagcaggtgtctgagaagggcaaggcttacaccaactacttcggacggtgcaatgtggccgagcacgaaaagctgatcctgctggcccagctgaagcccgagaaggatagcgacgaagccgtgacatatagcctgggaaagtttgggcagagggccctggatttctacagcattcatgtgaccaaggagtccacccaccccgtgaagcccctggcccagatcgccggaaacagatacgcctccggacctgtgggaaaggccctgagcgacgcatgtatgggcacaatcgcctccttcctgtctaagtaccaggacatcatcatcgaacaccagaaggtggtgaagggcaaccagaagagactggagagcctgcgggagctggccggcaaggaaaacctggaataccctagcgtgaccctgccacctcagcctcacaccaaggagggcgttgatgcctacaacgaagtgatcgcccgggtgcgaatgtgggtgaacctgaacctgtggcagaagctgaagctaagcagagatgatgccaagcctctgctgagactgaagggattcccttcctttcctctggtcgagagacaggccaacgaagtggactggtgggacatggtgtgtaacgtgaagaagctgatcaacgagaaaaaggaggatggcaaggtgttttggcagaatctggctggctacaagagacaggaagccctgagaccatacctgagcagcgaggaagatcggaagaagggaaagaaattcgctcggtaccagctgggcgacctgctgctgcacctggaaaagaagcacggcgaggactggggaaaggtgtacgacgaggcctgggagcggattgacaagaaagtggaaggcctgagcaagcacatcaagctggaagaggaacggagaagcgaggacgcccagagcaaggccgccctgaccgactggctgcgggctaaggccagcttcgtgatcgagggcctgaaggaggccgacaaggacgagttctgcagatgcgagctgaagctgcagaagtggtacggggacctgcggggaaagcccttcgccatcgaagccgagaacagcatcctggacatcagcggcttcagcaagcagtacaactgtgccttcatctggcagaaggacggcgtgaagaagctgaacctgtacctgatcatcaactacttcaagggcggcaagctgcggttcaagaagatcaaacctgaagccttcgaagccaacagattctacaccgtgatcaacaaaaagagcggcgagatcgtgcccatggaggtgaacttcaacttcgacgaccccaacctgatcatcctgcctctggcctttggcaagagacagggcagagaattcatctggaacgacctgctgtccctggaaaccggcagcctgaagctggccaacggaagagtgatcgagaagacactgtacaacagaagaacccggcaggatgagcctgccctgttcgtggccctgaccttcgagcggcgggaggtcctggactcctccaatatcaaaccaatgaacctgatcggcgtggcaagaggcgaaaacatccccgccgtgatcgccctgaccgaccccgagggctgcccactgagccggtttaaggatagcctgggaaacccaacccacatcctgagaatcggcgagagctataaggagaagcagcggaccatccaggccaagaaggaggtggagcagcggagagccggcggctacagccggaagtacgccagcaaagccaagaatctggcagacgatatggtgagaaacaccgctagagatctgctgtactacgccgtgacccaggatgccatgctgatcttcgccaacctgagccggggcttcggccggcagggcaagcggaccttcatggccgagagacagtacacacggatggaggactggctgaccgccaagctggcctacgagggcctgagcaagacctacctgtccaagacactggcccagtacacctccaagacatgcagcaactgtgggtttaccatcaccagcgccgactacgacagggtgctggagaagctgaagaagacagcaacaggctggatgaccacaattaacggcaaggagctgaaggtggagggccagattacctactacaacagatacaagagacagaacgtagtcaaggacctgtccgtcgagctggatagactgagcgaagaatctgtgaacaacgacatctcctcctggacaaagggcagaagcggagaagctctgagcctcctgaagaaaagattctcccatagacccgtgcaggagaagttcgtgtgcctgaactgcggcttcgagacacacgcagccgagcaagccgccctgaacatcgccagatcctggctgttcctgcggagccaggagtacaagaaataccagacaaacaagacaaccggcaacaccgataagagagccttcgtcgagacctggcagtccttttaccggaagaagcttaaggaggtgtggaaacctgccgtgcggtctggcggatctggcggaggctccgcccaggtgctggtgaccttccaggacgtggccgtggacttcacccaggaggagtggaggctgctggaccccggccagaaggagctgtacaaggaggtgatgctggagaacgccgagaacatgctgttcctgggcctgcccgtgcccagggaggactggttcttccacttccacgagggcggcgacccctggatgctggagggcaagggccccagcatcagcaggctggacgaggagaggcacggcggcccaagcagcggcgcccctcctcccagcggcggcagcccagccggctccccaacctctaccgaggagggcacctctgagtccgccacccccgagagcggccctggcacctccaccgagcccagcgagggcagcgcacccggcagccctgccggcagccccacctccacagaggagggaaccagcaccgagcccagcgaaggcagcgccccaggcaccagcaccgagcctagtgagcaggagattaaacggatcaacaagatcagaagaagacttgtgaaagacagcaacaccaagaaggccggcaagacaggccccatgaaaaccctgctggttagagtgatgacacccgatctgagagagcggctggaaaacctgagaaagaagcctgaaaatatcccccagcccatcagcaatacatctagagccaacctgaataagctgctgaccgattacaccgaaatgaagaaggcgatcctgcatgtgtactgggaagagttccagaaggaccctgtgggcctgatgagccgggtggcccagcctgccagcaagaagatcgatcagaacaagctgaaacctgagatggacgagaagggcaacctgaccaccgccggctttgcctgctctcagtgtggccagcccctgttcgtgtacaagctggagcaggtgtctgagaagggcaaggcttacaccaactacttcggacggtgcaatgtggccgagcacgaaaagctgatcctgctggcccagctgaagcccgagaaggatagcgacgaagccgtgacatatagcctgggaaagtttgggcagagggccctggatttctacagcattcatgtgaccaaggagtccacccaccccgtgaagcccctggcccagatcgccggaaacagatacgcctccggacctgtgggaaaggccctgagcgacgcatgtatgggcacaatcgcctccttcctgtctaagtaccaggacatcatcatcgaacaccagaaggtggtgaagggcaaccagaagagactggagagcctgcgggagctggccggcaaggaaaacctggaataccctagcgtgaccctgccacctcagcctcacaccaaggagggcgttgatgcctacaacgaagtgatcgcccgggtgcgaatgtgggtgaacctgaacctgtggcagaagctgaagctaagcagagatgatgccaagcctctgctgagactgaagggattcccttcctttcctctggtcgagagacaggccaacgaagtggactggtgggacatggtgtgtaacgtgaagaagctgatcaacgagaaaaaggaggatggcaaggtgttttggcagaatctggctggctacaagagacaggaagccctgagaccatacctgagcagcgaggaagatcggaagaagggaaagaaattcgctcggtaccagctgggcgacctgctgctgcacctggaaaagaagcacggcgaggactggggaaaggtgtacgacgaggcctgggagcggattgacaagaaagtggaaggcctgagcaagcacatcaagctggaagaggaacggagaagcgaggacgcccagagcaaggccgccctgaccgactggctgcgggctaaggccagcttcgtgatcgagggcctgaaggaggccgacaaggacgagttctgcagatgcgagctgaagctgcagaagtggtacggggacctgcggggaaagcccttcgccatcgaagccgagaacagcatcctggacatcagcggcttcagcaagcagtacaactgtgccttcatctggcagaaggacggcgtgaagaagctgaacctgtacctgatcatcaactacttcaagggcggcaagctgcggttcaagaagatcaaacctgaagccttcgaagccaacagattctacaccgtgatcaacaaaaagagcggcgagatcgtgcccatggaggtgaacttcaacttcgacgaccccaacctgatcatcctgcctctggcctttggcaagagacagggcagagaattcatctggaacgacctgctgtccctggaaaccggcagcctgaagctggccaacggaagagtgatcgagaagacactgtacaacagaagaacccggcaggatgagcctgccctgttcgtggccctgaccttcgagcggcgggaggtcctggactcctccaatatcaaaccaatgaacctgatcggcgtggcaagaggcgaaaacatccccgccgtgatcgccctgaccgaccccgagggctgcccactgagccggtttaaggatagcctgggaaacccaacccacatcctgagaatcggcgagagctataaggagaagcagcggaccatccaggccaagaaggaggtggagcagcggagagccggcggctacagccggaagtacgccagcaaagccaagaatctggcagacgatatggtgagaaacaccgctagagatctgctgtactacgccgtgacccaggatgccatgctgatcttcgccaacctgagccggggcttcggccggcagggcaagcggaccttcatggccgagagacagtacacacggatggaggactggctgaccgccaagctggcctacgagggcctgagcaagacctacctgtccaagacactggcccagtacacctccaagacatgcagcaactgtgggtttaccatcaccagcgccgactacgacagggtgctggagaagctgaagaagacagcaacaggctggatgaccacaattaacggcaaggagctgaaggtggagggccagattacctactacaacagatacaagagacagaacgtagtcaaggacctgtccgtcgagctggatagactgagcgaagaatctgtgaacaacgacatctcctcctggacaaagggcagaagcggagaagctctgagcctcctgaagaaaagattctcccatagacccgtgcaggagaagttcgtgtgcctgaactgcggcttcgagacacacgcagccgagcaagccgccctgaacatcgccagatcctggctgttcctgcggagccaggagtacaagaaataccagacaaacaagacaaccggcaacaccgataagagagccttcgtcgagacctggcagtccttttaccggaagaagcttaaggaggtgtggaaacctgccgtgcggtctggcggatctggcggaggctcctgcccaggtgctggtgaccttccaggacgtggccgtggacttcacccaggaggagtggaggctgctggaccccggccagaaggagctgtacaaggaggtgatgctggagaacgccgagaacatgctgttcctgggcctgcccgtgcccagggaggactggttcttccacttccacgagggcggcgacccctggatgctggagggcaagggccccagcatcagcaggctggacgaggagaggcacggatctggctccggcagcggccccaagaaaaagagaaaagtctaagctgccttctgcggggcttgccttctggccatgcccttcttctctcccttgcacctgtacctcttggtctttgaataaagcctgagtaggaaggctagcaaaaaaaaaaaaaaaaaaaaaaaaaaaaaaaaaaaaaaaaaaaaaaaaaaaaaaaaaaaaaaaaaaaaaaaaaaaaaaaa

SEQ ID NO: 16463 - RNA, 9485 nt, synthetic construct
  source 1..9485: mol_type = other RNA
aggaaataagagagaaaagaagagtaagaagaaatataagagccaccatggcccctaagaagaagcgtaaagtgagccggatggaacgcctcgtctacgaggtgcggcagaagtgcagaaacatcgaggacatctgcatctcctgcggatctctgaacgtgaccctggagcacccactgttcatcggcggcatgtgccagaactgtaaaaactgttttctggagtgtgcctatcaatacgacgatgacggctaccagagctactgcaccatctgttgcggcggaagagaggtgctgatgtgtggaaataacaactgctgccggtgcttctgcgtggaatgcgtggacctgctggtgggccccggcgccgcccaggccgctattaaggaagatccttggaactgctacatgtgcggccacaagggcacatacggcctgctgagacggagagaggactggcctagcagactgcagatgttcttcgccaataaccacgaccaggagttcgacccccctaaggtgtaccctcccgtccccgccgagaagagaaagcccatccgggtcctgagcctgttcgatggcatcgccaccggtctgctggtgctgaaggacctgggcatccaggtggataggtacattgcctccgaggtgtgcgaggactccatcaccgtgggaatggtgcgtcatcagggcaagatcatgtacgtgggcgacgtgcggagcgtgacacagaagcatatccaggagtggggccctttcgacctggtgatcggcggcagcccttgcaatgacctgagcatcgtgaacccagcccggaagggcctgtacgagggaaccggcagactgttcttcgagttttacagactgctgcacgacgcccggcctaaggaaggcgacgaccggcccttcttttggctgttcgagaatgtggtggccatgggagtcagcgacaagcgggatattagccggttcctggagagcaaccccgtgatgatcgatgccaaggaagtgagcgccgcccaccgggccagatacttctggggcaatctgcctggcatgaacagacccctggccagcaccgtgaacgacaagctggagctgcaggagtgcctggagcacggccggatcgccaagttcagcaaggtgagaaccatcaccacccgaagcaacagcatcaaacaaggcaaggaccagcactttcctgtgttcatgaacgagaaggaggacatcctgtggtgtaccgagatggagagagtgttcgggttcccagtccactacacagatgtcagcaacatgtctagactggccagacagagactgctgggaagaagctggtccgtccctgtgatcagacacctgttcgcccctctgaaggagtacttcgcctgcgtgagcagcggcaacagcaacgccaacagccggggccccagcttctctagcggcctggtgccactgtccctgagagggagccacatgggccccatggagatctacaaaaccgtgagcgcctggaagcggcagcctgtgcgcgtgctgagcctgtttcggaatatcgataaagtcctgaaaagcctgggattcctggagagcggctctggctccggcggtggcaccctgaagtacgtggaggatgtgacaaacgtggtcagacgggatgtggagaagtggggccccttcgatctggtgtacggcagcacccaacccctgggcagctcttgtgaccggtgccctggctggtacatgtttcagttccaccggatcctgcagtacgccctgccgagacaggagtcccagcggccattcttttggattttcatggacaacttgctgctgaccgaggatgaccaggaaactaccactcggttcctgcagaccgaagccgtgaccctgcaggacgtgagaggccgggactaccagaacgccatgcgggtgtggtccaacatccctggactgaaaagcaagcacgcacctctgacccctaaagaagaggagtacctgcaggcccaggtgcggagcagaagcaagctggacgcccctaaggtggatctgctggtgaagaattgcctcctgcccctgagagagtacttcaagtatttcagccagaatagtctgcccctgggaggcagcggcggcggcgccctggtgacatttgaggacgtcgccgtgcggttcacccaggaggaatgggctctgctggatccttctcagaaaatcctgtaccgggacgtgatgagagagacataccggaatctgacctccgtgggcatcaactgggaatgttgggaccttgaagcctgcttcagaagcctgggaagaaacctgagagtgcaggtggtgaagagaaagtgcgagctgaccaacagcggcccctgcgccgagggcggcccaagcagcggcgcccctcctcccagcggcggcagcccagccggctccccaacctctaccgaggagggcacctctgagtccgccacccccgagagcggccctggcacctccaccgagcccagcgagggcagcgcacccggcagccctgccggcagccccacctccacagaggagggaaccagcaccgagcccagcgaaggcagcgccccaggcaccagcaccgagcctagtgagcaggagattaaacggatcaacaagatcagaagaagacttgtgaaagacagcaacaccaagaaggccggcaagacaggccccatgaaaaccctgctggttagagtgatgacacccgatctgagagagcggctggaaaacctgagaaagaagcctgaaaatatcccccagcccatcagcaatacatctagagccaacctgaataagctgctgaccgattacaccgaaatgaagaaggcgatcctgcatgtgtactgggaagagttccagaaggaccctgtgggcctgatgagccgggtggcccagcctgccagcaagaagatcgatcagaacaagctgaaacctgagatggacgagaagggcaacctgaccaccgccggctttgcctgctctcagtgtggccagcccctgttcgtgtacaagctggagcaggtgtctgagaagggcaaggcttacaccaactacttcggacggtgcaatgtggccgagcacgaaaagctgatcctgctggcccagctgaagcccgagaaggatagcgacgaagccgtgacatatagcctgggaaagtttgggcagagggccctggatttctacagcattcatgtgaccaaggagtccacccaccccgtgaagcccctggcccagatcgccggaaacagatacgcctccggacctgtgggaaaggccctgagcgacgcatgtatgggcacaatcgcctccttcctgtctaagtaccaggacatcatcatcgaacaccagaaggtggtgaagggcaaccagaagagactggagagcctgcgggagctggccggcaaggaaaacctggaataccctagcgtgaccctgccacctcagcctcacaccaaggagggcgttgatgcctacaacgaagtgatcgcccgggtgcgaatgtgggtgaacctgaacctgtggcagaagctgaagctaagcagagatgatgccaagcctctgctgagactgaagggattcccttcctttcctctggtcgagagacaggccaacgaagtggactggtgggacatggtgtgtaacgtgaagaagctgatcaacgagaaaaaggaggatggcaaggtgttttggcagaatctggctggctacaagagacaggaagccctgagaccatacctgagcagcgaggaagatcggaagaagggaaagaaattcgctcggtaccagctgggcgacctgctgctgcacctggaaaagaagcacggcgaggactggggaaaggtgtacgacgaggcctgggagcggattgacaagaaagtggaaggcctgagcaagcacatcaagctggaagaggaacggagaagcgaggacgcccagagcaaggccgccctgaccgactggctgcgggctaaggccagcttcgtgatcgagggcctgaaggaggccgacaaggacgagttctgcagatgcgagctgaagctgcagaagtggtacggggacctgcggggaaagcccttcgccatcgaagccgagaacagcatcctggacatcagcggcttcagcaagcagtacaactgtgccttcatctggcagaaggacggcgtgaagaagctgaacctgtacctgatcatcaactacttcaagggcggcaagctgcggttcaagaagatcaaacctgaagccttcgaagccaacagattctacaccgtgatcaacaaaaagagcggcgagatcgtgcccatggaggtgaacttcaacttcgacgaccccaacctgatcatcctgcctctggcctttggcaagagacagggcagagaattcatctggaacgacctgctgtccctggaaaccggcagcctgaagctggccaacggaagagtgatcgagaagacactgtacaacagaagaacccggcaggatgagcctgccctgttcgtggccctgaccttcgagcggcgggaggtcctggactcctccaatatcaaaccaatgaacctgatcggcgtggcaagaggcgaaaacatccccgccgtgatcgccctgaccgaccccgagggctgcccactgagccggtttaaggatagcctgggaaacccaacccacatcctgagaatcggcgagagctataaggagaagcagcggaccatccaggccaagaaggaggtggagcagcggagagccggcggctacagccggaagtacgccagcaaagccaagaatctggcagacgatatggtgagaaacaccgctagagatctgctgtactacgccgtgacccaggatgccatgctgatcttcgccaacctgagccggggcttcggccggcagggcaagcggaccttcatggccgagagacagtacacacggatggaggactggctgaccgccaagctggcctacgagggcctgagcaagacctacctgtccaagacactggcccagtacacctccaagacatgcagcaactgtgggtttaccatcaccagcgccgactacgacagggtgctggagaagctgaagaagacagcaacaggctggatgaccacaattaacggcaaggagctgaaggtggagggccagattacctactacaacagatacaagagacagaacgtagtcaaggacctgtccgtcgagctggatagactgagcgaagaatctgtgaacaacgacatctcctcctggacaaagggcagaagcggagaagctctgagcctcctgaagaaaagattctcccatagacccgtgcaggagaagttcgtgtgcctgaactgcggcttcgagacacacgcagccgagcaagccgccctgaacatcgccagatcctggctgttcctgcggagccaggagtacaagaaataccagacaaacaagacaaccggcaacaccgataagagagccttcgtcgagacctggcagtccttttaccggaagaagcttaaggaggtgtggaaacctgccgtgcggtctggcggatctggcggaggctccagcgaggacctggtgaccttcagggacgtggccgtggacttcagccaggaggagtgggagcagctgaacagcgcccagaggggcctgtacagggacgtgatgctggagaactacaggagcctggtgagcctgggcgtgagcgtgagcaagcccgacgtgatcagcctgctggagcagggcaaggagccctgggtggtgaaggagggcaccaggggcacctacagcgactggaagtacgccttcggcggcccaagcagcggcgcccctcctcccagcggcggcagcccagccggctccccaacctctaccgaggagggcacctctgagtccgccacccccgagagcggccctggcacctccaccgagcccagcgagggcagcgcacccggcagccctgccggcagccccacctccacagaggagggaaccagcaccgagcccagcgaaggcagcgccccaggcaccagcaccgagcctagtgagcaggagattaaacggatcaacaagatcagaagaagacttgtgaaagacagcaacaccaagaaggccggcaagacaggccccatgaaaaccctgctggttagagtgatgacacccgatctgagagagcggctggaaaacctgagaaagaagcctgaaaatatcccccagcccatcagcaatacatctagagccaacctgaataagctgctgaccgattacaccgaaatgaagaaggcgatcctgcatgtgtactgggaagagttccagaaggaccctgtgggcctgatgagccgggtggcccagcctgccagcaagaagatcgatcagaacaagctgaaacctgagatggacgagaagggcaacctgaccaccgccggctttgcctgctctcagtgtggccagcccctgttcgtgtacaagctggagcaggtgtctgagaagggcaaggcttacaccaactacttcggacggtgcaatgtggccgagcacgaaaagctgatcctgctggcccagctgaagcccgagaaggatagcgacgaagccgtgacatatagcctgggaaagtttgggcagagggccctggatttctacagcattcatgtgaccaaggagtccacccaccccgtgaagcccctggcccagatcgccggaaacagatacgcctccggacctgtgggaaaggccctgagcgacgcatgtatgggcacaatcgcctccttcctgtctaagtaccaggacatcatcatcgaacaccagaaggtggtgaagggcaaccagaagagactggagagcctgcgggagctggccggcaaggaaaacctggaataccctagcgtgaccctgccacctcagcctcacaccaaggagggcgttgatgcctacaacgaagtgatcgcccgggtgcgaatgtgggtgaacctgaacctgtggcagaagctgaagctaagcagagatgatgccaagcctctgctgagactgaagggattcccttcctttcctctggtcgagagacaggccaacgaagtggactggtgggacatggtgtgtaacgtgaagaagctgatcaacgagaaaaaggaggatggcaaggtgttttggcagaatctggctggctacaagagacaggaagccctgagaccatacctgagcagcgaggaagatcggaagaagggaaagaaattcgctcggtaccagctgggcgacctgctgctgcacctggaaaagaagcacggcgaggactggggaaaggtgtacgacgaggcctgggagcggattgacaagaaagtggaaggcctgagcaagcacatcaagctggaagaggaacggagaagcgaggacgcccagagcaaggccgccctgaccgactggctgcgggctaaggccagcttcgtgatcgagggcctgaaggaggccgacaaggacgagttctgcagatgcgagctgaagctgcagaagtggtacggggacctgcggggaaagcccttcgccatcgaagccgagaacagcatcctggacatcagcggcttcagcaagcagtacaactgtgccttcatctggcagaaggacggcgtgaagaagctgaacctgtacctgatcatcaactacttcaagggcggcaagctgcggttcaagaagatcaaacctgaagccttcgaagccaacagattctacaccgtgatcaacaaaaagagcggcgagatcgtgcccatggaggtgaacttcaacttcgacgaccccaacctgatcatcctgcctctggcctttggcaagagacagggcagagaattcatctggaacgacctgctgtccctggaaaccggcagcctgaagctggccaacggaagagtgatcgagaagacactgtacaacagaagaacccggcaggatgagcctgccctgttcgtggccctgaccttcgagcggcgggaggtcctggactcctccaatatcaaaccaatgaacctgatcggcgtggcaagaggcgaaaacatccccgccgtgatcgccctgaccgaccccgagggctgcccactgagccggtttaaggatagcctgggaaacccaacccacatcctgagaatcggcgagagctataaggagaagcagcggaccatccaggccaagaaggaggtggagcagcggagagccggcggctacagccggaagtacgccagcaaagccaagaatctggcagacgatatggtgagaaacaccgctagagatctgctgtactacgccgtgacccaggatgccatgctgatcttcgccaacctgagccggggcttcggccggcagggcaagcggaccttcatggccgagagacagtacacacggatggaggactggctgaccgccaagctggcctacgagggcctgagcaagacctacctgtccaagacactggcccagtacacctccaagacatgcagcaactgtgggtttaccatcaccagcgccgactacgacagggtgctggagaagctgaagaagacagcaacaggctggatgaccacaattaacggcaaggagctgaaggtggagggccagattacctactacaacagatacaagagacagaacgtagtcaaggacctgtccgtcgagctggatagactgagcgaagaatctgtgaacaacgacatctcctcctggacaaagggcagaagcggagaagctctgagcctcctgaagaaaagattctcccatagacccgtgcaggagaagttcgtgtgcctgaactgcggcttcgagacacacgcagccgagcaagccgccctgaacatcgccagatcctggctgttcctgcggagccaggagtacaagaaataccagacaaacaagacaaccggcaacaccgataagagagccttcgtcgagacctggcagtccttttaccggaagaagcttaaggaggtgtggaaacctgccgtgcggtctggcggatctggcggaggctcctagcgaggacctggtgaccttcagggacgtggccgtggacttcagccaggaggagtgggagcagctgaacagcgcccagaggggcctgtacagggacgtgatgctggagaactacaggagcctggtgagcctgggcgtgagcgtgagcaagcccgacgtgatcagcctgctggagcagggcaaggagccctgggtggtgaaggagggcaccaggggcacctacagcgactggaagtacgccttcggatctggctccggcagcggccccaagaaaaagagaaaagtctaagctgccttctgcggggcttgccttctggccatgcccttcttctctcccttgcacctgtacctcttggtctttgaataaagcctgagtaggaaggctagcaaaaaaaaaaaaaaaaaaaaaaaaaaaaaaaaaaaaaaaaaaaaaaaaaaaaaaaaaaaaaaaaaaaaaaaaaaaaaaaa

SEQ ID NO: 16464 - RNA, 9485 nt, synthetic construct
  source 1..9485: mol_type = other RNA
aggaaataagagagaaaagaagagtaagaagaaatataagagccaccatggcccctaagaagaagcgtaaagtgagccggatggaacgcctcgtctacgaggtgcggcagaagtgcagaaacatcgaggacatctgcatctcctgcggatctctgaacgtgaccctggagcacccactgttcatcggcggcatgtgccagaactgtaaaaactgttttctggagtgtgcctatcaatacgacgatgacggctaccagagctactgcaccatctgttgcggcggaagagaggtgctgatgtgtggaaataacaactgctgccggtgcttctgcgtggaatgcgtggacctgctggtgggccccggcgccgcccaggccgctattaaggaagatccttggaactgctacatgtgcggccacaagggcacatacggcctgctgagacggagagaggactggcctagcagactgcagatgttcttcgccaataaccacgaccaggagttcgacccccctaaggtgtaccctcccgtccccgccgagaagagaaagcccatccgggtcctgagcctgttcgatggcatcgccaccggtctgctggtgctgaaggacctgggcatccaggtggataggtacattgcctccgaggtgtgcgaggactccatcaccgtgggaatggtgcgtcatcagggcaagatcatgtacgtgggcgacgtgcggagcgtgacacagaagcatatccaggagtggggccctttcgacctggtgatcggcggcagcccttgcaatgacctgagcatcgtgaacccagcccggaagggcctgtacgagggaaccggcagactgttcttcgagttttacagactgctgcacgacgcccggcctaaggaaggcgacgaccggcccttcttttggctgttcgagaatgtggtggccatgggagtcagcgacaagcgggatattagccggttcctggagagcaaccccgtgatgatcgatgccaaggaagtgagcgccgcccaccgggccagatacttctggggcaatctgcctggcatgaacagacccctggccagcaccgtgaacgacaagctggagctgcaggagtgcctggagcacggccggatcgccaagttcagcaaggtgagaaccatcaccacccgaagcaacagcatcaaacaaggcaaggaccagcactttcctgtgttcatgaacgagaaggaggacatcctgtggtgtaccgagatggagagagtgttcgggttcccagtccactacacagatgtcagcaacatgtctagactggccagacagagactgctgggaagaagctggtccgtccctgtgatcagacacctgttcgcccctctgaaggagtacttcgcctgcgtgagcagcggcaacagcaacgccaacagccggggccccagcttctctagcggcctggtgccactgtccctgagagggagccacatgggccccatggagatctacaaaaccgtgagcgcctggaagcggcagcctgtgcgcgtgctgagcctgtttcggaatatcgataaagtcctgaaaagcctgggattcctggagagcggctctggctccggcggtggcaccctgaagtacgtggaggatgtgacaaacgtggtcagacgggatgtggagaagtggggccccttcgatctggtgtacggcagcacccaacccctgggcagctcttgtgaccggtgccctggctggtacatgtttcagttccaccggatcctgcagtacgccctgccgagacaggagtcccagcggccattcttttggattttcatggacaacttgctgctgaccgaggatgaccaggaaactaccactcggttcctgcagaccgaagccgtgaccctgcaggacgtgagaggccgggactaccagaacgccatgcgggtgtggtccaacatccctggactgaaaagcaagcacgcacctctgacccctaaagaagaggagtacctgcaggcccaggtgcggagcagaagcaagctggacgcccctaaggtggatctgctggtgaagaattgcctcctgcccctgagagagtacttcaagtatttcagccagaatagtctgcccctgggaggcagcggcggcggcgccctggtgacatttgaggacgtcgccgtgcggttcacccaggaggaatgggctctgctggatccttctcagaaaatcctgtaccgggacgtgatgagagagacataccggaatctgacctccgtgggcatcaactgggaatgttgggaccttgaagcctgcttcagaagcctgggaagaaacctgagagtgcaggtggtgaagagaaagtgcgagctgaccaacagcggcccctgcgccgagggcggcccaagcagcggcgcccctcctcccagcggcggcagcccagccggctccccaacctctaccgaggagggcacctctgagtccgccacccccgagagcggccctggcacctccaccgagcccagcgagggcagcgcacccggcagccctgccggcagccccacctccacagaggagggaaccagcaccgagcccagcgaaggcagcgccccaggcaccagcaccgagcctagtgagcaggagattaaacggatcaacaagatcagaagaagacttgtgaaagacagcaacaccaagaaggccggcaagacaggccccatgaaaaccctgctggttagagtgatgacacccgatctgagagagcggctggaaaacctgagaaagaagcctgaaaatatcccccagcccatcagcaatacatctagagccaacctgaataagctgctgaccgattacaccgaaatgaagaaggcgatcctgcatgtgtactgggaagagttccagaaggaccctgtgggcctgatgagccgggtggcccagcctgccagcaagaagatcgatcagaacaagctgaaacctgagatggacgagaagggcaacctgaccaccgccggctttgcctgctctcagtgtggccagcccctgttcgtgtacaagctggagcaggtgtctgagaagggcaaggcttacaccaactacttcggacggtgcaatgtggccgagcacgaaaagctgatcctgctggcccagctgaagcccgagaaggatagcgacgaagccgtgacatatagcctgggaaagtttgggcagagggccctggatttctacagcattcatgtgaccaaggagtccacccaccccgtgaagcccctggcccagatcgccggaaacagatacgcctccggacctgtgggaaaggccctgagcgacgcatgtatgggcacaatcgcctccttcctgtctaagtaccaggacatcatcatcgaacaccagaaggtggtgaagggcaaccagaagagactggagagcctgcgggagctggccggcaaggaaaacctggaataccctagcgtgaccctgccacctcagcctcacaccaaggagggcgttgatgcctacaacgaagtgatcgcccgggtgcgaatgtgggtgaacctgaacctgtggcagaagctgaagctaagcagagatgatgccaagcctctgctgagactgaagggattcccttcctttcctctggtcgagagacaggccaacgaagtggactggtgggacatggtgtgtaacgtgaagaagctgatcaacgagaaaaaggaggatggcaaggtgttttggcagaatctggctggctacaagagacaggaagccctgagaccatacctgagcagcgaggaagatcggaagaagggaaagaaattcgctcggtaccagctgggcgacctgctgctgcacctggaaaagaagcacggcgaggactggggaaaggtgtacgacgaggcctgggagcggattgacaagaaagtggaaggcctgagcaagcacatcaagctggaagaggaacggagaagcgaggacgcccagagcaaggccgccctgaccgactggctgcgggctaaggccagcttcgtgatcgagggcctgaaggaggccgacaaggacgagttctgcagatgcgagctgaagctgcagaagtggtacggggacctgcggggaaagcccttcgccatcgaagccgagaacagcatcctggacatcagcggcttcagcaagcagtacaactgtgccttcatctggcagaaggacggcgtgaagaagctgaacctgtacctgatcatcaactacttcaagggcggcaagctgcggttcaagaagatcaaacctgaagccttcgaagccaacagattctacaccgtgatcaacaaaaagagcggcgagatcgtgcccatggaggtgaacttcaacttcgacgaccccaacctgatcatcctgcctctggcctttggcaagagacagggcagagaattcatctggaacgacctgctgtccctggaaaccggcagcctgaagctggccaacggaagagtgatcgagaagacactgtacaacagaagaacccggcaggatgagcctgccctgttcgtggccctgaccttcgagcggcgggaggtcctggactcctccaatatcaaaccaatgaacctgatcggcgtggcaagaggcgaaaacatccccgccgtgatcgccctgaccgaccccgagggctgcccactgagccggtttaaggatagcctgggaaacccaacccacatcctgagaatcggcgagagctataaggagaagcagcggaccatccaggccaagaaggaggtggagcagcggagagccggcggctacagccggaagtacgccagcaaagccaagaatctggcagacgatatggtgagaaacaccgctagagatctgctgtactacgccgtgacccaggatgccatgctgatcttcgccaacctgagccggggcttcggccggcagggcaagcggaccttcatggccgagagacagtacacacggatggaggactggctgaccgccaagctggcctacgagggcctgagcaagacctacctgtccaagacactggcccagtacacctccaagacatgcagcaactgtgggtttaccatcaccagcgccgactacgacagggtgctggagaagctgaagaagacagcaacaggctggatgaccacaattaacggcaaggagctgaaggtggagggccagattacctactacaacagatacaagagacagaacgtagtcaaggacctgtccgtcgagctggatagactgagcgaagaatctgtgaacaacgacatctcctcctggacaaagggcagaagcggagaagctctgagcctcctgaagaaaagattctcccatagacccgtgcaggagaagttcgtgtgcctgaactgcggcttcgagacacacgcagccgagcaagccgccctgaacatcgccagatcctggctgttcctgcggagccaggagtacaagaaataccagacaaacaagacaaccggcaacaccgataagagagccttcgtcgagacctggcagtccttttaccggaagaagcttaaggaggtgtggaaacctgccgtgcggtctggcggatctggcggaggctcctgctggggcctgctgagcttcaaggacatcagcatggagttcacctgggacgagtggcagctgctggacagcacccagaagtacctgtacagggacgtgatcctggagaactaccacaacctgatcagcgtgggctaccacggcaccaagcccgacctgatcttcaagctggagcagggcgaggacccctggatcatcaacgccaagatcagcaggcagagcaggcccgacggctgggaggagggcggcccaagcagcggcgcccctcctcccagcggcggcagcccagccggctccccaacctctaccgaggagggcacctctgagtccgccacccccgagagcggccctggcacctccaccgagcccagcgagggcagcgcacccggcagccctgccggcagccccacctccacagaggagggaaccagcaccgagcccagcgaaggcagcgccccaggcaccagcaccgagcctagtgagcaggagattaaacggatcaacaagatcagaagaagacttgtgaaagacagcaacaccaagaaggccggcaagacaggccccatgaaaaccctgctggttagagtgatgacacccgatctgagagagcggctggaaaacctgagaaagaagcctgaaaatatcccccagcccatcagcaatacatctagagccaacctgaataagctgctgaccgattacaccgaaatgaagaaggcgatcctgcatgtgtactgggaagagttccagaaggaccctgtgggcctgatgagccgggtggcccagcctgccagcaagaagatcgatcagaacaagctgaaacctgagatggacgagaagggcaacctgaccaccgccggctttgcctgctctcagtgtggccagcccctgttcgtgtacaagctggagcaggtgtctgagaagggcaaggcttacaccaactacttcggacggtgcaatgtggccgagcacgaaaagctgatcctgctggcccagctgaagcccgagaaggatagcgacgaagccgtgacatatagcctgggaaagtttgggcagagggccctggatttctacagcattcatgtgaccaaggagtccacccaccccgtgaagcccctggcccagatcgccggaaacagatacgcctccggacctgtgggaaaggccctgagcgacgcatgtatgggcacaatcgcctccttcctgtctaagtaccaggacatcatcatcgaacaccagaaggtggtgaagggcaaccagaagagactggagagcctgcgggagctggccggcaaggaaaacctggaataccctagcgtgaccctgccacctcagcctcacaccaaggagggcgttgatgcctacaacgaagtgatcgcccgggtgcgaatgtgggtgaacctgaacctgtggcagaagctgaagctaagcagagatgatgccaagcctctgctgagactgaagggattcccttcctttcctctggtcgagagacaggccaacgaagtggactggtgggacatggtgtgtaacgtgaagaagctgatcaacgagaaaaaggaggatggcaaggtgttttggcagaatctggctggctacaagagacaggaagccctgagaccatacctgagcagcgaggaagatcggaagaagggaaagaaattcgctcggtaccagctgggcgacctgctgctgcacctggaaaagaagcacggcgaggactggggaaaggtgtacgacgaggcctgggagcggattgacaagaaagtggaaggcctgagcaagcacatcaagctggaagaggaacggagaagcgaggacgcccagagcaaggccgccctgaccgactggctgcgggctaaggccagcttcgtgatcgagggcctgaaggaggccgacaaggacgagttctgcagatgcgagctgaagctgcagaagtggtacggggacctgcggggaaagcccttcgccatcgaagccgagaacagcatcctggacatcagcggcttcagcaagcagtacaactgtgccttcatctggcagaaggacggcgtgaagaagctgaacctgtacctgatcatcaactacttcaagggcggcaagctgcggttcaagaagatcaaacctgaagccttcgaagccaacagattctacaccgtgatcaacaaaaagagcggcgagatcgtgcccatggaggtgaacttcaacttcgacgaccccaacctgatcatcctgcctctggcctttggcaagagacagggcagagaattcatctggaacgacctgctgtccctggaaaccggcagcctgaagctggccaacggaagagtgatcgagaagacactgtacaacagaagaacccggcaggatgagcctgccctgttcgtggccctgaccttcgagcggcgggaggtcctggactcctccaatatcaaaccaatgaacctgatcggcgtggcaagaggcgaaaacatccccgccgtgatcgccctgaccgaccccgagggctgcccactgagccggtttaaggatagcctgggaaacccaacccacatcctgagaatcggcgagagctataaggagaagcagcggaccatccaggccaagaaggaggtggagcagcggagagccggcggctacagccggaagtacgccagcaaagccaagaatctggcagacgatatggtgagaaacaccgctagagatctgctgtactacgccgtgacccaggatgccatgctgatcttcgccaacctgagccggggcttcggccggcagggcaagcggaccttcatggccgagagacagtacacacggatggaggactggctgaccgccaagctggcctacgagggcctgagcaagacctacctgtccaagacactggcccagtacacctccaagacatgcagcaactgtgggtttaccatcaccagcgccgactacgacagggtgctggagaagctgaagaagacagcaacaggctggatgaccacaattaacggcaaggagctgaaggtggagggccagattacctactacaacagatacaagagacagaacgtagtcaaggacctgtccgtcgagctggatagactgagcgaagaatctgtgaacaacgacatctcctcctggacaaagggcagaagcggagaagctctgagcctcctgaagaaaagattctcccatagacccgtgcaggagaagttcgtgtgcctgaactgcggcttcgagacacacgcagccgagcaagccgccctgaacatcgccagatcctggctgttcctgcggagccaggagtacaagaaataccagacaaacaagacaaccggcaacaccgataagagagccttcgtcgagacctggcagtccttttaccggaagaagcttaaggaggtgtggaaacctgccgtgcggtctggcggatctggcggaggctccttgctggggcctgctgagcttcaaggacatcagcatggagttcacctgggacgagtggcagctgctggacagcacccagaagtacctgtacagggacgtgatcctggagaactaccacaacctgatcagcgtgggctaccacggcaccaagcccgacctgatcttcaagctggagcagggcgaggacccctggatcatcaacgccaagatcagcaggcagagcaggcccgacggctgggaggagggatctggctccggcagcggccccaagaaaaagagaaaagtctaagctgccttctgcggggcttgccttctggccatgcccttcttctctcccttgcacctgtacctcttggtctttgaataaagcctgagtaggaaggctagcaaaaaaaaaaaaaaaaaaaaaaaaaaaaaaaaaaaaaaaaaaaaaaaaaaaaaaaaaaaaaaaaaaaaaaaaaaaaaaaa

SEQ ID NO: 16465 - RNA, 9485 nt, synthetic construct
  source 1..9485: mol_type = other RNA
aggaaataagagagaaaagaagagtaagaagaaatataagagccaccatggcccctaagaagaagcgtaaagtgagccggatggaacgcctcgtctacgaggtgcggcagaagtgcagaaacatcgaggacatctgcatctcctgcggatctctgaacgtgaccctggagcacccactgttcatcggcggcatgtgccagaactgtaaaaactgttttctggagtgtgcctatcaatacgacgatgacggctaccagagctactgcaccatctgttgcggcggaagagaggtgctgatgtgtggaaataacaactgctgccggtgcttctgcgtggaatgcgtggacctgctggtgggccccggcgccgcccaggccgctattaaggaagatccttggaactgctacatgtgcggccacaagggcacatacggcctgctgagacggagagaggactggcctagcagactgcagatgttcttcgccaataaccacgaccaggagttcgacccccctaaggtgtaccctcccgtccccgccgagaagagaaagcccatccgggtcctgagcctgttcgatggcatcgccaccggtctgctggtgctgaaggacctgggcatccaggtggataggtacattgcctccgaggtgtgcgaggactccatcaccgtgggaatggtgcgtcatcagggcaagatcatgtacgtgggcgacgtgcggagcgtgacacagaagcatatccaggagtggggccctttcgacctggtgatcggcggcagcccttgcaatgacctgagcatcgtgaacccagcccggaagggcctgtacgagggaaccggcagactgttcttcgagttttacagactgctgcacgacgcccggcctaaggaaggcgacgaccggcccttcttttggctgttcgagaatgtggtggccatgggagtcagcgacaagcgggatattagccggttcctggagagcaaccccgtgatgatcgatgccaaggaagtgagcgccgcccaccgggccagatacttctggggcaatctgcctggcatgaacagacccctggccagcaccgtgaacgacaagctggagctgcaggagtgcctggagcacggccggatcgccaagttcagcaaggtgagaaccatcaccacccgaagcaacagcatcaaacaaggcaaggaccagcactttcctgtgttcatgaacgagaaggaggacatcctgtggtgtaccgagatggagagagtgttcgggttcccagtccactacacagatgtcagcaacatgtctagactggccagacagagactgctgggaagaagctggtccgtccctgtgatcagacacctgttcgcccctctgaaggagtacttcgcctgcgtgagcagcggcaacagcaacgccaacagccggggccccagcttctctagcggcctggtgccactgtccctgagagggagccacatgggccccatggagatctacaaaaccgtgagcgcctggaagcggcagcctgtgcgcgtgctgagcctgtttcggaatatcgataaagtcctgaaaagcctgggattcctggagagcggctctggctccggcggtggcaccctgaagtacgtggaggatgtgacaaacgtggtcagacgggatgtggagaagtggggccccttcgatctggtgtacggcagcacccaacccctgggcagctcttgtgaccggtgccctggctggtacatgtttcagttccaccggatcctgcagtacgccctgccgagacaggagtcccagcggccattcttttggattttcatggacaacttgctgctgaccgaggatgaccaggaaactaccactcggttcctgcagaccgaagccgtgaccctgcaggacgtgagaggccgggactaccagaacgccatgcgggtgtggtccaacatccctggactgaaaagcaagcacgcacctctgacccctaaagaagaggagtacctgcaggcccaggtgcggagcagaagcaagctggacgcccctaaggtggatctgctggtgaagaattgcctcctgcccctgagagagtacttcaagtatttcagccagaatagtctgcccctgggaggcagcggcggcggcgccctggtgacatttgaggacgtcgccgtgcggttcacccaggaggaatgggctctgctggatccttctcagaaaatcctgtaccgggacgtgatgagagagacataccggaatctgacctccgtgggcatcaactgggaatgttgggaccttgaagcctgcttcagaagcctgggaagaaacctgagagtgcaggtggtgaagagaaagtgcgagctgaccaacagcggcccctgcgccgagggcggcccaagcagcggcgcccctcctcccagcggcggcagcccagccggctccccaacctctaccgaggagggcacctctgagtccgccacccccgagagcggccctggcacctccaccgagcccagcgagggcagcgcacccggcagccctgccggcagccccacctccacagaggagggaaccagcaccgagcccagcgaaggcagcgccccaggcaccagcaccgagcctagtgagcaggagattaaacggatcaacaagatcagaagaagacttgtgaaagacagcaacaccaagaaggccggcaagacaggccccatgaaaaccctgctggttagagtgatgacacccgatctgagagagcggctggaaaacctgagaaagaagcctgaaaatatcccccagcccatcagcaatacatctagagccaacctgaataagctgctgaccgattacaccgaaatgaagaaggcgatcctgcatgtgtactgggaagagttccagaaggaccctgtgggcctgatgagccgggtggcccagcctgccagcaagaagatcgatcagaacaagctgaaacctgagatggacgagaagggcaacctgaccaccgccggctttgcctgctctcagtgtggccagcccctgttcgtgtacaagctggagcaggtgtctgagaagggcaaggcttacaccaactacttcggacggtgcaatgtggccgagcacgaaaagctgatcctgctggcccagctgaagcccgagaaggatagcgacgaagccgtgacatatagcctgggaaagtttgggcagagggccctggatttctacagcattcatgtgaccaaggagtccacccaccccgtgaagcccctggcccagatcgccggaaacagatacgcctccggacctgtgggaaaggccctgagcgacgcatgtatgggcacaatcgcctccttcctgtctaagtaccaggacatcatcatcgaacaccagaaggtggtgaagggcaaccagaagagactggagagcctgcgggagctggccggcaaggaaaacctggaataccctagcgtgaccctgccacctcagcctcacaccaaggagggcgttgatgcctacaacgaagtgatcgcccgggtgcgaatgtgggtgaacctgaacctgtggcagaagctgaagctaagcagagatgatgccaagcctctgctgagactgaagggattcccttcctttcctctggtcgagagacaggccaacgaagtggactggtgggacatggtgtgtaacgtgaagaagctgatcaacgagaaaaaggaggatggcaaggtgttttggcagaatctggctggctacaagagacaggaagccctgagaccatacctgagcagcgaggaagatcggaagaagggaaagaaattcgctcggtaccagctgggcgacctgctgctgcacctggaaaagaagcacggcgaggactggggaaaggtgtacgacgaggcctgggagcggattgacaagaaagtggaaggcctgagcaagcacatcaagctggaagaggaacggagaagcgaggacgcccagagcaaggccgccctgaccgactggctgcgggctaaggccagcttcgtgatcgagggcctgaaggaggccgacaaggacgagttctgcagatgcgagctgaagctgcagaagtggtacggggacctgcggggaaagcccttcgccatcgaagccgagaacagcatcctggacatcagcggcttcagcaagcagtacaactgtgccttcatctggcagaaggacggcgtgaagaagctgaacctgtacctgatcatcaactacttcaagggcggcaagctgcggttcaagaagatcaaacctgaagccttcgaagccaacagattctacaccgtgatcaacaaaaagagcggcgagatcgtgcccatggaggtgaacttcaacttcgacgaccccaacctgatcatcctgcctctggcctttggcaagagacagggcagagaattcatctggaacgacctgctgtccctggaaaccggcagcctgaagctggccaacggaagagtgatcgagaagacactgtacaacagaagaacccggcaggatgagcctgccctgttcgtggccctgaccttcgagcggcgggaggtcctggactcctccaatatcaaaccaatgaacctgatcggcgtggcaagaggcgaaaacatccccgccgtgatcgccctgaccgaccccgagggctgcccactgagccggtttaaggatagcctgggaaacccaacccacatcctgagaatcggcgagagctataaggagaagcagcggaccatccaggccaagaaggaggtggagcagcggagagccggcggctacagccggaagtacgccagcaaagccaagaatctggcagacgatatggtgagaaacaccgctagagatctgctgtactacgccgtgacccaggatgccatgctgatcttcgccaacctgagccggggcttcggccggcagggcaagcggaccttcatggccgagagacagtacacacggatggaggactggctgaccgccaagctggcctacgagggcctgagcaagacctacctgtccaagacactggcccagtacacctccaagacatgcagcaactgtgggtttaccatcaccagcgccgactacgacagggtgctggagaagctgaagaagacagcaacaggctggatgaccacaattaacggcaaggagctgaaggtggagggccagattacctactacaacagatacaagagacagaacgtagtcaaggacctgtccgtcgagctggatagactgagcgaagaatctgtgaacaacgacatctcctcctggacaaagggcagaagcggagaagctctgagcctcctgaagaaaagattctcccatagacccgtgcaggagaagttcgtgtgcctgaactgcggcttcgagacacacgcagccgagcaagccgccctgaacatcgccagatcctggctgttcctgcggagccaggagtacaagaaataccagacaaacaagacaaccggcaacaccgataagagagccttcgtcgagacctggcagtccttttaccggaagaagcttaaggaggtgtggaaacctgccgtgcggtctggcggatctggcggaggctcccagatgaggctgaggttcgaggacatcagcgtgagcttcagccaggaggagtgggcctacctggacgaggagcagaaggagctgtacagggaggtgatgagggacaactaccagaccctgatcagcctgggcgtgggcttcagcagcgtgacccccgacatcatcagcaggatcgagcagggcgaggagccctacgtgagggacgagcccggcagcgaggagagggagaccggcaggagcagcggcggcccaagcagcggcgcccctcctcccagcggcggcagcccagccggctccccaacctctaccgaggagggcacctctgagtccgccacccccgagagcggccctggcacctccaccgagcccagcgagggcagcgcacccggcagccctgccggcagccccacctccacagaggagggaaccagcaccgagcccagcgaaggcagcgccccaggcaccagcaccgagcctagtgagcaggagattaaacggatcaacaagatcagaagaagacttgtgaaagacagcaacaccaagaaggccggcaagacaggccccatgaaaaccctgctggttagagtgatgacacccgatctgagagagcggctggaaaacctgagaaagaagcctgaaaatatcccccagcccatcagcaatacatctagagccaacctgaataagctgctgaccgattacaccgaaatgaagaaggcgatcctgcatgtgtactgggaagagttccagaaggaccctgtgggcctgatgagccgggtggcccagcctgccagcaagaagatcgatcagaacaagctgaaacctgagatggacgagaagggcaacctgaccaccgccggctttgcctgctctcagtgtggccagcccctgttcgtgtacaagctggagcaggtgtctgagaagggcaaggcttacaccaactacttcggacggtgcaatgtggccgagcacgaaaagctgatcctgctggcccagctgaagcccgagaaggatagcgacgaagccgtgacatatagcctgggaaagtttgggcagagggccctggatttctacagcattcatgtgaccaaggagtccacccaccccgtgaagcccctggcccagatcgccggaaacagatacgcctccggacctgtgggaaaggccctgagcgacgcatgtatgggcacaatcgcctccttcctgtctaagtaccaggacatcatcatcgaacaccagaaggtggtgaagggcaaccagaagagactggagagcctgcgggagctggccggcaaggaaaacctggaataccctagcgtgaccctgccacctcagcctcacaccaaggagggcgttgatgcctacaacgaagtgatcgcccgggtgcgaatgtgggtgaacctgaacctgtggcagaagctgaagctaagcagagatgatgccaagcctctgctgagactgaagggattcccttcctttcctctggtcgagagacaggccaacgaagtggactggtgggacatggtgtgtaacgtgaagaagctgatcaacgagaaaaaggaggatggcaaggtgttttggcagaatctggctggctacaagagacaggaagccctgagaccatacctgagcagcgaggaagatcggaagaagggaaagaaattcgctcggtaccagctgggcgacctgctgctgcacctggaaaagaagcacggcgaggactggggaaaggtgtacgacgaggcctgggagcggattgacaagaaagtggaaggcctgagcaagcacatcaagctggaagaggaacggagaagcgaggacgcccagagcaaggccgccctgaccgactggctgcgggctaaggccagcttcgtgatcgagggcctgaaggaggccgacaaggacgagttctgcagatgcgagctgaagctgcagaagtggtacggggacctgcggggaaagcccttcgccatcgaagccgagaacagcatcctggacatcagcggcttcagcaagcagtacaactgtgccttcatctggcagaaggacggcgtgaagaagctgaacctgtacctgatcatcaactacttcaagggcggcaagctgcggttcaagaagatcaaacctgaagccttcgaagccaacagattctacaccgtgatcaacaaaaagagcggcgagatcgtgcccatggaggtgaacttcaacttcgacgaccccaacctgatcatcctgcctctggcctttggcaagagacagggcagagaattcatctggaacgacctgctgtccctggaaaccggcagcctgaagctggccaacggaagagtgatcgagaagacactgtacaacagaagaacccggcaggatgagcctgccctgttcgtggccctgaccttcgagcggcgggaggtcctggactcctccaatatcaaaccaatgaacctgatcggcgtggcaagaggcgaaaacatccccgccgtgatcgccctgaccgaccccgagggctgcccactgagccggtttaaggatagcctgggaaacccaacccacatcctgagaatcggcgagagctataaggagaagcagcggaccatccaggccaagaaggaggtggagcagcggagagccggcggctacagccggaagtacgccagcaaagccaagaatctggcagacgatatggtgagaaacaccgctagagatctgctgtactacgccgtgacccaggatgccatgctgatcttcgccaacctgagccggggcttcggccggcagggcaagcggaccttcatggccgagagacagtacacacggatggaggactggctgaccgccaagctggcctacgagggcctgagcaagacctacctgtccaagacactggcccagtacacctccaagacatgcagcaactgtgggtttaccatcaccagcgccgactacgacagggtgctggagaagctgaagaagacagcaacaggctggatgaccacaattaacggcaaggagctgaaggtggagggccagattacctactacaacagatacaagagacagaacgtagtcaaggacctgtccgtcgagctggatagactgagcgaagaatctgtgaacaacgacatctcctcctggacaaagggcagaagcggagaagctctgagcctcctgaagaaaagattctcccatagacccgtgcaggagaagttcgtgtgcctgaactgcggcttcgagacacacgcagccgagcaagccgccctgaacatcgccagatcctggctgttcctgcggagccaggagtacaagaaataccagacaaacaagacaaccggcaacaccgataagagagccttcgtcgagacctggcagtccttttaccggaagaagcttaaggaggtgtggaaacctgccgtgcggtctggcggatctggcggaggctcctcagatgaggctgaggttcgaggacatcagcgtgagcttcagccaggaggagtgggcctacctggacgaggagcagaaggagctgtacagggaggtgatgagggacaactaccagaccctgatcagcctgggcgtgggcttcagcagcgtgacccccgacatcatcagcaggatcgagcagggcgaggagccctacgtgagggacgagcccggcagcgaggagagggagaccggcaggagcagcggatctggctccggcagcggccccaagaaaaagagaaaagtctaagctgccttctgcggggcttgccttctggccatgcccttcttctctcccttgcacctgtacctcttggtctttgaataaagcctgagtaggaaggctagcaaaaaaaaaaaaaaaaaaaaaaaaaaaaaaaaaaaaaaaaaaaaaaaaaaaaaaaaaaaaaaaaaaaaaaaaaaaaaaaa

SEQ ID NO: 16466 - RNA, 9485 nt, synthetic construct
  source 1..9485: mol_type = other RNA
aggaaataagagagaaaagaagagtaagaagaaatataagagccaccatggcccctaagaagaagcgtaaagtgagccggatggaacgcctcgtctacgaggtgcggcagaagtgcagaaacatcgaggacatctgcatctcctgcggatctctgaacgtgaccctggagcacccactgttcatcggcggcatgtgccagaactgtaaaaactgttttctggagtgtgcctatcaatacgacgatgacggctaccagagctactgcaccatctgttgcggcggaagagaggtgctgatgtgtggaaataacaactgctgccggtgcttctgcgtggaatgcgtggacctgctggtgggccccggcgccgcccaggccgctattaaggaagatccttggaactgctacatgtgcggccacaagggcacatacggcctgctgagacggagagaggactggcctagcagactgcagatgttcttcgccaataaccacgaccaggagttcgacccccctaaggtgtaccctcccgtccccgccgagaagagaaagcccatccgggtcctgagcctgttcgatggcatcgccaccggtctgctggtgctgaaggacctgggcatccaggtggataggtacattgcctccgaggtgtgcgaggactccatcaccgtgggaatggtgcgtcatcagggcaagatcatgtacgtgggcgacgtgcggagcgtgacacagaagcatatccaggagtggggccctttcgacctggtgatcggcggcagcccttgcaatgacctgagcatcgtgaacccagcccggaagggcctgtacgagggaaccggcagactgttcttcgagttttacagactgctgcacgacgcccggcctaaggaaggcgacgaccggcccttcttttggctgttcgagaatgtggtggccatgggagtcagcgacaagcgggatattagccggttcctggagagcaaccccgtgatgatcgatgccaaggaagtgagcgccgcccaccgggccagatacttctggggcaatctgcctggcatgaacagacccctggccagcaccgtgaacgacaagctggagctgcaggagtgcctggagcacggccggatcgccaagttcagcaaggtgagaaccatcaccacccgaagcaacagcatcaaacaaggcaaggaccagcactttcctgtgttcatgaacgagaaggaggacatcctgtggtgtaccgagatggagagagtgttcgggttcccagtccactacacagatgtcagcaacatgtctagactggccagacagagactgctgggaagaagctggtccgtccctgtgatcagacacctgttcgcccctctgaaggagtacttcgcctgcgtgagcagcggcaacagcaacgccaacagccggggccccagcttctctagcggcctggtgccactgtccctgagagggagccacatgggccccatggagatctacaaaaccgtgagcgcctggaagcggcagcctgtgcgcgtgctgagcctgtttcggaatatcgataaagtcctgaaaagcctgggattcctggagagcggctctggctccggcggtggcaccctgaagtacgtggaggatgtgacaaacgtggtcagacgggatgtggagaagtggggccccttcgatctggtgtacggcagcacccaacccctgggcagctcttgtgaccggtgccctggctggtacatgtttcagttccaccggatcctgcagtacgccctgccgagacaggagtcccagcggccattcttttggattttcatggacaacttgctgctgaccgaggatgaccaggaaactaccactcggttcctgcagaccgaagccgtgaccctgcaggacgtgagaggccgggactaccagaacgccatgcgggtgtggtccaacatccctggactgaaaagcaagcacgcacctctgacccctaaagaagaggagtacctgcaggcccaggtgcggagcagaagcaagctggacgcccctaaggtggatctgctggtgaagaattgcctcctgcccctgagagagtacttcaagtatttcagccagaatagtctgcccctgggaggcagcggcggcggcgccctggtgacatttgaggacgtcgccgtgcggttcacccaggaggaatgggctctgctggatccttctcagaaaatcctgtaccgggacgtgatgagagagacataccggaatctgacctccgtgggcatcaactgggaatgttgggaccttgaagcctgcttcagaagcctgggaagaaacctgagagtgcaggtggtgaagagaaagtgcgagctgaccaacagcggcccctgcgccgagggcggcccaagcagcggcgcccctcctcccagcggcggcagcccagccggctccccaacctctaccgaggagggcacctctgagtccgccacccccgagagcggccctggcacctccaccgagcccagcgagggcagcgcacccggcagccctgccggcagccccacctccacagaggagggaaccagcaccgagcccagcgaaggcagcgccccaggcaccagcaccgagcctagtgagcaggagattaaacggatcaacaagatcagaagaagacttgtgaaagacagcaacaccaagaaggccggcaagacaggccccatgaaaaccctgctggttagagtgatgacacccgatctgagagagcggctggaaaacctgagaaagaagcctgaaaatatcccccagcccatcagcaatacatctagagccaacctgaataagctgctgaccgattacaccgaaatgaagaaggcgatcctgcatgtgtactgggaagagttccagaaggaccctgtgggcctgatgagccgggtggcccagcctgccagcaagaagatcgatcagaacaagctgaaacctgagatggacgagaagggcaacctgaccaccgccggctttgcctgctctcagtgtggccagcccctgttcgtgtacaagctggagcaggtgtctgagaagggcaaggcttacaccaactacttcggacggtgcaatgtggccgagcacgaaaagctgatcctgctggcccagctgaagcccgagaaggatagcgacgaagccgtgacatatagcctgggaaagtttgggcagagggccctggatttctacagcattcatgtgaccaaggagtccacccaccccgtgaagcccctggcccagatcgccggaaacagatacgcctccggacctgtgggaaaggccctgagcgacgcatgtatgggcacaatcgcctccttcctgtctaagtaccaggacatcatcatcgaacaccagaaggtggtgaagggcaaccagaagagactggagagcctgcgggagctggccggcaaggaaaacctggaataccctagcgtgaccctgccacctcagcctcacaccaaggagggcgttgatgcctacaacgaagtgatcgcccgggtgcgaatgtgggtgaacctgaacctgtggcagaagctgaagctaagcagagatgatgccaagcctctgctgagactgaagggattcccttcctttcctctggtcgagagacaggccaacgaagtggactggtgggacatggtgtgtaacgtgaagaagctgatcaacgagaaaaaggaggatggcaaggtgttttggcagaatctggctggctacaagagacaggaagccctgagaccatacctgagcagcgaggaagatcggaagaagggaaagaaattcgctcggtaccagctgggcgacctgctgctgcacctggaaaagaagcacggcgaggactggggaaaggtgtacgacgaggcctgggagcggattgacaagaaagtggaaggcctgagcaagcacatcaagctggaagaggaacggagaagcgaggacgcccagagcaaggccgccctgaccgactggctgcgggctaaggccagcttcgtgatcgagggcctgaaggaggccgacaaggacgagttctgcagatgcgagctgaagctgcagaagtggtacggggacctgcggggaaagcccttcgccatcgaagccgagaacagcatcctggacatcagcggcttcagcaagcagtacaactgtgccttcatctggcagaaggacggcgtgaagaagctgaacctgtacctgatcatcaactacttcaagggcggcaagctgcggttcaagaagatcaaacctgaagccttcgaagccaacagattctacaccgtgatcaacaaaaagagcggcgagatcgtgcccatggaggtgaacttcaacttcgacgaccccaacctgatcatcctgcctctggcctttggcaagagacagggcagagaattcatctggaacgacctgctgtccctggaaaccggcagcctgaagctggccaacggaagagtgatcgagaagacactgtacaacagaagaacccggcaggatgagcctgccctgttcgtggccctgaccttcgagcggcgggaggtcctggactcctccaatatcaaaccaatgaacctgatcggcgtggcaagaggcgaaaacatccccgccgtgatcgccctgaccgaccccgagggctgcccactgagccggtttaaggatagcctgggaaacccaacccacatcctgagaatcggcgagagctataaggagaagcagcggaccatccaggccaagaaggaggtggagcagcggagagccggcggctacagccggaagtacgccagcaaagccaagaatctggcagacgatatggtgagaaacaccgctagagatctgctgtactacgccgtgacccaggatgccatgctgatcttcgccaacctgagccggggcttcggccggcagggcaagcggaccttcatggccgagagacagtacacacggatggaggactggctgaccgccaagctggcctacgagggcctgagcaagacctacctgtccaagacactggcccagtacacctccaagacatgcagcaactgtgggtttaccatcaccagcgccgactacgacagggtgctggagaagctgaagaagacagcaacaggctggatgaccacaattaacggcaaggagctgaaggtggagggccagattacctactacaacagatacaagagacagaacgtagtcaaggacctgtccgtcgagctggatagactgagcgaagaatctgtgaacaacgacatctcctcctggacaaagggcagaagcggagaagctctgagcctcctgaagaaaagattctcccatagacccgtgcaggagaagttcgtgtgcctgaactgcggcttcgagacacacgcagccgagcaagccgccctgaacatcgccagatcctggctgttcctgcggagccaggagtacaagaaataccagacaaacaagacaaccggcaacaccgataagagagccttcgtcgagacctggcagtccttttaccggaagaagcttaaggaggtgtggaaacctgccgtgcggtctggcggatctggcggaggctccgtgaccttcgaggacgtggccgtgaacttcagcagggaggagtgggccctgctggaccccccccagaggaagctgtacagggacgtgatgtgggagaccctgaggcacctggccgccgtggacgaccagcagagcgaggacgagttcaggaacttccagaagagggtgaggagcgaggaggtggagaaggccagccagtacaccctgtggtaccagcacggcgagatggacagcaggacccccggcggcccaagcagcggcgcccctcctcccagcggcggcagcccagccggctccccaacctctaccgaggagggcacctctgagtccgccacccccgagagcggccctggcacctccaccgagcccagcgagggcagcgcacccggcagccctgccggcagccccacctccacagaggagggaaccagcaccgagcccagcgaaggcagcgccccaggcaccagcaccgagcctagtgagcaggagattaaacggatcaacaagatcagaagaagacttgtgaaagacagcaacaccaagaaggccggcaagacaggccccatgaaaaccctgctggttagagtgatgacacccgatctgagagagcggctggaaaacctgagaaagaagcctgaaaatatcccccagcccatcagcaatacatctagagccaacctgaataagctgctgaccgattacaccgaaatgaagaaggcgatcctgcatgtgtactgggaagagttccagaaggaccctgtgggcctgatgagccgggtggcccagcctgccagcaagaagatcgatcagaacaagctgaaacctgagatggacgagaagggcaacctgaccaccgccggctttgcctgctctcagtgtggccagcccctgttcgtgtacaagctggagcaggtgtctgagaagggcaaggcttacaccaactacttcggacggtgcaatgtggccgagcacgaaaagctgatcctgctggcccagctgaagcccgagaaggatagcgacgaagccgtgacatatagcctgggaaagtttgggcagagggccctggatttctacagcattcatgtgaccaaggagtccacccaccccgtgaagcccctggcccagatcgccggaaacagatacgcctccggacctgtgggaaaggccctgagcgacgcatgtatgggcacaatcgcctccttcctgtctaagtaccaggacatcatcatcgaacaccagaaggtggtgaagggcaaccagaagagactggagagcctgcgggagctggccggcaaggaaaacctggaataccctagcgtgaccctgccacctcagcctcacaccaaggagggcgttgatgcctacaacgaagtgatcgcccgggtgcgaatgtgggtgaacctgaacctgtggcagaagctgaagctaagcagagatgatgccaagcctctgctgagactgaagggattcccttcctttcctctggtcgagagacaggccaacgaagtggactggtgggacatggtgtgtaacgtgaagaagctgatcaacgagaaaaaggaggatggcaaggtgttttggcagaatctggctggctacaagagacaggaagccctgagaccatacctgagcagcgaggaagatcggaagaagggaaagaaattcgctcggtaccagctgggcgacctgctgctgcacctggaaaagaagcacggcgaggactggggaaaggtgtacgacgaggcctgggagcggattgacaagaaagtggaaggcctgagcaagcacatcaagctggaagaggaacggagaagcgaggacgcccagagcaaggccgccctgaccgactggctgcgggctaaggccagcttcgtgatcgagggcctgaaggaggccgacaaggacgagttctgcagatgcgagctgaagctgcagaagtggtacggggacctgcggggaaagcccttcgccatcgaagccgagaacagcatcctggacatcagcggcttcagcaagcagtacaactgtgccttcatctggcagaaggacggcgtgaagaagctgaacctgtacctgatcatcaactacttcaagggcggcaagctgcggttcaagaagatcaaacctgaagccttcgaagccaacagattctacaccgtgatcaacaaaaagagcggcgagatcgtgcccatggaggtgaacttcaacttcgacgaccccaacctgatcatcctgcctctggcctttggcaagagacagggcagagaattcatctggaacgacctgctgtccctggaaaccggcagcctgaagctggccaacggaagagtgatcgagaagacactgtacaacagaagaacccggcaggatgagcctgccctgttcgtggccctgaccttcgagcggcgggaggtcctggactcctccaatatcaaaccaatgaacctgatcggcgtggcaagaggcgaaaacatccccgccgtgatcgccctgaccgaccccgagggctgcccactgagccggtttaaggatagcctgggaaacccaacccacatcctgagaatcggcgagagctataaggagaagcagcggaccatccaggccaagaaggaggtggagcagcggagagccggcggctacagccggaagtacgccagcaaagccaagaatctggcagacgatatggtgagaaacaccgctagagatctgctgtactacgccgtgacccaggatgccatgctgatcttcgccaacctgagccggggcttcggccggcagggcaagcggaccttcatggccgagagacagtacacacggatggaggactggctgaccgccaagctggcctacgagggcctgagcaagacctacctgtccaagacactggcccagtacacctccaagacatgcagcaactgtgggtttaccatcaccagcgccgactacgacagggtgctggagaagctgaagaagacagcaacaggctggatgaccacaattaacggcaaggagctgaaggtggagggccagattacctactacaacagatacaagagacagaacgtagtcaaggacctgtccgtcgagctggatagactgagcgaagaatctgtgaacaacgacatctcctcctggacaaagggcagaagcggagaagctctgagcctcctgaagaaaagattctcccatagacccgtgcaggagaagttcgtgtgcctgaactgcggcttcgagacacacgcagccgagcaagccgccctgaacatcgccagatcctggctgttcctgcggagccaggagtacaagaaataccagacaaacaagacaaccggcaacaccgataagagagccttcgtcgagacctggcagtccttttaccggaagaagcttaaggaggtgtggaaacctgccgtgcggtctggcggatctggcggaggctcctgtgaccttcgaggacgtggccgtgaacttcagcagggaggagtgggccctgctggaccccccccagaggaagctgtacagggacgtgatgtgggagaccctgaggcacctggccgccgtggacgaccagcagagcgaggacgagttcaggaacttccagaagagggtgaggagcgaggaggtggagaaggccagccagtacaccctgtggtaccagcacggcgagatggacagcaggacccccggatctggctccggcagcggccccaagaaaaagagaaaagtctaagctgccttctgcggggcttgccttctggccatgcccttcttctctcccttgcacctgtacctcttggtctttgaataaagcctgagtaggaaggctagcaaaaaaaaaaaaaaaaaaaaaaaaaaaaaaaaaaaaaaaaaaaaaaaaaaaaaaaaaaaaaaaaaaaaaaaaaaaaaaaa

SEQ ID NO: 16467 - RNA, 9485 nt, synthetic construct
  source 1..9485: mol_type = other RNA
aggaaataagagagaaaagaagagtaagaagaaatataagagccaccatggcccctaagaagaagcgtaaagtgagccggatggaacgcctcgtctacgaggtgcggcagaagtgcagaaacatcgaggacatctgcatctcctgcggatctctgaacgtgaccctggagcacccactgttcatcggcggcatgtgccagaactgtaaaaactgttttctggagtgtgcctatcaatacgacgatgacggctaccagagctactgcaccatctgttgcggcggaagagaggtgctgatgtgtggaaataacaactgctgccggtgcttctgcgtggaatgcgtggacctgctggtgggccccggcgccgcccaggccgctattaaggaagatccttggaactgctacatgtgcggccacaagggcacatacggcctgctgagacggagagaggactggcctagcagactgcagatgttcttcgccaataaccacgaccaggagttcgacccccctaaggtgtaccctcccgtccccgccgagaagagaaagcccatccgggtcctgagcctgttcgatggcatcgccaccggtctgctggtgctgaaggacctgggcatccaggtggataggtacattgcctccgaggtgtgcgaggactccatcaccgtgggaatggtgcgtcatcagggcaagatcatgtacgtgggcgacgtgcggagcgtgacacagaagcatatccaggagtggggccctttcgacctggtgatcggcggcagcccttgcaatgacctgagcatcgtgaacccagcccggaagggcctgtacgagggaaccggcagactgttcttcgagttttacagactgctgcacgacgcccggcctaaggaaggcgacgaccggcccttcttttggctgttcgagaatgtggtggccatgggagtcagcgacaagcgggatattagccggttcctggagagcaaccccgtgatgatcgatgccaaggaagtgagcgccgcccaccgggccagatacttctggggcaatctgcctggcatgaacagacccctggccagcaccgtgaacgacaagctggagctgcaggagtgcctggagcacggccggatcgccaagttcagcaaggtgagaaccatcaccacccgaagcaacagcatcaaacaaggcaaggaccagcactttcctgtgttcatgaacgagaaggaggacatcctgtggtgtaccgagatggagagagtgttcgggttcccagtccactacacagatgtcagcaacatgtctagactggccagacagagactgctgggaagaagctggtccgtccctgtgatcagacacctgttcgcccctctgaaggagtacttcgcctgcgtgagcagcggcaacagcaacgccaacagccggggccccagcttctctagcggcctggtgccactgtccctgagagggagccacatgggccccatggagatctacaaaaccgtgagcgcctggaagcggcagcctgtgcgcgtgctgagcctgtttcggaatatcgataaagtcctgaaaagcctgggattcctggagagcggctctggctccggcggtggcaccctgaagtacgtggaggatgtgacaaacgtggtcagacgggatgtggagaagtggggccccttcgatctggtgtacggcagcacccaacccctgggcagctcttgtgaccggtgccctggctggtacatgtttcagttccaccggatcctgcagtacgccctgccgagacaggagtcccagcggccattcttttggattttcatggacaacttgctgctgaccgaggatgaccaggaaactaccactcggttcctgcagaccgaagccgtgaccctgcaggacgtgagaggccgggactaccagaacgccatgcgggtgtggtccaacatccctggactgaaaagcaagcacgcacctctgacccctaaagaagaggagtacctgcaggcccaggtgcggagcagaagcaagctggacgcccctaaggtggatctgctggtgaagaattgcctcctgcccctgagagagtacttcaagtatttcagccagaatagtctgcccctgggaggcagcggcggcggcgccctggtgacatttgaggacgtcgccgtgcggttcacccaggaggaatgggctctgctggatccttctcagaaaatcctgtaccgggacgtgatgagagagacataccggaatctgacctccgtgggcatcaactgggaatgttgggaccttgaagcctgcttcagaagcctgggaagaaacctgagagtgcaggtggtgaagagaaagtgcgagctgaccaacagcggcccctgcgccgagggcggcccaagcagcggcgcccctcctcccagcggcggcagcccagccggctccccaacctctaccgaggagggcacctctgagtccgccacccccgagagcggccctggcacctccaccgagcccagcgagggcagcgcacccggcagccctgccggcagccccacctccacagaggagggaaccagcaccgagcccagcgaaggcagcgccccaggcaccagcaccgagcctagtgagcaggagattaaacggatcaacaagatcagaagaagacttgtgaaagacagcaacaccaagaaggccggcaagacaggccccatgaaaaccctgctggttagagtgatgacacccgatctgagagagcggctggaaaacctgagaaagaagcctgaaaatatcccccagcccatcagcaatacatctagagccaacctgaataagctgctgaccgattacaccgaaatgaagaaggcgatcctgcatgtgtactgggaagagttccagaaggaccctgtgggcctgatgagccgggtggcccagcctgccagcaagaagatcgatcagaacaagctgaaacctgagatggacgagaagggcaacctgaccaccgccggctttgcctgctctcagtgtggccagcccctgttcgtgtacaagctggagcaggtgtctgagaagggcaaggcttacaccaactacttcggacggtgcaatgtggccgagcacgaaaagctgatcctgctggcccagctgaagcccgagaaggatagcgacgaagccgtgacatatagcctgggaaagtttgggcagagggccctggatttctacagcattcatgtgaccaaggagtccacccaccccgtgaagcccctggcccagatcgccggaaacagatacgcctccggacctgtgggaaaggccctgagcgacgcatgtatgggcacaatcgcctccttcctgtctaagtaccaggacatcatcatcgaacaccagaaggtggtgaagggcaaccagaagagactggagagcctgcgggagctggccggcaaggaaaacctggaataccctagcgtgaccctgccacctcagcctcacaccaaggagggcgttgatgcctacaacgaagtgatcgcccgggtgcgaatgtgggtgaacctgaacctgtggcagaagctgaagctaagcagagatgatgccaagcctctgctgagactgaagggattcccttcctttcctctggtcgagagacaggccaacgaagtggactggtgggacatggtgtgtaacgtgaagaagctgatcaacgagaaaaaggaggatggcaaggtgttttggcagaatctggctggctacaagagacaggaagccctgagaccatacctgagcagcgaggaagatcggaagaagggaaagaaattcgctcggtaccagctgggcgacctgctgctgcacctggaaaagaagcacggcgaggactggggaaaggtgtacgacgaggcctgggagcggattgacaagaaagtggaaggcctgagcaagcacatcaagctggaagaggaacggagaagcgaggacgcccagagcaaggccgccctgaccgactggctgcgggctaaggccagcttcgtgatcgagggcctgaaggaggccgacaaggacgagttctgcagatgcgagctgaagctgcagaagtggtacggggacctgcggggaaagcccttcgccatcgaagccgagaacagcatcctggacatcagcggcttcagcaagcagtacaactgtgccttcatctggcagaaggacggcgtgaagaagctgaacctgtacctgatcatcaactacttcaagggcggcaagctgcggttcaagaagatcaaacctgaagccttcgaagccaacagattctacaccgtgatcaacaaaaagagcggcgagatcgtgcccatggaggtgaacttcaacttcgacgaccccaacctgatcatcctgcctctggcctttggcaagagacagggcagagaattcatctggaacgacctgctgtccctggaaaccggcagcctgaagctggccaacggaagagtgatcgagaagacactgtacaacagaagaacccggcaggatgagcctgccctgttcgtggccctgaccttcgagcggcgggaggtcctggactcctccaatatcaaaccaatgaacctgatcggcgtggcaagaggcgaaaacatccccgccgtgatcgccctgaccgaccccgagggctgcccactgagccggtttaaggatagcctgggaaacccaacccacatcctgagaatcggcgagagctataaggagaagcagcggaccatccaggccaagaaggaggtggagcagcggagagccggcggctacagccggaagtacgccagcaaagccaagaatctggcagacgatatggtgagaaacaccgctagagatctgctgtactacgccgtgacccaggatgccatgctgatcttcgccaacctgagccggggcttcggccggcagggcaagcggaccttcatggccgagagacagtacacacggatggaggactggctgaccgccaagctggcctacgagggcctgagcaagacctacctgtccaagacactggcccagtacacctccaagacatgcagcaactgtgggtttaccatcaccagcgccgactacgacagggtgctggagaagctgaagaagacagcaacaggctggatgaccacaattaacggcaaggagctgaaggtggagggccagattacctactacaacagatacaagagacagaacgtagtcaaggacctgtccgtcgagctggatagactgagcgaagaatctgtgaacaacgacatctcctcctggacaaagggcagaagcggagaagctctgagcctcctgaagaaaagattctcccatagacccgtgcaggagaagttcgtgtgcctgaactgcggcttcgagacacacgcagccgagcaagccgccctgaacatcgccagatcctggctgttcctgcggagccaggagtacaagaaataccagacaaacaagacaaccggcaacaccgataagagagccttcgtcgagacctggcagtccttttaccggaagaagcttaaggaggtgtggaaacctgccgtgcggtctggcggatctggcggaggctccgcccagggcctgatggccttcgaggacgtggccgtgtacttcagcagggaggagtggggcctgctggacgccgcccagagggccctgtacaggagggtgatgctggagaacttcaccctgctggccagcctgggcctgagcgtgagcaggccccacgtggtgatccagctggagtgcggcaaggagccctgggtgctgaacggcaccgacgtgaccctggccaggaacgcccagaggaggcccggcggcccaagcagcggcgcccctcctcccagcggcggcagcccagccggctccccaacctctaccgaggagggcacctctgagtccgccacccccgagagcggccctggcacctccaccgagcccagcgagggcagcgcacccggcagccctgccggcagccccacctccacagaggagggaaccagcaccgagcccagcgaaggcagcgccccaggcaccagcaccgagcctagtgagcaggagattaaacggatcaacaagatcagaagaagacttgtgaaagacagcaacaccaagaaggccggcaagacaggccccatgaaaaccctgctggttagagtgatgacacccgatctgagagagcggctggaaaacctgagaaagaagcctgaaaatatcccccagcccatcagcaatacatctagagccaacctgaataagctgctgaccgattacaccgaaatgaagaaggcgatcctgcatgtgtactgggaagagttccagaaggaccctgtgggcctgatgagccgggtggcccagcctgccagcaagaagatcgatcagaacaagctgaaacctgagatggacgagaagggcaacctgaccaccgccggctttgcctgctctcagtgtggccagcccctgttcgtgtacaagctggagcaggtgtctgagaagggcaaggcttacaccaactacttcggacggtgcaatgtggccgagcacgaaaagctgatcctgctggcccagctgaagcccgagaaggatagcgacgaagccgtgacatatagcctgggaaagtttgggcagagggccctggatttctacagcattcatgtgaccaaggagtccacccaccccgtgaagcccctggcccagatcgccggaaacagatacgcctccggacctgtgggaaaggccctgagcgacgcatgtatgggcacaatcgcctccttcctgtctaagtaccaggacatcatcatcgaacaccagaaggtggtgaagggcaaccagaagagactggagagcctgcgggagctggccggcaaggaaaacctggaataccctagcgtgaccctgccacctcagcctcacaccaaggagggcgttgatgcctacaacgaagtgatcgcccgggtgcgaatgtgggtgaacctgaacctgtggcagaagctgaagctaagcagagatgatgccaagcctctgctgagactgaagggattcccttcctttcctctggtcgagagacaggccaacgaagtggactggtgggacatggtgtgtaacgtgaagaagctgatcaacgagaaaaaggaggatggcaaggtgttttggcagaatctggctggctacaagagacaggaagccctgagaccatacctgagcagcgaggaagatcggaagaagggaaagaaattcgctcggtaccagctgggcgacctgctgctgcacctggaaaagaagcacggcgaggactggggaaaggtgtacgacgaggcctgggagcggattgacaagaaagtggaaggcctgagcaagcacatcaagctggaagaggaacggagaagcgaggacgcccagagcaaggccgccctgaccgactggctgcgggctaaggccagcttcgtgatcgagggcctgaaggaggccgacaaggacgagttctgcagatgcgagctgaagctgcagaagtggtacggggacctgcggggaaagcccttcgccatcgaagccgagaacagcatcctggacatcagcggcttcagcaagcagtacaactgtgccttcatctggcagaaggacggcgtgaagaagctgaacctgtacctgatcatcaactacttcaagggcggcaagctgcggttcaagaagatcaaacctgaagccttcgaagccaacagattctacaccgtgatcaacaaaaagagcggcgagatcgtgcccatggaggtgaacttcaacttcgacgaccccaacctgatcatcctgcctctggcctttggcaagagacagggcagagaattcatctggaacgacctgctgtccctggaaaccggcagcctgaagctggccaacggaagagtgatcgagaagacactgtacaacagaagaacccggcaggatgagcctgccctgttcgtggccctgaccttcgagcggcgggaggtcctggactcctccaatatcaaaccaatgaacctgatcggcgtggcaagaggcgaaaacatccccgccgtgatcgccctgaccgaccccgagggctgcccactgagccggtttaaggatagcctgggaaacccaacccacatcctgagaatcggcgagagctataaggagaagcagcggaccatccaggccaagaaggaggtggagcagcggagagccggcggctacagccggaagtacgccagcaaagccaagaatctggcagacgatatggtgagaaacaccgctagagatctgctgtactacgccgtgacccaggatgccatgctgatcttcgccaacctgagccggggcttcggccggcagggcaagcggaccttcatggccgagagacagtacacacggatggaggactggctgaccgccaagctggcctacgagggcctgagcaagacctacctgtccaagacactggcccagtacacctccaagacatgcagcaactgtgggtttaccatcaccagcgccgactacgacagggtgctggagaagctgaagaagacagcaacaggctggatgaccacaattaacggcaaggagctgaaggtggagggccagattacctactacaacagatacaagagacagaacgtagtcaaggacctgtccgtcgagctggatagactgagcgaagaatctgtgaacaacgacatctcctcctggacaaagggcagaagcggagaagctctgagcctcctgaagaaaagattctcccatagacccgtgcaggagaagttcgtgtgcctgaactgcggcttcgagacacacgcagccgagcaagccgccctgaacatcgccagatcctggctgttcctgcggagccaggagtacaagaaataccagacaaacaagacaaccggcaacaccgataagagagccttcgtcgagacctggcagtccttttaccggaagaagcttaaggaggtgtggaaacctgccgtgcggtctggcggatctggcggaggctcctgcccagggcctgatggccttcgaggacgtggccgtgtacttcagcagggaggagtggggcctgctggacgccgcccagagggccctgtacaggagggtgatgctggagaacttcaccctgctggccagcctgggcctgagcgtgagcaggccccacgtggtgatccagctggagtgcggcaaggagccctgggtgctgaacggcaccgacgtgaccctggccaggaacgcccagaggaggcccggatctggctccggcagcggccccaagaaaaagagaaaagtctaagctgccttctgcggggcttgccttctggccatgcccttcttctctcccttgcacctgtacctcttggtctttgaataaagcctgagtaggaaggctagcaaaaaaaaaaaaaaaaaaaaaaaaaaaaaaaaaaaaaaaaaaaaaaaaaaaaaaaaaaaaaaaaaaaaaaaaaaaaaaaa

SEQ ID NO: 16468 - RNA, 9485 nt, synthetic construct
  source 1..9485: mol_type = other RNA
aggaaataagagagaaaagaagagtaagaagaaatataagagccaccatggcccctaagaagaagcgtaaagtgagccggatggaacgcctcgtctacgaggtgcggcagaagtgcagaaacatcgaggacatctgcatctcctgcggatctctgaacgtgaccctggagcacccactgttcatcggcggcatgtgccagaactgtaaaaactgttttctggagtgtgcctatcaatacgacgatgacggctaccagagctactgcaccatctgttgcggcggaagagaggtgctgatgtgtggaaataacaactgctgccggtgcttctgcgtggaatgcgtggacctgctggtgggccccggcgccgcccaggccgctattaaggaagatccttggaactgctacatgtgcggccacaagggcacatacggcctgctgagacggagagaggactggcctagcagactgcagatgttcttcgccaataaccacgaccaggagttcgacccccctaaggtgtaccctcccgtccccgccgagaagagaaagcccatccgggtcctgagcctgttcgatggcatcgccaccggtctgctggtgctgaaggacctgggcatccaggtggataggtacattgcctccgaggtgtgcgaggactccatcaccgtgggaatggtgcgtcatcagggcaagatcatgtacgtgggcgacgtgcggagcgtgacacagaagcatatccaggagtggggccctttcgacctggtgatcggcggcagcccttgcaatgacctgagcatcgtgaacccagcccggaagggcctgtacgagggaaccggcagactgttcttcgagttttacagactgctgcacgacgcccggcctaaggaaggcgacgaccggcccttcttttggctgttcgagaatgtggtggccatgggagtcagcgacaagcgggatattagccggttcctggagagcaaccccgtgatgatcgatgccaaggaagtgagcgccgcccaccgggccagatacttctggggcaatctgcctggcatgaacagacccctggccagcaccgtgaacgacaagctggagctgcaggagtgcctggagcacggccggatcgccaagttcagcaaggtgagaaccatcaccacccgaagcaacagcatcaaacaaggcaaggaccagcactttcctgtgttcatgaacgagaaggaggacatcctgtggtgtaccgagatggagagagtgttcgggttcccagtccactacacagatgtcagcaacatgtctagactggccagacagagactgctgggaagaagctggtccgtccctgtgatcagacacctgttcgcccctctgaaggagtacttcgcctgcgtgagcagcggcaacagcaacgccaacagccggggccccagcttctctagcggcctggtgccactgtccctgagagggagccacatgggccccatggagatctacaaaaccgtgagcgcctggaagcggcagcctgtgcgcgtgctgagcctgtttcggaatatcgataaagtcctgaaaagcctgggattcctggagagcggctctggctccggcggtggcaccctgaagtacgtggaggatgtgacaaacgtggtcagacgggatgtggagaagtggggccccttcgatctggtgtacggcagcacccaacccctgggcagctcttgtgaccggtgccctggctggtacatgtttcagttccaccggatcctgcagtacgccctgccgagacaggagtcccagcggccattcttttggattttcatggacaacttgctgctgaccgaggatgaccaggaaactaccactcggttcctgcagaccgaagccgtgaccctgcaggacgtgagaggccgggactaccagaacgccatgcgggtgtggtccaacatccctggactgaaaagcaagcacgcacctctgacccctaaagaagaggagtacctgcaggcccaggtgcggagcagaagcaagctggacgcccctaaggtggatctgctggtgaagaattgcctcctgcccctgagagagtacttcaagtatttcagccagaatagtctgcccctgggaggcagcggcggcggcgccctggtgacatttgaggacgtcgccgtgcggttcacccaggaggaatgggctctgctggatccttctcagaaaatcctgtaccgggacgtgatgagagagacataccggaatctgacctccgtgggcatcaactgggaatgttgggaccttgaagcctgcttcagaagcctgggaagaaacctgagagtgcaggtggtgaagagaaagtgcgagctgaccaacagcggcccctgcgccgagggcggcccaagcagcggcgcccctcctcccagcggcggcagcccagccggctccccaacctctaccgaggagggcacctctgagtccgccacccccgagagcggccctggcacctccaccgagcccagcgagggcagcgcacccggcagccctgccggcagccccacctccacagaggagggaaccagcaccgagcccagcgaaggcagcgccccaggcaccagcaccgagcctagtgagcaggagattaaacggatcaacaagatcagaagaagacttgtgaaagacagcaacaccaagaaggccggcaagacaggccccatgaaaaccctgctggttagagtgatgacacccgatctgagagagcggctggaaaacctgagaaagaagcctgaaaatatcccccagcccatcagcaatacatctagagccaacctgaataagctgctgaccgattacaccgaaatgaagaaggcgatcctgcatgtgtactgggaagagttccagaaggaccctgtgggcctgatgagccgggtggcccagcctgccagcaagaagatcgatcagaacaagctgaaacctgagatggacgagaagggcaacctgaccaccgccggctttgcctgctctcagtgtggccagcccctgttcgtgtacaagctggagcaggtgtctgagaagggcaaggcttacaccaactacttcggacggtgcaatgtggccgagcacgaaaagctgatcctgctggcccagctgaagcccgagaaggatagcgacgaagccgtgacatatagcctgggaaagtttgggcagagggccctggatttctacagcattcatgtgaccaaggagtccacccaccccgtgaagcccctggcccagatcgccggaaacagatacgcctccggacctgtgggaaaggccctgagcgacgcatgtatgggcacaatcgcctccttcctgtctaagtaccaggacatcatcatcgaacaccagaaggtggtgaagggcaaccagaagagactggagagcctgcgggagctggccggcaaggaaaacctggaataccctagcgtgaccctgccacctcagcctcacaccaaggagggcgttgatgcctacaacgaagtgatcgcccgggtgcgaatgtgggtgaacctgaacctgtggcagaagctgaagctaagcagagatgatgccaagcctctgctgagactgaagggattcccttcctttcctctggtcgagagacaggccaacgaagtggactggtgggacatggtgtgtaacgtgaagaagctgatcaacgagaaaaaggaggatggcaaggtgttttggcagaatctggctggctacaagagacaggaagccctgagaccatacctgagcagcgaggaagatcggaagaagggaaagaaattcgctcggtaccagctgggcgacctgctgctgcacctggaaaagaagcacggcgaggactggggaaaggtgtacgacgaggcctgggagcggattgacaagaaagtggaaggcctgagcaagcacatcaagctggaagaggaacggagaagcgaggacgcccagagcaaggccgccctgaccgactggctgcgggctaaggccagcttcgtgatcgagggcctgaaggaggccgacaaggacgagttctgcagatgcgagctgaagctgcagaagtggtacggggacctgcggggaaagcccttcgccatcgaagccgagaacagcatcctggacatcagcggcttcagcaagcagtacaactgtgccttcatctggcagaaggacggcgtgaagaagctgaacctgtacctgatcatcaactacttcaagggcggcaagctgcggttcaagaagatcaaacctgaagccttcgaagccaacagattctacaccgtgatcaacaaaaagagcggcgagatcgtgcccatggaggtgaacttcaacttcgacgaccccaacctgatcatcctgcctctggcctttggcaagagacagggcagagaattcatctggaacgacctgctgtccctggaaaccggcagcctgaagctggccaacggaagagtgatcgagaagacactgtacaacagaagaacccggcaggatgagcctgccctgttcgtggccctgaccttcgagcggcgggaggtcctggactcctccaatatcaaaccaatgaacctgatcggcgtggcaagaggcgaaaacatccccgccgtgatcgccctgaccgaccccgagggctgcccactgagccggtttaaggatagcctgggaaacccaacccacatcctgagaatcggcgagagctataaggagaagcagcggaccatccaggccaagaaggaggtggagcagcggagagccggcggctacagccggaagtacgccagcaaagccaagaatctggcagacgatatggtgagaaacaccgctagagatctgctgtactacgccgtgacccaggatgccatgctgatcttcgccaacctgagccggggcttcggccggcagggcaagcggaccttcatggccgagagacagtacacacggatggaggactggctgaccgccaagctggcctacgagggcctgagcaagacctacctgtccaagacactggcccagtacacctccaagacatgcagcaactgtgggtttaccatcaccagcgccgactacgacagggtgctggagaagctgaagaagacagcaacaggctggatgaccacaattaacggcaaggagctgaaggtggagggccagattacctactacaacagatacaagagacagaacgtagtcaaggacctgtccgtcgagctggatagactgagcgaagaatctgtgaacaacgacatctcctcctggacaaagggcagaagcggagaagctctgagcctcctgaagaaaagattctcccatagacccgtgcaggagaagttcgtgtgcctgaactgcggcttcgagacacacgcagccgagcaagccgccctgaacatcgccagatcctggctgttcctgcggagccaggagtacaagaaataccagacaaacaagacaaccggcaacaccgataagagagccttcgtcgagacctggcagtccttttaccggaagaagcttaaggaggtgtggaaacctgccgtgcggtctggcggatctggcggaggctcccccgagaccgtggtgagcttcgaggacgtggccgtgaggttcagccccgacgagtggcacctgctggacgacggccagaggaggctgtacagggacgtgctgagggagaactacagccacgtgaggagcctgggcttccccgtgcccgacctggccgtgatcttcaggatggagaggggcgaggagccctggccccccggcctgcccgccggcaccaagagcgacgaccaggaggaggagaggggcggcccaagcagcggcgcccctcctcccagcggcggcagcccagccggctccccaacctctaccgaggagggcacctctgagtccgccacccccgagagcggccctggcacctccaccgagcccagcgagggcagcgcacccggcagccctgccggcagccccacctccacagaggagggaaccagcaccgagcccagcgaaggcagcgccccaggcaccagcaccgagcctagtgagcaggagattaaacggatcaacaagatcagaagaagacttgtgaaagacagcaacaccaagaaggccggcaagacaggccccatgaaaaccctgctggttagagtgatgacacccgatctgagagagcggctggaaaacctgagaaagaagcctgaaaatatcccccagcccatcagcaatacatctagagccaacctgaataagctgctgaccgattacaccgaaatgaagaaggcgatcctgcatgtgtactgggaagagttccagaaggaccctgtgggcctgatgagccgggtggcccagcctgccagcaagaagatcgatcagaacaagctgaaacctgagatggacgagaagggcaacctgaccaccgccggctttgcctgctctcagtgtggccagcccctgttcgtgtacaagctggagcaggtgtctgagaagggcaaggcttacaccaactacttcggacggtgcaatgtggccgagcacgaaaagctgatcctgctggcccagctgaagcccgagaaggatagcgacgaagccgtgacatatagcctgggaaagtttgggcagagggccctggatttctacagcattcatgtgaccaaggagtccacccaccccgtgaagcccctggcccagatcgccggaaacagatacgcctccggacctgtgggaaaggccctgagcgacgcatgtatgggcacaatcgcctccttcctgtctaagtaccaggacatcatcatcgaacaccagaaggtggtgaagggcaaccagaagagactggagagcctgcgggagctggccggcaaggaaaacctggaataccctagcgtgaccctgccacctcagcctcacaccaaggagggcgttgatgcctacaacgaagtgatcgcccgggtgcgaatgtgggtgaacctgaacctgtggcagaagctgaagctaagcagagatgatgccaagcctctgctgagactgaagggattcccttcctttcctctggtcgagagacaggccaacgaagtggactggtgggacatggtgtgtaacgtgaagaagctgatcaacgagaaaaaggaggatggcaaggtgttttggcagaatctggctggctacaagagacaggaagccctgagaccatacctgagcagcgaggaagatcggaagaagggaaagaaattcgctcggtaccagctgggcgacctgctgctgcacctggaaaagaagcacggcgaggactggggaaaggtgtacgacgaggcctgggagcggattgacaagaaagtggaaggcctgagcaagcacatcaagctggaagaggaacggagaagcgaggacgcccagagcaaggccgccctgaccgactggctgcgggctaaggccagcttcgtgatcgagggcctgaaggaggccgacaaggacgagttctgcagatgcgagctgaagctgcagaagtggtacggggacctgcggggaaagcccttcgccatcgaagccgagaacagcatcctggacatcagcggcttcagcaagcagtacaactgtgccttcatctggcagaaggacggcgtgaagaagctgaacctgtacctgatcatcaactacttcaagggcggcaagctgcggttcaagaagatcaaacctgaagccttcgaagccaacagattctacaccgtgatcaacaaaaagagcggcgagatcgtgcccatggaggtgaacttcaacttcgacgaccccaacctgatcatcctgcctctggcctttggcaagagacagggcagagaattcatctggaacgacctgctgtccctggaaaccggcagcctgaagctggccaacggaagagtgatcgagaagacactgtacaacagaagaacccggcaggatgagcctgccctgttcgtggccctgaccttcgagcggcgggaggtcctggactcctccaatatcaaaccaatgaacctgatcggcgtggcaagaggcgaaaacatccccgccgtgatcgccctgaccgaccccgagggctgcccactgagccggtttaaggatagcctgggaaacccaacccacatcctgagaatcggcgagagctataaggagaagcagcggaccatccaggccaagaaggaggtggagcagcggagagccggcggctacagccggaagtacgccagcaaagccaagaatctggcagacgatatggtgagaaacaccgctagagatctgctgtactacgccgtgacccaggatgccatgctgatcttcgccaacctgagccggggcttcggccggcagggcaagcggaccttcatggccgagagacagtacacacggatggaggactggctgaccgccaagctggcctacgagggcctgagcaagacctacctgtccaagacactggcccagtacacctccaagacatgcagcaactgtgggtttaccatcaccagcgccgactacgacagggtgctggagaagctgaagaagacagcaacaggctggatgaccacaattaacggcaaggagctgaaggtggagggccagattacctactacaacagatacaagagacagaacgtagtcaaggacctgtccgtcgagctggatagactgagcgaagaatctgtgaacaacgacatctcctcctggacaaagggcagaagcggagaagctctgagcctcctgaagaaaagattctcccatagacccgtgcaggagaagttcgtgtgcctgaactgcggcttcgagacacacgcagccgagcaagccgccctgaacatcgccagatcctggctgttcctgcggagccaggagtacaagaaataccagacaaacaagacaaccggcaacaccgataagagagccttcgtcgagacctggcagtccttttaccggaagaagcttaaggaggtgtggaaacctgccgtgcggtctggcggatctggcggaggctcctcccgagaccgtggtgagcttcgaggacgtggccgtgaggttcagccccgacgagtggcacctgctggacgacggccagaggaggctgtacagggacgtgctgagggagaactacagccacgtgaggagcctgggcttccccgtgcccgacctggccgtgatcttcaggatggagaggggcgaggagccctggccccccggcctgcccgccggcaccaagagcgacgaccaggaggaggagaggggatctggctccggcagcggccccaagaaaaagagaaaagtctaagctgccttctgcggggcttgccttctggccatgcccttcttctctcccttgcacctgtacctcttggtctttgaataaagcctgagtaggaaggctagcaaaaaaaaaaaaaaaaaaaaaaaaaaaaaaaaaaaaaaaaaaaaaaaaaaaaaaaaaaaaaaaaaaaaaaaaaaaaaaaa

SEQ ID NO: 16469 - RNA, 9485 nt, synthetic construct
  source 1..9485: mol_type = other RNA
aggaaataagagagaaaagaagagtaagaagaaatataagagccaccatggcccctaagaagaagcgtaaagtgagccggatggaacgcctcgtctacgaggtgcggcagaagtgcagaaacatcgaggacatctgcatctcctgcggatctctgaacgtgaccctggagcacccactgttcatcggcggcatgtgccagaactgtaaaaactgttttctggagtgtgcctatcaatacgacgatgacggctaccagagctactgcaccatctgttgcggcggaagagaggtgctgatgtgtggaaataacaactgctgccggtgcttctgcgtggaatgcgtggacctgctggtgggccccggcgccgcccaggccgctattaaggaagatccttggaactgctacatgtgcggccacaagggcacatacggcctgctgagacggagagaggactggcctagcagactgcagatgttcttcgccaataaccacgaccaggagttcgacccccctaaggtgtaccctcccgtccccgccgagaagagaaagcccatccgggtcctgagcctgttcgatggcatcgccaccggtctgctggtgctgaaggacctgggcatccaggtggataggtacattgcctccgaggtgtgcgaggactccatcaccgtgggaatggtgcgtcatcagggcaagatcatgtacgtgggcgacgtgcggagcgtgacacagaagcatatccaggagtggggccctttcgacctggtgatcggcggcagcccttgcaatgacctgagcatcgtgaacccagcccggaagggcctgtacgagggaaccggcagactgttcttcgagttttacagactgctgcacgacgcccggcctaaggaaggcgacgaccggcccttcttttggctgttcgagaatgtggtggccatgggagtcagcgacaagcgggatattagccggttcctggagagcaaccccgtgatgatcgatgccaaggaagtgagcgccgcccaccgggccagatacttctggggcaatctgcctggcatgaacagacccctggccagcaccgtgaacgacaagctggagctgcaggagtgcctggagcacggccggatcgccaagttcagcaaggtgagaaccatcaccacccgaagcaacagcatcaaacaaggcaaggaccagcactttcctgtgttcatgaacgagaaggaggacatcctgtggtgtaccgagatggagagagtgttcgggttcccagtccactacacagatgtcagcaacatgtctagactggccagacagagactgctgggaagaagctggtccgtccctgtgatcagacacctgttcgcccctctgaaggagtacttcgcctgcgtgagcagcggcaacagcaacgccaacagccggggccccagcttctctagcggcctggtgccactgtccctgagagggagccacatgggccccatggagatctacaaaaccgtgagcgcctggaagcggcagcctgtgcgcgtgctgagcctgtttcggaatatcgataaagtcctgaaaagcctgggattcctggagagcggctctggctccggcggtggcaccctgaagtacgtggaggatgtgacaaacgtggtcagacgggatgtggagaagtggggccccttcgatctggtgtacggcagcacccaacccctgggcagctcttgtgaccggtgccctggctggtacatgtttcagttccaccggatcctgcagtacgccctgccgagacaggagtcccagcggccattcttttggattttcatggacaacttgctgctgaccgaggatgaccaggaaactaccactcggttcctgcagaccgaagccgtgaccctgcaggacgtgagaggccgggactaccagaacgccatgcgggtgtggtccaacatccctggactgaaaagcaagcacgcacctctgacccctaaagaagaggagtacctgcaggcccaggtgcggagcagaagcaagctggacgcccctaaggtggatctgctggtgaagaattgcctcctgcccctgagagagtacttcaagtatttcagccagaatagtctgcccctgggaggcagcggcggcggcgccctggtgacatttgaggacgtcgccgtgcggttcacccaggaggaatgggctctgctggatccttctcagaaaatcctgtaccgggacgtgatgagagagacataccggaatctgacctccgtgggcatcaactgggaatgttgggaccttgaagcctgcttcagaagcctgggaagaaacctgagagtgcaggtggtgaagagaaagtgcgagctgaccaacagcggcccctgcgccgagggcggcccaagcagcggcgcccctcctcccagcggcggcagcccagccggctccccaacctctaccgaggagggcacctctgagtccgccacccccgagagcggccctggcacctccaccgagcccagcgagggcagcgcacccggcagccctgccggcagccccacctccacagaggagggaaccagcaccgagcccagcgaaggcagcgccccaggcaccagcaccgagcctagtgagcaggagattaaacggatcaacaagatcagaagaagacttgtgaaagacagcaacaccaagaaggccggcaagacaggccccatgaaaaccctgctggttagagtgatgacacccgatctgagagagcggctggaaaacctgagaaagaagcctgaaaatatcccccagcccatcagcaatacatctagagccaacctgaataagctgctgaccgattacaccgaaatgaagaaggcgatcctgcatgtgtactgggaagagttccagaaggaccctgtgggcctgatgagccgggtggcccagcctgccagcaagaagatcgatcagaacaagctgaaacctgagatggacgagaagggcaacctgaccaccgccggctttgcctgctctcagtgtggccagcccctgttcgtgtacaagctggagcaggtgtctgagaagggcaaggcttacaccaactacttcggacggtgcaatgtggccgagcacgaaaagctgatcctgctggcccagctgaagcccgagaaggatagcgacgaagccgtgacatatagcctgggaaagtttgggcagagggccctggatttctacagcattcatgtgaccaaggagtccacccaccccgtgaagcccctggcccagatcgccggaaacagatacgcctccggacctgtgggaaaggccctgagcgacgcatgtatgggcacaatcgcctccttcctgtctaagtaccaggacatcatcatcgaacaccagaaggtggtgaagggcaaccagaagagactggagagcctgcgggagctggccggcaaggaaaacctggaataccctagcgtgaccctgccacctcagcctcacaccaaggagggcgttgatgcctacaacgaagtgatcgcccgggtgcgaatgtgggtgaacctgaacctgtggcagaagctgaagctaagcagagatgatgccaagcctctgctgagactgaagggattcccttcctttcctctggtcgagagacaggccaacgaagtggactggtgggacatggtgtgtaacgtgaagaagctgatcaacgagaaaaaggaggatggcaaggtgttttggcagaatctggctggctacaagagacaggaagccctgagaccatacctgagcagcgaggaagatcggaagaagggaaagaaattcgctcggtaccagctgggcgacctgctgctgcacctggaaaagaagcacggcgaggactggggaaaggtgtacgacgaggcctgggagcggattgacaagaaagtggaaggcctgagcaagcacatcaagctggaagaggaacggagaagcgaggacgcccagagcaaggccgccctgaccgactggctgcgggctaaggccagcttcgtgatcgagggcctgaaggaggccgacaaggacgagttctgcagatgcgagctgaagctgcagaagtggtacggggacctgcggggaaagcccttcgccatcgaagccgagaacagcatcctggacatcagcggcttcagcaagcagtacaactgtgccttcatctggcagaaggacggcgtgaagaagctgaacctgtacctgatcatcaactacttcaagggcggcaagctgcggttcaagaagatcaaacctgaagccttcgaagccaacagattctacaccgtgatcaacaaaaagagcggcgagatcgtgcccatggaggtgaacttcaacttcgacgaccccaacctgatcatcctgcctctggcctttggcaagagacagggcagagaattcatctggaacgacctgctgtccctggaaaccggcagcctgaagctggccaacggaagagtgatcgagaagacactgtacaacagaagaacccggcaggatgagcctgccctgttcgtggccctgaccttcgagcggcgggaggtcctggactcctccaatatcaaaccaatgaacctgatcggcgtggcaagaggcgaaaacatccccgccgtgatcgccctgaccgaccccgagggctgcccactgagccggtttaaggatagcctgggaaacccaacccacatcctgagaatcggcgagagctataaggagaagcagcggaccatccaggccaagaaggaggtggagcagcggagagccggcggctacagccggaagtacgccagcaaagccaagaatctggcagacgatatggtgagaaacaccgctagagatctgctgtactacgccgtgacccaggatgccatgctgatcttcgccaacctgagccggggcttcggccggcagggcaagcggaccttcatggccgagagacagtacacacggatggaggactggctgaccgccaagctggcctacgagggcctgagcaagacctacctgtccaagacactggcccagtacacctccaagacatgcagcaactgtgggtttaccatcaccagcgccgactacgacagggtgctggagaagctgaagaagacagcaacaggctggatgaccacaattaacggcaaggagctgaaggtggagggccagattacctactacaacagatacaagagacagaacgtagtcaaggacctgtccgtcgagctggatagactgagcgaagaatctgtgaacaacgacatctcctcctggacaaagggcagaagcggagaagctctgagcctcctgaagaaaagattctcccatagacccgtgcaggagaagttcgtgtgcctgaactgcggcttcgagacacacgcagccgagcaagccgccctgaacatcgccagatcctggctgttcctgcggagccaggagtacaagaaataccagacaaacaagacaaccggcaacaccgataagagagccttcgtcgagacctggcagtccttttaccggaagaagcttaaggaggtgtggaaacctgccgtgcggtctggcggatctggcggaggctccaggcccagggccgtgaagttcggcgacgtggccctgtacttcagcagggaggagtggggctgcctgaggcccgcccagagggccctgtacagggacgtgatgcaggagacctacggccacctgggcgccctgggctgcgccggccccaagcccgccctgatcagctggctggagaggaacaccgacgactgggagaccgccgccctggacccccaggagtgccccaagggcgtggccgtgcagggcggcccaagcagcggcgcccctcctcccagcggcggcagcccagccggctccccaacctctaccgaggagggcacctctgagtccgccacccccgagagcggccctggcacctccaccgagcccagcgagggcagcgcacccggcagccctgccggcagccccacctccacagaggagggaaccagcaccgagcccagcgaaggcagcgccccaggcaccagcaccgagcctagtgagcaggagattaaacggatcaacaagatcagaagaagacttgtgaaagacagcaacaccaagaaggccggcaagacaggccccatgaaaaccctgctggttagagtgatgacacccgatctgagagagcggctggaaaacctgagaaagaagcctgaaaatatcccccagcccatcagcaatacatctagagccaacctgaataagctgctgaccgattacaccgaaatgaagaaggcgatcctgcatgtgtactgggaagagttccagaaggaccctgtgggcctgatgagccgggtggcccagcctgccagcaagaagatcgatcagaacaagctgaaacctgagatggacgagaagggcaacctgaccaccgccggctttgcctgctctcagtgtggccagcccctgttcgtgtacaagctggagcaggtgtctgagaagggcaaggcttacaccaactacttcggacggtgcaatgtggccgagcacgaaaagctgatcctgctggcccagctgaagcccgagaaggatagcgacgaagccgtgacatatagcctgggaaagtttgggcagagggccctggatttctacagcattcatgtgaccaaggagtccacccaccccgtgaagcccctggcccagatcgccggaaacagatacgcctccggacctgtgggaaaggccctgagcgacgcatgtatgggcacaatcgcctccttcctgtctaagtaccaggacatcatcatcgaacaccagaaggtggtgaagggcaaccagaagagactggagagcctgcgggagctggccggcaaggaaaacctggaataccctagcgtgaccctgccacctcagcctcacaccaaggagggcgttgatgcctacaacgaagtgatcgcccgggtgcgaatgtgggtgaacctgaacctgtggcagaagctgaagctaagcagagatgatgccaagcctctgctgagactgaagggattcccttcctttcctctggtcgagagacaggccaacgaagtggactggtgggacatggtgtgtaacgtgaagaagctgatcaacgagaaaaaggaggatggcaaggtgttttggcagaatctggctggctacaagagacaggaagccctgagaccatacctgagcagcgaggaagatcggaagaagggaaagaaattcgctcggtaccagctgggcgacctgctgctgcacctggaaaagaagcacggcgaggactggggaaaggtgtacgacgaggcctgggagcggattgacaagaaagtggaaggcctgagcaagcacatcaagctggaagaggaacggagaagcgaggacgcccagagcaaggccgccctgaccgactggctgcgggctaaggccagcttcgtgatcgagggcctgaaggaggccgacaaggacgagttctgcagatgcgagctgaagctgcagaagtggtacggggacctgcggggaaagcccttcgccatcgaagccgagaacagcatcctggacatcagcggcttcagcaagcagtacaactgtgccttcatctggcagaaggacggcgtgaagaagctgaacctgtacctgatcatcaactacttcaagggcggcaagctgcggttcaagaagatcaaacctgaagccttcgaagccaacagattctacaccgtgatcaacaaaaagagcggcgagatcgtgcccatggaggtgaacttcaacttcgacgaccccaacctgatcatcctgcctctggcctttggcaagagacagggcagagaattcatctggaacgacctgctgtccctggaaaccggcagcctgaagctggccaacggaagagtgatcgagaagacactgtacaacagaagaacccggcaggatgagcctgccctgttcgtggccctgaccttcgagcggcgggaggtcctggactcctccaatatcaaaccaatgaacctgatcggcgtggcaagaggcgaaaacatccccgccgtgatcgccctgaccgaccccgagggctgcccactgagccggtttaaggatagcctgggaaacccaacccacatcctgagaatcggcgagagctataaggagaagcagcggaccatccaggccaagaaggaggtggagcagcggagagccggcggctacagccggaagtacgccagcaaagccaagaatctggcagacgatatggtgagaaacaccgctagagatctgctgtactacgccgtgacccaggatgccatgctgatcttcgccaacctgagccggggcttcggccggcagggcaagcggaccttcatggccgagagacagtacacacggatggaggactggctgaccgccaagctggcctacgagggcctgagcaagacctacctgtccaagacactggcccagtacacctccaagacatgcagcaactgtgggtttaccatcaccagcgccgactacgacagggtgctggagaagctgaagaagacagcaacaggctggatgaccacaattaacggcaaggagctgaaggtggagggccagattacctactacaacagatacaagagacagaacgtagtcaaggacctgtccgtcgagctggatagactgagcgaagaatctgtgaacaacgacatctcctcctggacaaagggcagaagcggagaagctctgagcctcctgaagaaaagattctcccatagacccgtgcaggagaagttcgtgtgcctgaactgcggcttcgagacacacgcagccgagcaagccgccctgaacatcgccagatcctggctgttcctgcggagccaggagtacaagaaataccagacaaacaagacaaccggcaacaccgataagagagccttcgtcgagacctggcagtccttttaccggaagaagcttaaggaggtgtggaaacctgccgtgcggtctggcggatctggcggaggctcctaggcccagggccgtgaagttcggcgacgtggccctgtacttcagcagggaggagtggggctgcctgaggcccgcccagagggccctgtacagggacgtgatgcaggagacctacggccacctgggcgccctgggctgcgccggccccaagcccgccctgatcagctggctggagaggaacaccgacgactgggagaccgccgccctggacccccaggagtgccccaagggcgtggccgtgcagggatctggctccggcagcggccccaagaaaaagagaaaagtctaagctgccttctgcggggcttgccttctggccatgcccttcttctctcccttgcacctgtacctcttggtctttgaataaagcctgagtaggaaggctagcaaaaaaaaaaaaaaaaaaaaaaaaaaaaaaaaaaaaaaaaaaaaaaaaaaaaaaaaaaaaaaaaaaaaaaaaaaaaaaaa

SEQ ID NO: 16470 - RNA, 9485 nt, synthetic construct
  source 1..9485: mol_type = other RNA
aggaaataagagagaaaagaagagtaagaagaaatataagagccaccatggcccctaagaagaagcgtaaagtgagccggatggaacgcctcgtctacgaggtgcggcagaagtgcagaaacatcgaggacatctgcatctcctgcggatctctgaacgtgaccctggagcacccactgttcatcggcggcatgtgccagaactgtaaaaactgttttctggagtgtgcctatcaatacgacgatgacggctaccagagctactgcaccatctgttgcggcggaagagaggtgctgatgtgtggaaataacaactgctgccggtgcttctgcgtggaatgcgtggacctgctggtgggccccggcgccgcccaggccgctattaaggaagatccttggaactgctacatgtgcggccacaagggcacatacggcctgctgagacggagagaggactggcctagcagactgcagatgttcttcgccaataaccacgaccaggagttcgacccccctaaggtgtaccctcccgtccccgccgagaagagaaagcccatccgggtcctgagcctgttcgatggcatcgccaccggtctgctggtgctgaaggacctgggcatccaggtggataggtacattgcctccgaggtgtgcgaggactccatcaccgtgggaatggtgcgtcatcagggcaagatcatgtacgtgggcgacgtgcggagcgtgacacagaagcatatccaggagtggggccctttcgacctggtgatcggcggcagcccttgcaatgacctgagcatcgtgaacccagcccggaagggcctgtacgagggaaccggcagactgttcttcgagttttacagactgctgcacgacgcccggcctaaggaaggcgacgaccggcccttcttttggctgttcgagaatgtggtggccatgggagtcagcgacaagcgggatattagccggttcctggagagcaaccccgtgatgatcgatgccaaggaagtgagcgccgcccaccgggccagatacttctggggcaatctgcctggcatgaacagacccctggccagcaccgtgaacgacaagctggagctgcaggagtgcctggagcacggccggatcgccaagttcagcaaggtgagaaccatcaccacccgaagcaacagcatcaaacaaggcaaggaccagcactttcctgtgttcatgaacgagaaggaggacatcctgtggtgtaccgagatggagagagtgttcgggttcccagtccactacacagatgtcagcaacatgtctagactggccagacagagactgctgggaagaagctggtccgtccctgtgatcagacacctgttcgcccctctgaaggagtacttcgcctgcgtgagcagcggcaacagcaacgccaacagccggggccccagcttctctagcggcctggtgccactgtccctgagagggagccacatgggccccatggagatctacaaaaccgtgagcgcctggaagcggcagcctgtgcgcgtgctgagcctgtttcggaatatcgataaagtcctgaaaagcctgggattcctggagagcggctctggctccggcggtggcaccctgaagtacgtggaggatgtgacaaacgtggtcagacgggatgtggagaagtggggccccttcgatctggtgtacggcagcacccaacccctgggcagctcttgtgaccggtgccctggctggtacatgtttcagttccaccggatcctgcagtacgccctgccgagacaggagtcccagcggccattcttttggattttcatggacaacttgctgctgaccgaggatgaccaggaaactaccactcggttcctgcagaccgaagccgtgaccctgcaggacgtgagaggccgggactaccagaacgccatgcgggtgtggtccaacatccctggactgaaaagcaagcacgcacctctgacccctaaagaagaggagtacctgcaggcccaggtgcggagcagaagcaagctggacgcccctaaggtggatctgctggtgaagaattgcctcctgcccctgagagagtacttcaagtatttcagccagaatagtctgcccctgggaggcagcggcggcggcgccctggtgacatttgaggacgtcgccgtgcggttcacccaggaggaatgggctctgctggatccttctcagaaaatcctgtaccgggacgtgatgagagagacataccggaatctgacctccgtgggcatcaactgggaatgttgggaccttgaagcctgcttcagaagcctgggaagaaacctgagagtgcaggtggtgaagagaaagtgcgagctgaccaacagcggcccctgcgccgagggcggcccaagcagcggcgcccctcctcccagcggcggcagcccagccggctccccaacctctaccgaggagggcacctctgagtccgccacccccgagagcggccctggcacctccaccgagcccagcgagggcagcgcacccggcagccctgccggcagccccacctccacagaggagggaaccagcaccgagcccagcgaaggcagcgccccaggcaccagcaccgagcctagtgagcaggagattaaacggatcaacaagatcagaagaagacttgtgaaagacagcaacaccaagaaggccggcaagacaggccccatgaaaaccctgctggttagagtgatgacacccgatctgagagagcggctggaaaacctgagaaagaagcctgaaaatatcccccagcccatcagcaatacatctagagccaacctgaataagctgctgaccgattacaccgaaatgaagaaggcgatcctgcatgtgtactgggaagagttccagaaggaccctgtgggcctgatgagccgggtggcccagcctgccagcaagaagatcgatcagaacaagctgaaacctgagatggacgagaagggcaacctgaccaccgccggctttgcctgctctcagtgtggccagcccctgttcgtgtacaagctggagcaggtgtctgagaagggcaaggcttacaccaactacttcggacggtgcaatgtggccgagcacgaaaagctgatcctgctggcccagctgaagcccgagaaggatagcgacgaagccgtgacatatagcctgggaaagtttgggcagagggccctggatttctacagcattcatgtgaccaaggagtccacccaccccgtgaagcccctggcccagatcgccggaaacagatacgcctccggacctgtgggaaaggccctgagcgacgcatgtatgggcacaatcgcctccttcctgtctaagtaccaggacatcatcatcgaacaccagaaggtggtgaagggcaaccagaagagactggagagcctgcgggagctggccggcaaggaaaacctggaataccctagcgtgaccctgccacctcagcctcacaccaaggagggcgttgatgcctacaacgaagtgatcgcccgggtgcgaatgtgggtgaacctgaacctgtggcagaagctgaagctaagcagagatgatgccaagcctctgctgagactgaagggattcccttcctttcctctggtcgagagacaggccaacgaagtggactggtgggacatggtgtgtaacgtgaagaagctgatcaacgagaaaaaggaggatggcaaggtgttttggcagaatctggctggctacaagagacaggaagccctgagaccatacctgagcagcgaggaagatcggaagaagggaaagaaattcgctcggtaccagctgggcgacctgctgctgcacctggaaaagaagcacggcgaggactggggaaaggtgtacgacgaggcctgggagcggattgacaagaaagtggaaggcctgagcaagcacatcaagctggaagaggaacggagaagcgaggacgcccagagcaaggccgccctgaccgactggctgcgggctaaggccagcttcgtgatcgagggcctgaaggaggccgacaaggacgagttctgcagatgcgagctgaagctgcagaagtggtacggggacctgcggggaaagcccttcgccatcgaagccgagaacagcatcctggacatcagcggcttcagcaagcagtacaactgtgccttcatctggcagaaggacggcgtgaagaagctgaacctgtacctgatcatcaactacttcaagggcggcaagctgcggttcaagaagatcaaacctgaagccttcgaagccaacagattctacaccgtgatcaacaaaaagagcggcgagatcgtgcccatggaggtgaacttcaacttcgacgaccccaacctgatcatcctgcctctggcctttggcaagagacagggcagagaattcatctggaacgacctgctgtccctggaaaccggcagcctgaagctggccaacggaagagtgatcgagaagacactgtacaacagaagaacccggcaggatgagcctgccctgttcgtggccctgaccttcgagcggcgggaggtcctggactcctccaatatcaaaccaatgaacctgatcggcgtggcaagaggcgaaaacatccccgccgtgatcgccctgaccgaccccgagggctgcccactgagccggtttaaggatagcctgggaaacccaacccacatcctgagaatcggcgagagctataaggagaagcagcggaccatccaggccaagaaggaggtggagcagcggagagccggcggctacagccggaagtacgccagcaaagccaagaatctggcagacgatatggtgagaaacaccgctagagatctgctgtactacgccgtgacccaggatgccatgctgatcttcgccaacctgagccggggcttcggccggcagggcaagcggaccttcatggccgagagacagtacacacggatggaggactggctgaccgccaagctggcctacgagggcctgagcaagacctacctgtccaagacactggcccagtacacctccaagacatgcagcaactgtgggtttaccatcaccagcgccgactacgacagggtgctggagaagctgaagaagacagcaacaggctggatgaccacaattaacggcaaggagctgaaggtggagggccagattacctactacaacagatacaagagacagaacgtagtcaaggacctgtccgtcgagctggatagactgagcgaagaatctgtgaacaacgacatctcctcctggacaaagggcagaagcggagaagctctgagcctcctgaagaaaagattctcccatagacccgtgcaggagaagttcgtgtgcctgaactgcggcttcgagacacacgcagccgagcaagccgccctgaacatcgccagatcctggctgttcctgcggagccaggagtacaagaaataccagacaaacaagacaaccggcaacaccgataagagagccttcgtcgagacctggcagtccttttaccggaagaagcttaaggaggtgtggaaacctgccgtgcggtctggcggatctggcggaggctccaagcccggcgccctgagcttcgccgacgtggccgtgtacttcagccccgaggagtggggctgcctgaggcccgcccagagggccctgtacagggacgtgatgagggagacctacggccacctgggcgccctgggcttccccggccccaagcccgccctgatcagctggatggagcaggagagcgaggcctggagcagcgccgcccaggaccccgagaagggcgagagcctgggcggcgccaggggcggcccaagcagcggcgcccctcctcccagcggcggcagcccagccggctccccaacctctaccgaggagggcacctctgagtccgccacccccgagagcggccctggcacctccaccgagcccagcgagggcagcgcacccggcagccctgccggcagccccacctccacagaggagggaaccagcaccgagcccagcgaaggcagcgccccaggcaccagcaccgagcctagtgagcaggagattaaacggatcaacaagatcagaagaagacttgtgaaagacagcaacaccaagaaggccggcaagacaggccccatgaaaaccctgctggttagagtgatgacacccgatctgagagagcggctggaaaacctgagaaagaagcctgaaaatatcccccagcccatcagcaatacatctagagccaacctgaataagctgctgaccgattacaccgaaatgaagaaggcgatcctgcatgtgtactgggaagagttccagaaggaccctgtgggcctgatgagccgggtggcccagcctgccagcaagaagatcgatcagaacaagctgaaacctgagatggacgagaagggcaacctgaccaccgccggctttgcctgctctcagtgtggccagcccctgttcgtgtacaagctggagcaggtgtctgagaagggcaaggcttacaccaactacttcggacggtgcaatgtggccgagcacgaaaagctgatcctgctggcccagctgaagcccgagaaggatagcgacgaagccgtgacatatagcctgggaaagtttgggcagagggccctggatttctacagcattcatgtgaccaaggagtccacccaccccgtgaagcccctggcccagatcgccggaaacagatacgcctccggacctgtgggaaaggccctgagcgacgcatgtatgggcacaatcgcctccttcctgtctaagtaccaggacatcatcatcgaacaccagaaggtggtgaagggcaaccagaagagactggagagcctgcgggagctggccggcaaggaaaacctggaataccctagcgtgaccctgccacctcagcctcacaccaaggagggcgttgatgcctacaacgaagtgatcgcccgggtgcgaatgtgggtgaacctgaacctgtggcagaagctgaagctaagcagagatgatgccaagcctctgctgagactgaagggattcccttcctttcctctggtcgagagacaggccaacgaagtggactggtgggacatggtgtgtaacgtgaagaagctgatcaacgagaaaaaggaggatggcaaggtgttttggcagaatctggctggctacaagagacaggaagccctgagaccatacctgagcagcgaggaagatcggaagaagggaaagaaattcgctcggtaccagctgggcgacctgctgctgcacctggaaaagaagcacggcgaggactggggaaaggtgtacgacgaggcctgggagcggattgacaagaaagtggaaggcctgagcaagcacatcaagctggaagaggaacggagaagcgaggacgcccagagcaaggccgccctgaccgactggctgcgggctaaggccagcttcgtgatcgagggcctgaaggaggccgacaaggacgagttctgcagatgcgagctgaagctgcagaagtggtacggggacctgcggggaaagcccttcgccatcgaagccgagaacagcatcctggacatcagcggcttcagcaagcagtacaactgtgccttcatctggcagaaggacggcgtgaagaagctgaacctgtacctgatcatcaactacttcaagggcggcaagctgcggttcaagaagatcaaacctgaagccttcgaagccaacagattctacaccgtgatcaacaaaaagagcggcgagatcgtgcccatggaggtgaacttcaacttcgacgaccccaacctgatcatcctgcctctggcctttggcaagagacagggcagagaattcatctggaacgacctgctgtccctggaaaccggcagcctgaagctggccaacggaagagtgatcgagaagacactgtacaacagaagaacccggcaggatgagcctgccctgttcgtggccctgaccttcgagcggcgggaggtcctggactcctccaatatcaaaccaatgaacctgatcggcgtggcaagaggcgaaaacatccccgccgtgatcgccctgaccgaccccgagggctgcccactgagccggtttaaggatagcctgggaaacccaacccacatcctgagaatcggcgagagctataaggagaagcagcggaccatccaggccaagaaggaggtggagcagcggagagccggcggctacagccggaagtacgccagcaaagccaagaatctggcagacgatatggtgagaaacaccgctagagatctgctgtactacgccgtgacccaggatgccatgctgatcttcgccaacctgagccggggcttcggccggcagggcaagcggaccttcatggccgagagacagtacacacggatggaggactggctgaccgccaagctggcctacgagggcctgagcaagacctacctgtccaagacactggcccagtacacctccaagacatgcagcaactgtgggtttaccatcaccagcgccgactacgacagggtgctggagaagctgaagaagacagcaacaggctggatgaccacaattaacggcaaggagctgaaggtggagggccagattacctactacaacagatacaagagacagaacgtagtcaaggacctgtccgtcgagctggatagactgagcgaagaatctgtgaacaacgacatctcctcctggacaaagggcagaagcggagaagctctgagcctcctgaagaaaagattctcccatagacccgtgcaggagaagttcgtgtgcctgaactgcggcttcgagacacacgcagccgagcaagccgccctgaacatcgccagatcctggctgttcctgcggagccaggagtacaagaaataccagacaaacaagacaaccggcaacaccgataagagagccttcgtcgagacctggcagtccttttaccggaagaagcttaaggaggtgtggaaacctgccgtgcggtctggcggatctggcggaggctcctaagcccggcgccctgagcttcgccgacgtggccgtgtacttcagccccgaggagtggggctgcctgaggcccgcccagagggccctgtacagggacgtgatgagggagacctacggccacctgggcgccctgggcttccccggccccaagcccgccctgatcagctggatggagcaggagagcgaggcctggagcagcgccgcccaggaccccgagaagggcgagagcctgggcggcgccaggggatctggctccggcagcggccccaagaaaaagagaaaagtctaagctgccttctgcggggcttgccttctggccatgcccttcttctctcccttgcacctgtacctcttggtctttgaataaagcctgagtaggaaggctagcaaaaaaaaaaaaaaaaaaaaaaaaaaaaaaaaaaaaaaaaaaaaaaaaaaaaaaaaaaaaaaaaaaaaaaaaaaaaaaaa

SEQ ID NO: 16471 - RNA, 9485 nt, synthetic construct
  source 1..9485: mol_type = other RNA
aggaaataagagagaaaagaagagtaagaagaaatataagagccaccatggcccctaagaagaagcgtaaagtgagccggatggaacgcctcgtctacgaggtgcggcagaagtgcagaaacatcgaggacatctgcatctcctgcggatctctgaacgtgaccctggagcacccactgttcatcggcggcatgtgccagaactgtaaaaactgttttctggagtgtgcctatcaatacgacgatgacggctaccagagctactgcaccatctgttgcggcggaagagaggtgctgatgtgtggaaataacaactgctgccggtgcttctgcgtggaatgcgtggacctgctggtgggccccggcgccgcccaggccgctattaaggaagatccttggaactgctacatgtgcggccacaagggcacatacggcctgctgagacggagagaggactggcctagcagactgcagatgttcttcgccaataaccacgaccaggagttcgacccccctaaggtgtaccctcccgtccccgccgagaagagaaagcccatccgggtcctgagcctgttcgatggcatcgccaccggtctgctggtgctgaaggacctgggcatccaggtggataggtacattgcctccgaggtgtgcgaggactccatcaccgtgggaatggtgcgtcatcagggcaagatcatgtacgtgggcgacgtgcggagcgtgacacagaagcatatccaggagtggggccctttcgacctggtgatcggcggcagcccttgcaatgacctgagcatcgtgaacccagcccggaagggcctgtacgagggaaccggcagactgttcttcgagttttacagactgctgcacgacgcccggcctaaggaaggcgacgaccggcccttcttttggctgttcgagaatgtggtggccatgggagtcagcgacaagcgggatattagccggttcctggagagcaaccccgtgatgatcgatgccaaggaagtgagcgccgcccaccgggccagatacttctggggcaatctgcctggcatgaacagacccctggccagcaccgtgaacgacaagctggagctgcaggagtgcctggagcacggccggatcgccaagttcagcaaggtgagaaccatcaccacccgaagcaacagcatcaaacaaggcaaggaccagcactttcctgtgttcatgaacgagaaggaggacatcctgtggtgtaccgagatggagagagtgttcgggttcccagtccactacacagatgtcagcaacatgtctagactggccagacagagactgctgggaagaagctggtccgtccctgtgatcagacacctgttcgcccctctgaaggagtacttcgcctgcgtgagcagcggcaacagcaacgccaacagccggggccccagcttctctagcggcctggtgccactgtccctgagagggagccacatgggccccatggagatctacaaaaccgtgagcgcctggaagcggcagcctgtgcgcgtgctgagcctgtttcggaatatcgataaagtcctgaaaagcctgggattcctggagagcggctctggctccggcggtggcaccctgaagtacgtggaggatgtgacaaacgtggtcagacgggatgtggagaagtggggccccttcgatctggtgtacggcagcacccaacccctgggcagctcttgtgaccggtgccctggctggtacatgtttcagttccaccggatcctgcagtacgccctgccgagacaggagtcccagcggccattcttttggattttcatggacaacttgctgctgaccgaggatgaccaggaaactaccactcggttcctgcagaccgaagccgtgaccctgcaggacgtgagaggccgggactaccagaacgccatgcgggtgtggtccaacatccctggactgaaaagcaagcacgcacctctgacccctaaagaagaggagtacctgcaggcccaggtgcggagcagaagcaagctggacgcccctaaggtggatctgctggtgaagaattgcctcctgcccctgagagagtacttcaagtatttcagccagaatagtctgcccctgggaggcagcggcggcggcgccctggtgacatttgaggacgtcgccgtgcggttcacccaggaggaatgggctctgctggatccttctcagaaaatcctgtaccgggacgtgatgagagagacataccggaatctgacctccgtgggcatcaactgggaatgttgggaccttgaagcctgcttcagaagcctgggaagaaacctgagagtgcaggtggtgaagagaaagtgcgagctgaccaacagcggcccctgcgccgagggcggcccaagcagcggcgcccctcctcccagcggcggcagcccagccggctccccaacctctaccgaggagggcacctctgagtccgccacccccgagagcggccctggcacctccaccgagcccagcgagggcagcgcacccggcagccctgccggcagccccacctccacagaggagggaaccagcaccgagcccagcgaaggcagcgccccaggcaccagcaccgagcctagtgagcaggagattaaacggatcaacaagatcagaagaagacttgtgaaagacagcaacaccaagaaggccggcaagacaggccccatgaaaaccctgctggttagagtgatgacacccgatctgagagagcggctggaaaacctgagaaagaagcctgaaaatatcccccagcccatcagcaatacatctagagccaacctgaataagctgctgaccgattacaccgaaatgaagaaggcgatcctgcatgtgtactgggaagagttccagaaggaccctgtgggcctgatgagccgggtggcccagcctgccagcaagaagatcgatcagaacaagctgaaacctgagatggacgagaagggcaacctgaccaccgccggctttgcctgctctcagtgtggccagcccctgttcgtgtacaagctggagcaggtgtctgagaagggcaaggcttacaccaactacttcggacggtgcaatgtggccgagcacgaaaagctgatcctgctggcccagctgaagcccgagaaggatagcgacgaagccgtgacatatagcctgggaaagtttgggcagagggccctggatttctacagcattcatgtgaccaaggagtccacccaccccgtgaagcccctggcccagatcgccggaaacagatacgcctccggacctgtgggaaaggccctgagcgacgcatgtatgggcacaatcgcctccttcctgtctaagtaccaggacatcatcatcgaacaccagaaggtggtgaagggcaaccagaagagactggagagcctgcgggagctggccggcaaggaaaacctggaataccctagcgtgaccctgccacctcagcctcacaccaaggagggcgttgatgcctacaacgaagtgatcgcccgggtgcgaatgtgggtgaacctgaacctgtggcagaagctgaagctaagcagagatgatgccaagcctctgctgagactgaagggattcccttcctttcctctggtcgagagacaggccaacgaagtggactggtgggacatggtgtgtaacgtgaagaagctgatcaacgagaaaaaggaggatggcaaggtgttttggcagaatctggctggctacaagagacaggaagccctgagaccatacctgagcagcgaggaagatcggaagaagggaaagaaattcgctcggtaccagctgggcgacctgctgctgcacctggaaaagaagcacggcgaggactggggaaaggtgtacgacgaggcctgggagcggattgacaagaaagtggaaggcctgagcaagcacatcaagctggaagaggaacggagaagcgaggacgcccagagcaaggccgccctgaccgactggctgcgggctaaggccagcttcgtgatcgagggcctgaaggaggccgacaaggacgagttctgcagatgcgagctgaagctgcagaagtggtacggggacctgcggggaaagcccttcgccatcgaagccgagaacagcatcctggacatcagcggcttcagcaagcagtacaactgtgccttcatctggcagaaggacggcgtgaagaagctgaacctgtacctgatcatcaactacttcaagggcggcaagctgcggttcaagaagatcaaacctgaagccttcgaagccaacagattctacaccgtgatcaacaaaaagagcggcgagatcgtgcccatggaggtgaacttcaacttcgacgaccccaacctgatcatcctgcctctggcctttggcaagagacagggcagagaattcatctggaacgacctgctgtccctggaaaccggcagcctgaagctggccaacggaagagtgatcgagaagacactgtacaacagaagaacccggcaggatgagcctgccctgttcgtggccctgaccttcgagcggcgggaggtcctggactcctccaatatcaaaccaatgaacctgatcggcgtggcaagaggcgaaaacatccccgccgtgatcgccctgaccgaccccgagggctgcccactgagccggtttaaggatagcctgggaaacccaacccacatcctgagaatcggcgagagctataaggagaagcagcggaccatccaggccaagaaggaggtggagcagcggagagccggcggctacagccggaagtacgccagcaaagccaagaatctggcagacgatatggtgagaaacaccgctagagatctgctgtactacgccgtgacccaggatgccatgctgatcttcgccaacctgagccggggcttcggccggcagggcaagcggaccttcatggccgagagacagtacacacggatggaggactggctgaccgccaagctggcctacgagggcctgagcaagacctacctgtccaagacactggcccagtacacctccaagacatgcagcaactgtgggtttaccatcaccagcgccgactacgacagggtgctggagaagctgaagaagacagcaacaggctggatgaccacaattaacggcaaggagctgaaggtggagggccagattacctactacaacagatacaagagacagaacgtagtcaaggacctgtccgtcgagctggatagactgagcgaagaatctgtgaacaacgacatctcctcctggacaaagggcagaagcggagaagctctgagcctcctgaagaaaagattctcccatagacccgtgcaggagaagttcgtgtgcctgaactgcggcttcgagacacacgcagccgagcaagccgccctgaacatcgccagatcctggctgttcctgcggagccaggagtacaagaaataccagacaaacaagacaaccggcaacaccgataagagagccttcgtcgagacctggcagtccttttaccggaagaagcttaaggaggtgtggaaacctgccgtgcggtctggcggatctggcggaggctccgagcccggcgccgtgagcttcgccgacgtggccgtgtacttcagccccgaggagtggggctgcctgaggcccgcccagagggtgctgtacagggacgtgatgagggagacctacggccacctgggcgccctgggcttccccggccccaagcccgccctgatcagctggatggagcaggagagcgaggcctggagcagcgccgcccaggaccccgaggagggcgagagcctgggcggcgccctgggcggcccaagcagcggcgcccctcctcccagcggcggcagcccagccggctccccaacctctaccgaggagggcacctctgagtccgccacccccgagagcggccctggcacctccaccgagcccagcgagggcagcgcacccggcagccctgccggcagccccacctccacagaggagggaaccagcaccgagcccagcgaaggcagcgccccaggcaccagcaccgagcctagtgagcaggagattaaacggatcaacaagatcagaagaagacttgtgaaagacagcaacaccaagaaggccggcaagacaggccccatgaaaaccctgctggttagagtgatgacacccgatctgagagagcggctggaaaacctgagaaagaagcctgaaaatatcccccagcccatcagcaatacatctagagccaacctgaataagctgctgaccgattacaccgaaatgaagaaggcgatcctgcatgtgtactgggaagagttccagaaggaccctgtgggcctgatgagccgggtggcccagcctgccagcaagaagatcgatcagaacaagctgaaacctgagatggacgagaagggcaacctgaccaccgccggctttgcctgctctcagtgtggccagcccctgttcgtgtacaagctggagcaggtgtctgagaagggcaaggcttacaccaactacttcggacggtgcaatgtggccgagcacgaaaagctgatcctgctggcccagctgaagcccgagaaggatagcgacgaagccgtgacatatagcctgggaaagtttgggcagagggccctggatttctacagcattcatgtgaccaaggagtccacccaccccgtgaagcccctggcccagatcgccggaaacagatacgcctccggacctgtgggaaaggccctgagcgacgcatgtatgggcacaatcgcctccttcctgtctaagtaccaggacatcatcatcgaacaccagaaggtggtgaagggcaaccagaagagactggagagcctgcgggagctggccggcaaggaaaacctggaataccctagcgtgaccctgccacctcagcctcacaccaaggagggcgttgatgcctacaacgaagtgatcgcccgggtgcgaatgtgggtgaacctgaacctgtggcagaagctgaagctaagcagagatgatgccaagcctctgctgagactgaagggattcccttcctttcctctggtcgagagacaggccaacgaagtggactggtgggacatggtgtgtaacgtgaagaagctgatcaacgagaaaaaggaggatggcaaggtgttttggcagaatctggctggctacaagagacaggaagccctgagaccatacctgagcagcgaggaagatcggaagaagggaaagaaattcgctcggtaccagctgggcgacctgctgctgcacctggaaaagaagcacggcgaggactggggaaaggtgtacgacgaggcctgggagcggattgacaagaaagtggaaggcctgagcaagcacatcaagctggaagaggaacggagaagcgaggacgcccagagcaaggccgccctgaccgactggctgcgggctaaggccagcttcgtgatcgagggcctgaaggaggccgacaaggacgagttctgcagatgcgagctgaagctgcagaagtggtacggggacctgcggggaaagcccttcgccatcgaagccgagaacagcatcctggacatcagcggcttcagcaagcagtacaactgtgccttcatctggcagaaggacggcgtgaagaagctgaacctgtacctgatcatcaactacttcaagggcggcaagctgcggttcaagaagatcaaacctgaagccttcgaagccaacagattctacaccgtgatcaacaaaaagagcggcgagatcgtgcccatggaggtgaacttcaacttcgacgaccccaacctgatcatcctgcctctggcctttggcaagagacagggcagagaattcatctggaacgacctgctgtccctggaaaccggcagcctgaagctggccaacggaagagtgatcgagaagacactgtacaacagaagaacccggcaggatgagcctgccctgttcgtggccctgaccttcgagcggcgggaggtcctggactcctccaatatcaaaccaatgaacctgatcggcgtggcaagaggcgaaaacatccccgccgtgatcgccctgaccgaccccgagggctgcccactgagccggtttaaggatagcctgggaaacccaacccacatcctgagaatcggcgagagctataaggagaagcagcggaccatccaggccaagaaggaggtggagcagcggagagccggcggctacagccggaagtacgccagcaaagccaagaatctggcagacgatatggtgagaaacaccgctagagatctgctgtactacgccgtgacccaggatgccatgctgatcttcgccaacctgagccggggcttcggccggcagggcaagcggaccttcatggccgagagacagtacacacggatggaggactggctgaccgccaagctggcctacgagggcctgagcaagacctacctgtccaagacactggcccagtacacctccaagacatgcagcaactgtgggtttaccatcaccagcgccgactacgacagggtgctggagaagctgaagaagacagcaacaggctggatgaccacaattaacggcaaggagctgaaggtggagggccagattacctactacaacagatacaagagacagaacgtagtcaaggacctgtccgtcgagctggatagactgagcgaagaatctgtgaacaacgacatctcctcctggacaaagggcagaagcggagaagctctgagcctcctgaagaaaagattctcccatagacccgtgcaggagaagttcgtgtgcctgaactgcggcttcgagacacacgcagccgagcaagccgccctgaacatcgccagatcctggctgttcctgcggagccaggagtacaagaaataccagacaaacaagacaaccggcaacaccgataagagagccttcgtcgagacctggcagtccttttaccggaagaagcttaaggaggtgtggaaacctgccgtgcggtctggcggatctggcggaggctcctgagcccggcgccgtgagcttcgccgacgtggccgtgtacttcagccccgaggagtggggctgcctgaggcccgcccagagggtgctgtacagggacgtgatgagggagacctacggccacctgggcgccctgggcttccccggccccaagcccgccctgatcagctggatggagcaggagagcgaggcctggagcagcgccgcccaggaccccgaggagggcgagagcctgggcggcgccctgggatctggctccggcagcggccccaagaaaaagagaaaagtctaagctgccttctgcggggcttgccttctggccatgcccttcttctctcccttgcacctgtacctcttggtctttgaataaagcctgagtaggaaggctagcaaaaaaaaaaaaaaaaaaaaaaaaaaaaaaaaaaaaaaaaaaaaaaaaaaaaaaaaaaaaaaaaaaaaaaaaaaaaaaaa

SEQ ID NO: 16472 - RNA, 9491 nt, synthetic construct
  source 1..9491: mol_type = other RNA
aggaaataagagagaaaagaagagtaagaagaaatataagagccaccatggcccctaagaagaagcgtaaagtgagccggatggaacgcctcgtctacgaggtgcggcagaagtgcagaaacatcgaggacatctgcatctcctgcggatctctgaacgtgaccctggagcacccactgttcatcggcggcatgtgccagaactgtaaaaactgttttctggagtgtgcctatcaatacgacgatgacggctaccagagctactgcaccatctgttgcggcggaagagaggtgctgatgtgtggaaataacaactgctgccggtgcttctgcgtggaatgcgtggacctgctggtgggccccggcgccgcccaggccgctattaaggaagatccttggaactgctacatgtgcggccacaagggcacatacggcctgctgagacggagagaggactggcctagcagactgcagatgttcttcgccaataaccacgaccaggagttcgacccccctaaggtgtaccctcccgtccccgccgagaagagaaagcccatccgggtcctgagcctgttcgatggcatcgccaccggtctgctggtgctgaaggacctgggcatccaggtggataggtacattgcctccgaggtgtgcgaggactccatcaccgtgggaatggtgcgtcatcagggcaagatcatgtacgtgggcgacgtgcggagcgtgacacagaagcatatccaggagtggggccctttcgacctggtgatcggcggcagcccttgcaatgacctgagcatcgtgaacccagcccggaagggcctgtacgagggaaccggcagactgttcttcgagttttacagactgctgcacgacgcccggcctaaggaaggcgacgaccggcccttcttttggctgttcgagaatgtggtggccatgggagtcagcgacaagcgggatattagccggttcctggagagcaaccccgtgatgatcgatgccaaggaagtgagcgccgcccaccgggccagatacttctggggcaatctgcctggcatgaacagacccctggccagcaccgtgaacgacaagctggagctgcaggagtgcctggagcacggccggatcgccaagttcagcaaggtgagaaccatcaccacccgaagcaacagcatcaaacaaggcaaggaccagcactttcctgtgttcatgaacgagaaggaggacatcctgtggtgtaccgagatggagagagtgttcgggttcccagtccactacacagatgtcagcaacatgtctagactggccagacagagactgctgggaagaagctggtccgtccctgtgatcagacacctgttcgcccctctgaaggagtacttcgcctgcgtgagcagcggcaacagcaacgccaacagccggggccccagcttctctagcggcctggtgccactgtccctgagagggagccacatgggccccatggagatctacaaaaccgtgagcgcctggaagcggcagcctgtgcgcgtgctgagcctgtttcggaatatcgataaagtcctgaaaagcctgggattcctggagagcggctctggctccggcggtggcaccctgaagtacgtggaggatgtgacaaacgtggtcagacgggatgtggagaagtggggccccttcgatctggtgtacggcagcacccaacccctgggcagctcttgtgaccggtgccctggctggtacatgtttcagttccaccggatcctgcagtacgccctgccgagacaggagtcccagcggccattcttttggattttcatggacaacttgctgctgaccgaggatgaccaggaaactaccactcggttcctgcagaccgaagccgtgaccctgcaggacgtgagaggccgggactaccagaacgccatgcgggtgtggtccaacatccctggactgaaaagcaagcacgcacctctgacccctaaagaagaggagtacctgcaggcccaggtgcggagcagaagcaagctggacgcccctaaggtggatctgctggtgaagaattgcctcctgcccctgagagagtacttcaagtatttcagccagaatagtctgcccctgggaggcagcggcggcggcgccctggtgacatttgaggacgtcgccgtgcggttcacccaggaggaatgggctctgctggatccttctcagaaaatcctgtaccgggacgtgatgagagagacataccggaatctgacctccgtgggcatcaactgggaatgttgggaccttgaagcctgcttcagaagcctgggaagaaacctgagagtgcaggtggtgaagagaaagtgcgagctgaccaacagcggcccctgcgccgagggcggcccaagcagcggcgcccctcctcccagcggcggcagcccagccggctccccaacctctaccgaggagggcacctctgagtccgccacccccgagagcggccctggcacctccaccgagcccagcgagggcagcgcacccggcagccctgccggcagccccacctccacagaggagggaaccagcaccgagcccagcgaaggcagcgccccaggcaccagcaccgagcctagtgagcaggagattaaacggatcaacaagatcagaagaagacttgtgaaagacagcaacaccaagaaggccggcaagacaggccccatgaaaaccctgctggttagagtgatgacacccgatctgagagagcggctggaaaacctgagaaagaagcctgaaaatatcccccagcccatcagcaatacatctagagccaacctgaataagctgctgaccgattacaccgaaatgaagaaggcgatcctgcatgtgtactgggaagagttccagaaggaccctgtgggcctgatgagccgggtggcccagcctgccagcaagaagatcgatcagaacaagctgaaacctgagatggacgagaagggcaacctgaccaccgccggctttgcctgctctcagtgtggccagcccctgttcgtgtacaagctggagcaggtgtctgagaagggcaaggcttacaccaactacttcggacggtgcaatgtggccgagcacgaaaagctgatcctgctggcccagctgaagcccgagaaggatagcgacgaagccgtgacatatagcctgggaaagtttgggcagagggccctggatttctacagcattcatgtgaccaaggagtccacccaccccgtgaagcccctggcccagatcgccggaaacagatacgcctccggacctgtgggaaaggccctgagcgacgcatgtatgggcacaatcgcctccttcctgtctaagtaccaggacatcatcatcgaacaccagaaggtggtgaagggcaaccagaagagactggagagcctgcgggagctggccggcaaggaaaacctggaataccctagcgtgaccctgccacctcagcctcacaccaaggagggcgttgatgcctacaacgaagtgatcgcccgggtgcgaatgtgggtgaacctgaacctgtggcagaagctgaagctaagcagagatgatgccaagcctctgctgagactgaagggattcccttcctttcctctggtcgagagacaggccaacgaagtggactggtgggacatggtgtgtaacgtgaagaagctgatcaacgagaaaaaggaggatggcaaggtgttttggcagaatctggctggctacaagagacaggaagccctgagaccatacctgagcagcgaggaagatcggaagaagggaaagaaattcgctcggtaccagctgggcgacctgctgctgcacctggaaaagaagcacggcgaggactggggaaaggtgtacgacgaggcctgggagcggattgacaagaaagtggaaggcctgagcaagcacatcaagctggaagaggaacggagaagcgaggacgcccagagcaaggccgccctgaccgactggctgcgggctaaggccagcttcgtgatcgagggcctgaaggaggccgacaaggacgagttctgcagatgcgagctgaagctgcagaagtggtacggggacctgcggggaaagcccttcgccatcgaagccgagaacagcatcctggacatcagcggcttcagcaagcagtacaactgtgccttcatctggcagaaggacggcgtgaagaagctgaacctgtacctgatcatcaactacttcaagggcggcaagctgcggttcaagaagatcaaacctgaagccttcgaagccaacagattctacaccgtgatcaacaaaaagagcggcgagatcgtgcccatggaggtgaacttcaacttcgacgaccccaacctgatcatcctgcctctggcctttggcaagagacagggcagagaattcatctggaacgacctgctgtccctggaaaccggcagcctgaagctggccaacggaagagtgatcgagaagacactgtacaacagaagaacccggcaggatgagcctgccctgttcgtggccctgaccttcgagcggcgggaggtcctggactcctccaatatcaaaccaatgaacctgatcggcgtggcaagaggcgaaaacatccccgccgtgatcgccctgaccgaccccgagggctgcccactgagccggtttaaggatagcctgggaaacccaacccacatcctgagaatcggcgagagctataaggagaagcagcggaccatccaggccaagaaggaggtggagcagcggagagccggcggctacagccggaagtacgccagcaaagccaagaatctggcagacgatatggtgagaaacaccgctagagatctgctgtactacgccgtgacccaggatgccatgctgatcttcgccaacctgagccggggcttcggccggcagggcaagcggaccttcatggccgagagacagtacacacggatggaggactggctgaccgccaagctggcctacgagggcctgagcaagacctacctgtccaagacactggcccagtacacctccaagacatgcagcaactgtgggtttaccatcaccagcgccgactacgacagggtgctggagaagctgaagaagacagcaacaggctggatgaccacaattaacggcaaggagctgaaggtggagggccagattacctactacaacagatacaagagacagaacgtagtcaaggacctgtccgtcgagctggatagactgagcgaagaatctgtgaacaacgacatctcctcctggacaaagggcagaagcggagaagctctgagcctcctgaagaaaagattctcccatagacccgtgcaggagaagttcgtgtgcctgaactgcggcttcgagacacacgcagccgagcaagccgccctgaacatcgccagatcctggctgttcctgcggagccaggagtacaagaaataccagacaaacaagacaaccggcaacaccgataagagagccttcgtcgagacctggcagtccttttaccggaagaagcttaaggaggtgtggaaacctgccgtgcggtctggcggatctggcggaggctccgtgaccttcgaggacgtggccgtgaacttcaccagcggcgagtgggccctgctggacagcagccagaagaagctgtacagggacgtgatgaaggagaccttcctgaacctgatcagcatcgagaagggcctggagcccaacatcgaggagcactacaaggacttctgcaggaacctgaggacccagctggtggagaaggactggggctacgagtacaacaggcagtgggacgacaacctgcagaccggcggcccaagcagcggcgcccctcctcccagcggcggcagcccagccggctccccaacctctaccgaggagggcacctctgagtccgccacccccgagagcggccctggcacctccaccgagcccagcgagggcagcgcacccggcagccctgccggcagccccacctccacagaggagggaaccagcaccgagcccagcgaaggcagcgccccaggcaccagcaccgagcctagtgagcaggagattaaacggatcaacaagatcagaagaagacttgtgaaagacagcaacaccaagaaggccggcaagacaggccccatgaaaaccctgctggttagagtgatgacacccgatctgagagagcggctggaaaacctgagaaagaagcctgaaaatatcccccagcccatcagcaatacatctagagccaacctgaataagctgctgaccgattacaccgaaatgaagaaggcgatcctgcatgtgtactgggaagagttccagaaggaccctgtgggcctgatgagccgggtggcccagcctgccagcaagaagatcgatcagaacaagctgaaacctgagatggacgagaagggcaacctgaccaccgccggctttgcctgctctcagtgtggccagcccctgttcgtgtacaagctggagcaggtgtctgagaagggcaaggcttacaccaactacttcggacggtgcaatgtggccgagcacgaaaagctgatcctgctggcccagctgaagcccgagaaggatagcgacgaagccgtgacatatagcctgggaaagtttgggcagagggccctggatttctacagcattcatgtgaccaaggagtccacccaccccgtgaagcccctggcccagatcgccggaaacagatacgcctccggacctgtgggaaaggccctgagcgacgcatgtatgggcacaatcgcctccttcctgtctaagtaccaggacatcatcatcgaacaccagaaggtggtgaagggcaaccagaagagactggagagcctgcgggagctggccggcaaggaaaacctggaataccctagcgtgaccctgccacctcagcctcacaccaaggagggcgttgatgcctacaacgaagtgatcgcccgggtgcgaatgtgggtgaacctgaacctgtggcagaagctgaagctaagcagagatgatgccaagcctctgctgagactgaagggattcccttcctttcctctggtcgagagacaggccaacgaagtggactggtgggacatggtgtgtaacgtgaagaagctgatcaacgagaaaaaggaggatggcaaggtgttttggcagaatctggctggctacaagagacaggaagccctgagaccatacctgagcagcgaggaagatcggaagaagggaaagaaattcgctcggtaccagctgggcgacctgctgctgcacctggaaaagaagcacggcgaggactggggaaaggtgtacgacgaggcctgggagcggattgacaagaaagtggaaggcctgagcaagcacatcaagctggaagaggaacggagaagcgaggacgcccagagcaaggccgccctgaccgactggctgcgggctaaggccagcttcgtgatcgagggcctgaaggaggccgacaaggacgagttctgcagatgcgagctgaagctgcagaagtggtacggggacctgcggggaaagcccttcgccatcgaagccgagaacagcatcctggacatcagcggcttcagcaagcagtacaactgtgccttcatctggcagaaggacggcgtgaagaagctgaacctgtacctgatcatcaactacttcaagggcggcaagctgcggttcaagaagatcaaacctgaagccttcgaagccaacagattctacaccgtgatcaacaaaaagagcggcgagatcgtgcccatggaggtgaacttcaacttcgacgaccccaacctgatcatcctgcctctggcctttggcaagagacagggcagagaattcatctggaacgacctgctgtccctggaaaccggcagcctgaagctggccaacggaagagtgatcgagaagacactgtacaacagaagaacccggcaggatgagcctgccctgttcgtggccctgaccttcgagcggcgggaggtcctggactcctccaatatcaaaccaatgaacctgatcggcgtggcaagaggcgaaaacatccccgccgtgatcgccctgaccgaccccgagggctgcccactgagccggtttaaggatagcctgggaaacccaacccacatcctgagaatcggcgagagctataaggagaagcagcggaccatccaggccaagaaggaggtggagcagcggagagccggcggctacagccggaagtacgccagcaaagccaagaatctggcagacgatatggtgagaaacaccgctagagatctgctgtactacgccgtgacccaggatgccatgctgatcttcgccaacctgagccggggcttcggccggcagggcaagcggaccttcatggccgagagacagtacacacggatggaggactggctgaccgccaagctggcctacgagggcctgagcaagacctacctgtccaagacactggcccagtacacctccaagacatgcagcaactgtgggtttaccatcaccagcgccgactacgacagggtgctggagaagctgaagaagacagcaacaggctggatgaccacaattaacggcaaggagctgaaggtggagggccagattacctactacaacagatacaagagacagaacgtagtcaaggacctgtccgtcgagctggatagactgagcgaagaatctgtgaacaacgacatctcctcctggacaaagggcagaagcggagaagctctgagcctcctgaagaaaagattctcccatagacccgtgcaggagaagttcgtgtgcctgaactgcggcttcgagacacacgcagccgagcaagccgccctgaacatcgccagatcctggctgttcctgcggagccaggagtacaagaaataccagacaaacaagacaaccggcaacaccgataagagagccttcgtcgagacctggcagtccttttaccggaagaagcttaaggaggtgtggaaacctgccgtgcggtctggcggatctggcggaggctcctgtgaccttcgaggacgtggccgtgaacttcaccagcggcgagtgggccctgctggacagcagccagaagaagctgtacagggacgtgatgaaggagaccttcctgaacctgatcagcatcgagaagggcctggagcccaacatcgaggagcactacaaggacttctgcaggaacctgaggacccagctggtggagaaggactggggctacgagtacaacaggcagtgggacgacaacctgcagaccggatctggctccggcagcggccccaagaaaaagagaaaagtctaagctgccttctgcggggcttgccttctggccatgcccttcttctctcccttgcacctgtacctcttggtctttgaataaagcctgagtaggaaggctagcaaaaaaaaaaaaaaaaaaaaaaaaaaaaaaaaaaaaaaaaaaaaaaaaaaaaaaaaaaaaaaaaaaaaaaaaaaaaaaaa

SEQ ID NO: 16473 - RNA, 9485 nt, synthetic construct
  source 1..9485: mol_type = other RNA
aggaaataagagagaaaagaagagtaagaagaaatataagagccaccatggcccctaagaagaagcgtaaagtgagccggatggaacgcctcgtctacgaggtgcggcagaagtgcagaaacatcgaggacatctgcatctcctgcggatctctgaacgtgaccctggagcacccactgttcatcggcggcatgtgccagaactgtaaaaactgttttctggagtgtgcctatcaatacgacgatgacggctaccagagctactgcaccatctgttgcggcggaagagaggtgctgatgtgtggaaataacaactgctgccggtgcttctgcgtggaatgcgtggacctgctggtgggccccggcgccgcccaggccgctattaaggaagatccttggaactgctacatgtgcggccacaagggcacatacggcctgctgagacggagagaggactggcctagcagactgcagatgttcttcgccaataaccacgaccaggagttcgacccccctaaggtgtaccctcccgtccccgccgagaagagaaagcccatccgggtcctgagcctgttcgatggcatcgccaccggtctgctggtgctgaaggacctgggcatccaggtggataggtacattgcctccgaggtgtgcgaggactccatcaccgtgggaatggtgcgtcatcagggcaagatcatgtacgtgggcgacgtgcggagcgtgacacagaagcatatccaggagtggggccctttcgacctggtgatcggcggcagcccttgcaatgacctgagcatcgtgaacccagcccggaagggcctgtacgagggaaccggcagactgttcttcgagttttacagactgctgcacgacgcccggcctaaggaaggcgacgaccggcccttcttttggctgttcgagaatgtggtggccatgggagtcagcgacaagcgggatattagccggttcctggagagcaaccccgtgatgatcgatgccaaggaagtgagcgccgcccaccgggccagatacttctggggcaatctgcctggcatgaacagacccctggccagcaccgtgaacgacaagctggagctgcaggagtgcctggagcacggccggatcgccaagttcagcaaggtgagaaccatcaccacccgaagcaacagcatcaaacaaggcaaggaccagcactttcctgtgttcatgaacgagaaggaggacatcctgtggtgtaccgagatggagagagtgttcgggttcccagtccactacacagatgtcagcaacatgtctagactggccagacagagactgctgggaagaagctggtccgtccctgtgatcagacacctgttcgcccctctgaaggagtacttcgcctgcgtgagcagcggcaacagcaacgccaacagccggggccccagcttctctagcggcctggtgccactgtccctgagagggagccacatgggccccatggagatctacaaaaccgtgagcgcctggaagcggcagcctgtgcgcgtgctgagcctgtttcggaatatcgataaagtcctgaaaagcctgggattcctggagagcggctctggctccggcggtggcaccctgaagtacgtggaggatgtgacaaacgtggtcagacgggatgtggagaagtggggccccttcgatctggtgtacggcagcacccaacccctgggcagctcttgtgaccggtgccctggctggtacatgtttcagttccaccggatcctgcagtacgccctgccgagacaggagtcccagcggccattcttttggattttcatggacaacttgctgctgaccgaggatgaccaggaaactaccactcggttcctgcagaccgaagccgtgaccctgcaggacgtgagaggccgggactaccagaacgccatgcgggtgtggtccaacatccctggactgaaaagcaagcacgcacctctgacccctaaagaagaggagtacctgcaggcccaggtgcggagcagaagcaagctggacgcccctaaggtggatctgctggtgaagaattgcctcctgcccctgagagagtacttcaagtatttcagccagaatagtctgcccctgggaggcagcggcggcggcgccctggtgacatttgaggacgtcgccgtgcggttcacccaggaggaatgggctctgctggatccttctcagaaaatcctgtaccgggacgtgatgagagagacataccggaatctgacctccgtgggcatcaactgggaatgttgggaccttgaagcctgcttcagaagcctgggaagaaacctgagagtgcaggtggtgaagagaaagtgcgagctgaccaacagcggcccctgcgccgagggcggcccaagcagcggcgcccctcctcccagcggcggcagcccagccggctccccaacctctaccgaggagggcacctctgagtccgccacccccgagagcggccctggcacctccaccgagcccagcgagggcagcgcacccggcagccctgccggcagccccacctccacagaggagggaaccagcaccgagcccagcgaaggcagcgccccaggcaccagcaccgagcctagtgagcaggagattaaacggatcaacaagatcagaagaagacttgtgaaagacagcaacaccaagaaggccggcaagacaggccccatgaaaaccctgctggttagagtgatgacacccgatctgagagagcggctggaaaacctgagaaagaagcctgaaaatatcccccagcccatcagcaatacatctagagccaacctgaataagctgctgaccgattacaccgaaatgaagaaggcgatcctgcatgtgtactgggaagagttccagaaggaccctgtgggcctgatgagccgggtggcccagcctgccagcaagaagatcgatcagaacaagctgaaacctgagatggacgagaagggcaacctgaccaccgccggctttgcctgctctcagtgtggccagcccctgttcgtgtacaagctggagcaggtgtctgagaagggcaaggcttacaccaactacttcggacggtgcaatgtggccgagcacgaaaagctgatcctgctggcccagctgaagcccgagaaggatagcgacgaagccgtgacatatagcctgggaaagtttgggcagagggccctggatttctacagcattcatgtgaccaaggagtccacccaccccgtgaagcccctggcccagatcgccggaaacagatacgcctccggacctgtgggaaaggccctgagcgacgcatgtatgggcacaatcgcctccttcctgtctaagtaccaggacatcatcatcgaacaccagaaggtggtgaagggcaaccagaagagactggagagcctgcgggagctggccggcaaggaaaacctggaataccctagcgtgaccctgccacctcagcctcacaccaaggagggcgttgatgcctacaacgaagtgatcgcccgggtgcgaatgtgggtgaacctgaacctgtggcagaagctgaagctaagcagagatgatgccaagcctctgctgagactgaagggattcccttcctttcctctggtcgagagacaggccaacgaagtggactggtgggacatggtgtgtaacgtgaagaagctgatcaacgagaaaaaggaggatggcaaggtgttttggcagaatctggctggctacaagagacaggaagccctgagaccatacctgagcagcgaggaagatcggaagaagggaaagaaattcgctcggtaccagctgggcgacctgctgctgcacctggaaaagaagcacggcgaggactggggaaaggtgtacgacgaggcctgggagcggattgacaagaaagtggaaggcctgagcaagcacatcaagctggaagaggaacggagaagcgaggacgcccagagcaaggccgccctgaccgactggctgcgggctaaggccagcttcgtgatcgagggcctgaaggaggccgacaaggacgagttctgcagatgcgagctgaagctgcagaagtggtacggggacctgcggggaaagcccttcgccatcgaagccgagaacagcatcctggacatcagcggcttcagcaagcagtacaactgtgccttcatctggcagaaggacggcgtgaagaagctgaacctgtacctgatcatcaactacttcaagggcggcaagctgcggttcaagaagatcaaacctgaagccttcgaagccaacagattctacaccgtgatcaacaaaaagagcggcgagatcgtgcccatggaggtgaacttcaacttcgacgaccccaacctgatcatcctgcctctggcctttggcaagagacagggcagagaattcatctggaacgacctgctgtccctggaaaccggcagcctgaagctggccaacggaagagtgatcgagaagacactgtacaacagaagaacccggcaggatgagcctgccctgttcgtggccctgaccttcgagcggcgggaggtcctggactcctccaatatcaaaccaatgaacctgatcggcgtggcaagaggcgaaaacatccccgccgtgatcgccctgaccgaccccgagggctgcccactgagccggtttaaggatagcctgggaaacccaacccacatcctgagaatcggcgagagctataaggagaagcagcggaccatccaggccaagaaggaggtggagcagcggagagccggcggctacagccggaagtacgccagcaaagccaagaatctggcagacgatatggtgagaaacaccgctagagatctgctgtactacgccgtgacccaggatgccatgctgatcttcgccaacctgagccggggcttcggccggcagggcaagcggaccttcatggccgagagacagtacacacggatggaggactggctgaccgccaagctggcctacgagggcctgagcaagacctacctgtccaagacactggcccagtacacctccaagacatgcagcaactgtgggtttaccatcaccagcgccgactacgacagggtgctggagaagctgaagaagacagcaacaggctggatgaccacaattaacggcaaggagctgaaggtggagggccagattacctactacaacagatacaagagacagaacgtagtcaaggacctgtccgtcgagctggatagactgagcgaagaatctgtgaacaacgacatctcctcctggacaaagggcagaagcggagaagctctgagcctcctgaagaaaagattctcccatagacccgtgcaggagaagttcgtgtgcctgaactgcggcttcgagacacacgcagccgagcaagccgccctgaacatcgccagatcctggctgttcctgcggagccaggagtacaagaaataccagacaaacaagacaaccggcaacaccgataagagagccttcgtcgagacctggcagtccttttaccggaagaagcttaaggaggtgtggaaacctgccgtgcggtctggcggatctggcggaggctccatgatgggcctggtgaccttcgaggacgtggccgtggacttcacccaggaggagtggcagtacctgaaccccccccagaggatcctgtacaggggcgtgatgatggagacctacaggaacctggtgttcgtggccggccagcaggccaccaagcccgacctgatcctgaagatggaggtggaggagccctacctggccgaggacaagatccccatctggagctgccccgaggaggcctgccagggcggcccaagcagcggcgcccctcctcccagcggcggcagcccagccggctccccaacctctaccgaggagggcacctctgagtccgccacccccgagagcggccctggcacctccaccgagcccagcgagggcagcgcacccggcagccctgccggcagccccacctccacagaggagggaaccagcaccgagcccagcgaaggcagcgccccaggcaccagcaccgagcctagtgagcaggagattaaacggatcaacaagatcagaagaagacttgtgaaagacagcaacaccaagaaggccggcaagacaggccccatgaaaaccctgctggttagagtgatgacacccgatctgagagagcggctggaaaacctgagaaagaagcctgaaaatatcccccagcccatcagcaatacatctagagccaacctgaataagctgctgaccgattacaccgaaatgaagaaggcgatcctgcatgtgtactgggaagagttccagaaggaccctgtgggcctgatgagccgggtggcccagcctgccagcaagaagatcgatcagaacaagctgaaacctgagatggacgagaagggcaacctgaccaccgccggctttgcctgctctcagtgtggccagcccctgttcgtgtacaagctggagcaggtgtctgagaagggcaaggcttacaccaactacttcggacggtgcaatgtggccgagcacgaaaagctgatcctgctggcccagctgaagcccgagaaggatagcgacgaagccgtgacatatagcctgggaaagtttgggcagagggccctggatttctacagcattcatgtgaccaaggagtccacccaccccgtgaagcccctggcccagatcgccggaaacagatacgcctccggacctgtgggaaaggccctgagcgacgcatgtatgggcacaatcgcctccttcctgtctaagtaccaggacatcatcatcgaacaccagaaggtggtgaagggcaaccagaagagactggagagcctgcgggagctggccggcaaggaaaacctggaataccctagcgtgaccctgccacctcagcctcacaccaaggagggcgttgatgcctacaacgaagtgatcgcccgggtgcgaatgtgggtgaacctgaacctgtggcagaagctgaagctaagcagagatgatgccaagcctctgctgagactgaagggattcccttcctttcctctggtcgagagacaggccaacgaagtggactggtgggacatggtgtgtaacgtgaagaagctgatcaacgagaaaaaggaggatggcaaggtgttttggcagaatctggctggctacaagagacaggaagccctgagaccatacctgagcagcgaggaagatcggaagaagggaaagaaattcgctcggtaccagctgggcgacctgctgctgcacctggaaaagaagcacggcgaggactggggaaaggtgtacgacgaggcctgggagcggattgacaagaaagtggaaggcctgagcaagcacatcaagctggaagaggaacggagaagcgaggacgcccagagcaaggccgccctgaccgactggctgcgggctaaggccagcttcgtgatcgagggcctgaaggaggccgacaaggacgagttctgcagatgcgagctgaagctgcagaagtggtacggggacctgcggggaaagcccttcgccatcgaagccgagaacagcatcctggacatcagcggcttcagcaagcagtacaactgtgccttcatctggcagaaggacggcgtgaagaagctgaacctgtacctgatcatcaactacttcaagggcggcaagctgcggttcaagaagatcaaacctgaagccttcgaagccaacagattctacaccgtgatcaacaaaaagagcggcgagatcgtgcccatggaggtgaacttcaacttcgacgaccccaacctgatcatcctgcctctggcctttggcaagagacagggcagagaattcatctggaacgacctgctgtccctggaaaccggcagcctgaagctggccaacggaagagtgatcgagaagacactgtacaacagaagaacccggcaggatgagcctgccctgttcgtggccctgaccttcgagcggcgggaggtcctggactcctccaatatcaaaccaatgaacctgatcggcgtggcaagaggcgaaaacatccccgccgtgatcgccctgaccgaccccgagggctgcccactgagccggtttaaggatagcctgggaaacccaacccacatcctgagaatcggcgagagctataaggagaagcagcggaccatccaggccaagaaggaggtggagcagcggagagccggcggctacagccggaagtacgccagcaaagccaagaatctggcagacgatatggtgagaaacaccgctagagatctgctgtactacgccgtgacccaggatgccatgctgatcttcgccaacctgagccggggcttcggccggcagggcaagcggaccttcatggccgagagacagtacacacggatggaggactggctgaccgccaagctggcctacgagggcctgagcaagacctacctgtccaagacactggcccagtacacctccaagacatgcagcaactgtgggtttaccatcaccagcgccgactacgacagggtgctggagaagctgaagaagacagcaacaggctggatgaccacaattaacggcaaggagctgaaggtggagggccagattacctactacaacagatacaagagacagaacgtagtcaaggacctgtccgtcgagctggatagactgagcgaagaatctgtgaacaacgacatctcctcctggacaaagggcagaagcggagaagctctgagcctcctgaagaaaagattctcccatagacccgtgcaggagaagttcgtgtgcctgaactgcggcttcgagacacacgcagccgagcaagccgccctgaacatcgccagatcctggctgttcctgcggagccaggagtacaagaaataccagacaaacaagacaaccggcaacaccgataagagagccttcgtcgagacctggcagtccttttaccggaagaagcttaaggaggtgtggaaacctgccgtgcggtctggcggatctggcggaggctcctatgatgggcctggtgaccttcgaggacgtggccgtggacttcacccaggaggagtggcagtacctgaaccccccccagaggatcctgtacaggggcgtgatgatggagacctacaggaacctggtgttcgtggccggccagcaggccaccaagcccgacctgatcctgaagatggaggtggaggagccctacctggccgaggacaagatccccatctggagctgccccgaggaggcctgccagggatctggctccggcagcggccccaagaaaaagagaaaagtctaagctgccttctgcggggcttgccttctggccatgcccttcttctctcccttgcacctgtacctcttggtctttgaataaagcctgagtaggaaggctagcaaaaaaaaaaaaaaaaaaaaaaaaaaaaaaaaaaaaaaaaaaaaaaaaaaaaaaaaaaaaaaaaaaaaaaaaaaaaaaaa

SEQ ID NO: 16474 - RNA, 9485 nt, synthetic construct
  source 1..9485: mol_type = other RNA
aggaaataagagagaaaagaagagtaagaagaaatataagagccaccatggcccctaagaagaagcgtaaagtgagccggatggaacgcctcgtctacgaggtgcggcagaagtgcagaaacatcgaggacatctgcatctcctgcggatctctgaacgtgaccctggagcacccactgttcatcggcggcatgtgccagaactgtaaaaactgttttctggagtgtgcctatcaatacgacgatgacggctaccagagctactgcaccatctgttgcggcggaagagaggtgctgatgtgtggaaataacaactgctgccggtgcttctgcgtggaatgcgtggacctgctggtgggccccggcgccgcccaggccgctattaaggaagatccttggaactgctacatgtgcggccacaagggcacatacggcctgctgagacggagagaggactggcctagcagactgcagatgttcttcgccaataaccacgaccaggagttcgacccccctaaggtgtaccctcccgtccccgccgagaagagaaagcccatccgggtcctgagcctgttcgatggcatcgccaccggtctgctggtgctgaaggacctgggcatccaggtggataggtacattgcctccgaggtgtgcgaggactccatcaccgtgggaatggtgcgtcatcagggcaagatcatgtacgtgggcgacgtgcggagcgtgacacagaagcatatccaggagtggggccctttcgacctggtgatcggcggcagcccttgcaatgacctgagcatcgtgaacccagcccggaagggcctgtacgagggaaccggcagactgttcttcgagttttacagactgctgcacgacgcccggcctaaggaaggcgacgaccggcccttcttttggctgttcgagaatgtggtggccatgggagtcagcgacaagcgggatattagccggttcctggagagcaaccccgtgatgatcgatgccaaggaagtgagcgccgcccaccgggccagatacttctggggcaatctgcctggcatgaacagacccctggccagcaccgtgaacgacaagctggagctgcaggagtgcctggagcacggccggatcgccaagttcagcaaggtgagaaccatcaccacccgaagcaacagcatcaaacaaggcaaggaccagcactttcctgtgttcatgaacgagaaggaggacatcctgtggtgtaccgagatggagagagtgttcgggttcccagtccactacacagatgtcagcaacatgtctagactggccagacagagactgctgggaagaagctggtccgtccctgtgatcagacacctgttcgcccctctgaaggagtacttcgcctgcgtgagcagcggcaacagcaacgccaacagccggggccccagcttctctagcggcctggtgccactgtccctgagagggagccacatgggccccatggagatctacaaaaccgtgagcgcctggaagcggcagcctgtgcgcgtgctgagcctgtttcggaatatcgataaagtcctgaaaagcctgggattcctggagagcggctctggctccggcggtggcaccctgaagtacgtggaggatgtgacaaacgtggtcagacgggatgtggagaagtggggccccttcgatctggtgtacggcagcacccaacccctgggcagctcttgtgaccggtgccctggctggtacatgtttcagttccaccggatcctgcagtacgccctgccgagacaggagtcccagcggccattcttttggattttcatggacaacttgctgctgaccgaggatgaccaggaaactaccactcggttcctgcagaccgaagccgtgaccctgcaggacgtgagaggccgggactaccagaacgccatgcgggtgtggtccaacatccctggactgaaaagcaagcacgcacctctgacccctaaagaagaggagtacctgcaggcccaggtgcggagcagaagcaagctggacgcccctaaggtggatctgctggtgaagaattgcctcctgcccctgagagagtacttcaagtatttcagccagaatagtctgcccctgggaggcagcggcggcggcgccctggtgacatttgaggacgtcgccgtgcggttcacccaggaggaatgggctctgctggatccttctcagaaaatcctgtaccgggacgtgatgagagagacataccggaatctgacctccgtgggcatcaactgggaatgttgggaccttgaagcctgcttcagaagcctgggaagaaacctgagagtgcaggtggtgaagagaaagtgcgagctgaccaacagcggcccctgcgccgagggcggcccaagcagcggcgcccctcctcccagcggcggcagcccagccggctccccaacctctaccgaggagggcacctctgagtccgccacccccgagagcggccctggcacctccaccgagcccagcgagggcagcgcacccggcagccctgccggcagccccacctccacagaggagggaaccagcaccgagcccagcgaaggcagcgccccaggcaccagcaccgagcctagtgagcaggagattaaacggatcaacaagatcagaagaagacttgtgaaagacagcaacaccaagaaggccggcaagacaggccccatgaaaaccctgctggttagagtgatgacacccgatctgagagagcggctggaaaacctgagaaagaagcctgaaaatatcccccagcccatcagcaatacatctagagccaacctgaataagctgctgaccgattacaccgaaatgaagaaggcgatcctgcatgtgtactgggaagagttccagaaggaccctgtgggcctgatgagccgggtggcccagcctgccagcaagaagatcgatcagaacaagctgaaacctgagatggacgagaagggcaacctgaccaccgccggctttgcctgctctcagtgtggccagcccctgttcgtgtacaagctggagcaggtgtctgagaagggcaaggcttacaccaactacttcggacggtgcaatgtggccgagcacgaaaagctgatcctgctggcccagctgaagcccgagaaggatagcgacgaagccgtgacatatagcctgggaaagtttgggcagagggccctggatttctacagcattcatgtgaccaaggagtccacccaccccgtgaagcccctggcccagatcgccggaaacagatacgcctccggacctgtgggaaaggccctgagcgacgcatgtatgggcacaatcgcctccttcctgtctaagtaccaggacatcatcatcgaacaccagaaggtggtgaagggcaaccagaagagactggagagcctgcgggagctggccggcaaggaaaacctggaataccctagcgtgaccctgccacctcagcctcacaccaaggagggcgttgatgcctacaacgaagtgatcgcccgggtgcgaatgtgggtgaacctgaacctgtggcagaagctgaagctaagcagagatgatgccaagcctctgctgagactgaagggattcccttcctttcctctggtcgagagacaggccaacgaagtggactggtgggacatggtgtgtaacgtgaagaagctgatcaacgagaaaaaggaggatggcaaggtgttttggcagaatctggctggctacaagagacaggaagccctgagaccatacctgagcagcgaggaagatcggaagaagggaaagaaattcgctcggtaccagctgggcgacctgctgctgcacctggaaaagaagcacggcgaggactggggaaaggtgtacgacgaggcctgggagcggattgacaagaaagtggaaggcctgagcaagcacatcaagctggaagaggaacggagaagcgaggacgcccagagcaaggccgccctgaccgactggctgcgggctaaggccagcttcgtgatcgagggcctgaaggaggccgacaaggacgagttctgcagatgcgagctgaagctgcagaagtggtacggggacctgcggggaaagcccttcgccatcgaagccgagaacagcatcctggacatcagcggcttcagcaagcagtacaactgtgccttcatctggcagaaggacggcgtgaagaagctgaacctgtacctgatcatcaactacttcaagggcggcaagctgcggttcaagaagatcaaacctgaagccttcgaagccaacagattctacaccgtgatcaacaaaaagagcggcgagatcgtgcccatggaggtgaacttcaacttcgacgaccccaacctgatcatcctgcctctggcctttggcaagagacagggcagagaattcatctggaacgacctgctgtccctggaaaccggcagcctgaagctggccaacggaagagtgatcgagaagacactgtacaacagaagaacccggcaggatgagcctgccctgttcgtggccctgaccttcgagcggcgggaggtcctggactcctccaatatcaaaccaatgaacctgatcggcgtggcaagaggcgaaaacatccccgccgtgatcgccctgaccgaccccgagggctgcccactgagccggtttaaggatagcctgggaaacccaacccacatcctgagaatcggcgagagctataaggagaagcagcggaccatccaggccaagaaggaggtggagcagcggagagccggcggctacagccggaagtacgccagcaaagccaagaatctggcagacgatatggtgagaaacaccgctagagatctgctgtactacgccgtgacccaggatgccatgctgatcttcgccaacctgagccggggcttcggccggcagggcaagcggaccttcatggccgagagacagtacacacggatggaggactggctgaccgccaagctggcctacgagggcctgagcaagacctacctgtccaagacactggcccagtacacctccaagacatgcagcaactgtgggtttaccatcaccagcgccgactacgacagggtgctggagaagctgaagaagacagcaacaggctggatgaccacaattaacggcaaggagctgaaggtggagggccagattacctactacaacagatacaagagacagaacgtagtcaaggacctgtccgtcgagctggatagactgagcgaagaatctgtgaacaacgacatctcctcctggacaaagggcagaagcggagaagctctgagcctcctgaagaaaagattctcccatagacccgtgcaggagaagttcgtgtgcctgaactgcggcttcgagacacacgcagccgagcaagccgccctgaacatcgccagatcctggctgttcctgcggagccaggagtacaagaaataccagacaaacaagacaaccggcaacaccgataagagagccttcgtcgagacctggcagtccttttaccggaagaagcttaaggaggtgtggaaacctgccgtgcggtctggcggatctggcggaggctccagccaggagcccgtgaccttcgaggacgtggccgtgtacttcacccagaaccagtgggccaacctggacttcacccagagggccctgtacagggaggtgatgctggagaactacgccaacgtggccagcctggccttccccttccccaagcccgacctggtgagccagctggagaggggcgaggccccctggggccccgacccctgggaggccgaggtgctgaggggcgtgtgccccggcggcggcggcccaagcagcggcgcccctcctcccagcggcggcagcccagccggctccccaacctctaccgaggagggcacctctgagtccgccacccccgagagcggccctggcacctccaccgagcccagcgagggcagcgcacccggcagccctgccggcagccccacctccacagaggagggaaccagcaccgagcccagcgaaggcagcgccccaggcaccagcaccgagcctagtgagcaggagattaaacggatcaacaagatcagaagaagacttgtgaaagacagcaacaccaagaaggccggcaagacaggccccatgaaaaccctgctggttagagtgatgacacccgatctgagagagcggctggaaaacctgagaaagaagcctgaaaatatcccccagcccatcagcaatacatctagagccaacctgaataagctgctgaccgattacaccgaaatgaagaaggcgatcctgcatgtgtactgggaagagttccagaaggaccctgtgggcctgatgagccgggtggcccagcctgccagcaagaagatcgatcagaacaagctgaaacctgagatggacgagaagggcaacctgaccaccgccggctttgcctgctctcagtgtggccagcccctgttcgtgtacaagctggagcaggtgtctgagaagggcaaggcttacaccaactacttcggacggtgcaatgtggccgagcacgaaaagctgatcctgctggcccagctgaagcccgagaaggatagcgacgaagccgtgacatatagcctgggaaagtttgggcagagggccctggatttctacagcattcatgtgaccaaggagtccacccaccccgtgaagcccctggcccagatcgccggaaacagatacgcctccggacctgtgggaaaggccctgagcgacgcatgtatgggcacaatcgcctccttcctgtctaagtaccaggacatcatcatcgaacaccagaaggtggtgaagggcaaccagaagagactggagagcctgcgggagctggccggcaaggaaaacctggaataccctagcgtgaccctgccacctcagcctcacaccaaggagggcgttgatgcctacaacgaagtgatcgcccgggtgcgaatgtgggtgaacctgaacctgtggcagaagctgaagctaagcagagatgatgccaagcctctgctgagactgaagggattcccttcctttcctctggtcgagagacaggccaacgaagtggactggtgggacatggtgtgtaacgtgaagaagctgatcaacgagaaaaaggaggatggcaaggtgttttggcagaatctggctggctacaagagacaggaagccctgagaccatacctgagcagcgaggaagatcggaagaagggaaagaaattcgctcggtaccagctgggcgacctgctgctgcacctggaaaagaagcacggcgaggactggggaaaggtgtacgacgaggcctgggagcggattgacaagaaagtggaaggcctgagcaagcacatcaagctggaagaggaacggagaagcgaggacgcccagagcaaggccgccctgaccgactggctgcgggctaaggccagcttcgtgatcgagggcctgaaggaggccgacaaggacgagttctgcagatgcgagctgaagctgcagaagtggtacggggacctgcggggaaagcccttcgccatcgaagccgagaacagcatcctggacatcagcggcttcagcaagcagtacaactgtgccttcatctggcagaaggacggcgtgaagaagctgaacctgtacctgatcatcaactacttcaagggcggcaagctgcggttcaagaagatcaaacctgaagccttcgaagccaacagattctacaccgtgatcaacaaaaagagcggcgagatcgtgcccatggaggtgaacttcaacttcgacgaccccaacctgatcatcctgcctctggcctttggcaagagacagggcagagaattcatctggaacgacctgctgtccctggaaaccggcagcctgaagctggccaacggaagagtgatcgagaagacactgtacaacagaagaacccggcaggatgagcctgccctgttcgtggccctgaccttcgagcggcgggaggtcctggactcctccaatatcaaaccaatgaacctgatcggcgtggcaagaggcgaaaacatccccgccgtgatcgccctgaccgaccccgagggctgcccactgagccggtttaaggatagcctgggaaacccaacccacatcctgagaatcggcgagagctataaggagaagcagcggaccatccaggccaagaaggaggtggagcagcggagagccggcggctacagccggaagtacgccagcaaagccaagaatctggcagacgatatggtgagaaacaccgctagagatctgctgtactacgccgtgacccaggatgccatgctgatcttcgccaacctgagccggggcttcggccggcagggcaagcggaccttcatggccgagagacagtacacacggatggaggactggctgaccgccaagctggcctacgagggcctgagcaagacctacctgtccaagacactggcccagtacacctccaagacatgcagcaactgtgggtttaccatcaccagcgccgactacgacagggtgctggagaagctgaagaagacagcaacaggctggatgaccacaattaacggcaaggagctgaaggtggagggccagattacctactacaacagatacaagagacagaacgtagtcaaggacctgtccgtcgagctggatagactgagcgaagaatctgtgaacaacgacatctcctcctggacaaagggcagaagcggagaagctctgagcctcctgaagaaaagattctcccatagacccgtgcaggagaagttcgtgtgcctgaactgcggcttcgagacacacgcagccgagcaagccgccctgaacatcgccagatcctggctgttcctgcggagccaggagtacaagaaataccagacaaacaagacaaccggcaacaccgataagagagccttcgtcgagacctggcagtccttttaccggaagaagcttaaggaggtgtggaaacctgccgtgcggtctggcggatctggcggaggctcctagccaggagcccgtgaccttcgaggacgtggccgtgtacttcacccagaaccagtgggccaacctggacttcacccagagggccctgtacagggaggtgatgctggagaactacgccaacgtggccagcctggccttccccttccccaagcccgacctggtgagccagctggagaggggcgaggccccctggggccccgacccctgggaggccgaggtgctgaggggcgtgtgccccggcggcggatctggctccggcagcggccccaagaaaaagagaaaagtctaagctgccttctgcggggcttgccttctggccatgcccttcttctctcccttgcacctgtacctcttggtctttgaataaagcctgagtaggaaggctagcaaaaaaaaaaaaaaaaaaaaaaaaaaaaaaaaaaaaaaaaaaaaaaaaaaaaaaaaaaaaaaaaaaaaaaaaaaaaaaaa

SEQ ID NO: 16475 - RNA, 9485 nt, synthetic construct
  source 1..9485: mol_type = other RNA
aggaaataagagagaaaagaagagtaagaagaaatataagagccaccatggcccctaagaagaagcgtaaagtgagccggatggaacgcctcgtctacgaggtgcggcagaagtgcagaaacatcgaggacatctgcatctcctgcggatctctgaacgtgaccctggagcacccactgttcatcggcggcatgtgccagaactgtaaaaactgttttctggagtgtgcctatcaatacgacgatgacggctaccagagctactgcaccatctgttgcggcggaagagaggtgctgatgtgtggaaataacaactgctgccggtgcttctgcgtggaatgcgtggacctgctggtgggccccggcgccgcccaggccgctattaaggaagatccttggaactgctacatgtgcggccacaagggcacatacggcctgctgagacggagagaggactggcctagcagactgcagatgttcttcgccaataaccacgaccaggagttcgacccccctaaggtgtaccctcccgtccccgccgagaagagaaagcccatccgggtcctgagcctgttcgatggcatcgccaccggtctgctggtgctgaaggacctgggcatccaggtggataggtacattgcctccgaggtgtgcgaggactccatcaccgtgggaatggtgcgtcatcagggcaagatcatgtacgtgggcgacgtgcggagcgtgacacagaagcatatccaggagtggggccctttcgacctggtgatcggcggcagcccttgcaatgacctgagcatcgtgaacccagcccggaagggcctgtacgagggaaccggcagactgttcttcgagttttacagactgctgcacgacgcccggcctaaggaaggcgacgaccggcccttcttttggctgttcgagaatgtggtggccatgggagtcagcgacaagcgggatattagccggttcctggagagcaaccccgtgatgatcgatgccaaggaagtgagcgccgcccaccgggccagatacttctggggcaatctgcctggcatgaacagacccctggccagcaccgtgaacgacaagctggagctgcaggagtgcctggagcacggccggatcgccaagttcagcaaggtgagaaccatcaccacccgaagcaacagcatcaaacaaggcaaggaccagcactttcctgtgttcatgaacgagaaggaggacatcctgtggtgtaccgagatggagagagtgttcgggttcccagtccactacacagatgtcagcaacatgtctagactggccagacagagactgctgggaagaagctggtccgtccctgtgatcagacacctgttcgcccctctgaaggagtacttcgcctgcgtgagcagcggcaacagcaacgccaacagccggggccccagcttctctagcggcctggtgccactgtccctgagagggagccacatgggccccatggagatctacaaaaccgtgagcgcctggaagcggcagcctgtgcgcgtgctgagcctgtttcggaatatcgataaagtcctgaaaagcctgggattcctggagagcggctctggctccggcggtggcaccctgaagtacgtggaggatgtgacaaacgtggtcagacgggatgtggagaagtggggccccttcgatctggtgtacggcagcacccaacccctgggcagctcttgtgaccggtgccctggctggtacatgtttcagttccaccggatcctgcagtacgccctgccgagacaggagtcccagcggccattcttttggattttcatggacaacttgctgctgaccgaggatgaccaggaaactaccactcggttcctgcagaccgaagccgtgaccctgcaggacgtgagaggccgggactaccagaacgccatgcgggtgtggtccaacatccctggactgaaaagcaagcacgcacctctgacccctaaagaagaggagtacctgcaggcccaggtgcggagcagaagcaagctggacgcccctaaggtggatctgctggtgaagaattgcctcctgcccctgagagagtacttcaagtatttcagccagaatagtctgcccctgggaggcagcggcggcggcgccctggtgacatttgaggacgtcgccgtgcggttcacccaggaggaatgggctctgctggatccttctcagaaaatcctgtaccgggacgtgatgagagagacataccggaatctgacctccgtgggcatcaactgggaatgttgggaccttgaagcctgcttcagaagcctgggaagaaacctgagagtgcaggtggtgaagagaaagtgcgagctgaccaacagcggcccctgcgccgagggcggcccaagcagcggcgcccctcctcccagcggcggcagcccagccggctccccaacctctaccgaggagggcacctctgagtccgccacccccgagagcggccctggcacctccaccgagcccagcgagggcagcgcacccggcagccctgccggcagccccacctccacagaggagggaaccagcaccgagcccagcgaaggcagcgccccaggcaccagcaccgagcctagtgagcaggagattaaacggatcaacaagatcagaagaagacttgtgaaagacagcaacaccaagaaggccggcaagacaggccccatgaaaaccctgctggttagagtgatgacacccgatctgagagagcggctggaaaacctgagaaagaagcctgaaaatatcccccagcccatcagcaatacatctagagccaacctgaataagctgctgaccgattacaccgaaatgaagaaggcgatcctgcatgtgtactgggaagagttccagaaggaccctgtgggcctgatgagccgggtggcccagcctgccagcaagaagatcgatcagaacaagctgaaacctgagatggacgagaagggcaacctgaccaccgccggctttgcctgctctcagtgtggccagcccctgttcgtgtacaagctggagcaggtgtctgagaagggcaaggcttacaccaactacttcggacggtgcaatgtggccgagcacgaaaagctgatcctgctggcccagctgaagcccgagaaggatagcgacgaagccgtgacatatagcctgggaaagtttgggcagagggccctggatttctacagcattcatgtgaccaaggagtccacccaccccgtgaagcccctggcccagatcgccggaaacagatacgcctccggacctgtgggaaaggccctgagcgacgcatgtatgggcacaatcgcctccttcctgtctaagtaccaggacatcatcatcgaacaccagaaggtggtgaagggcaaccagaagagactggagagcctgcgggagctggccggcaaggaaaacctggaataccctagcgtgaccctgccacctcagcctcacaccaaggagggcgttgatgcctacaacgaagtgatcgcccgggtgcgaatgtgggtgaacctgaacctgtggcagaagctgaagctaagcagagatgatgccaagcctctgctgagactgaagggattcccttcctttcctctggtcgagagacaggccaacgaagtggactggtgggacatggtgtgtaacgtgaagaagctgatcaacgagaaaaaggaggatggcaaggtgttttggcagaatctggctggctacaagagacaggaagccctgagaccatacctgagcagcgaggaagatcggaagaagggaaagaaattcgctcggtaccagctgggcgacctgctgctgcacctggaaaagaagcacggcgaggactggggaaaggtgtacgacgaggcctgggagcggattgacaagaaagtggaaggcctgagcaagcacatcaagctggaagaggaacggagaagcgaggacgcccagagcaaggccgccctgaccgactggctgcgggctaaggccagcttcgtgatcgagggcctgaaggaggccgacaaggacgagttctgcagatgcgagctgaagctgcagaagtggtacggggacctgcggggaaagcccttcgccatcgaagccgagaacagcatcctggacatcagcggcttcagcaagcagtacaactgtgccttcatctggcagaaggacggcgtgaagaagctgaacctgtacctgatcatcaactacttcaagggcggcaagctgcggttcaagaagatcaaacctgaagccttcgaagccaacagattctacaccgtgatcaacaaaaagagcggcgagatcgtgcccatggaggtgaacttcaacttcgacgaccccaacctgatcatcctgcctctggcctttggcaagagacagggcagagaattcatctggaacgacctgctgtccctggaaaccggcagcctgaagctggccaacggaagagtgatcgagaagacactgtacaacagaagaacccggcaggatgagcctgccctgttcgtggccctgaccttcgagcggcgggaggtcctggactcctccaatatcaaaccaatgaacctgatcggcgtggcaagaggcgaaaacatccccgccgtgatcgccctgaccgaccccgagggctgcccactgagccggtttaaggatagcctgggaaacccaacccacatcctgagaatcggcgagagctataaggagaagcagcggaccatccaggccaagaaggaggtggagcagcggagagccggcggctacagccggaagtacgccagcaaagccaagaatctggcagacgatatggtgagaaacaccgctagagatctgctgtactacgccgtgacccaggatgccatgctgatcttcgccaacctgagccggggcttcggccggcagggcaagcggaccttcatggccgagagacagtacacacggatggaggactggctgaccgccaagctggcctacgagggcctgagcaagacctacctgtccaagacactggcccagtacacctccaagacatgcagcaactgtgggtttaccatcaccagcgccgactacgacagggtgctggagaagctgaagaagacagcaacaggctggatgaccacaattaacggcaaggagctgaaggtggagggccagattacctactacaacagatacaagagacagaacgtagtcaaggacctgtccgtcgagctggatagactgagcgaagaatctgtgaacaacgacatctcctcctggacaaagggcagaagcggagaagctctgagcctcctgaagaaaagattctcccatagacccgtgcaggagaagttcgtgtgcctgaactgcggcttcgagacacacgcagccgagcaagccgccctgaacatcgccagatcctggctgttcctgcggagccaggagtacaagaaataccagacaaacaagacaaccggcaacaccgataagagagccttcgtcgagacctggcagtccttttaccggaagaagcttaaggaggtgtggaaacctgccgtgcggtctggcggatctggcggaggctccatggccgccgccgccgccctgagggcccacgcccagagcagcgtgaccttcgaggacgtggccgtgaacttcagcatggaggagtggagcctgctgaacgaggcccagaggtgcctgtacagggacgtgatgctggagaccctgaccctgatcagcagcctgggctgctggcacggcggcgaggacgaggccgcccccagcaagcagagcacctgcatctacatctacaaggagcagggcggcggcggcccaagcagcggcgcccctcctcccagcggcggcagcccagccggctccccaacctctaccgaggagggcacctctgagtccgccacccccgagagcggccctggcacctccaccgagcccagcgagggcagcgcacccggcagccctgccggcagccccacctccacagaggagggaaccagcaccgagcccagcgaaggcagcgccccaggcaccagcaccgagcctagtgagcaggagattaaacggatcaacaagatcagaagaagacttgtgaaagacagcaacaccaagaaggccggcaagacaggccccatgaaaaccctgctggttagagtgatgacacccgatctgagagagcggctggaaaacctgagaaagaagcctgaaaatatcccccagcccatcagcaatacatctagagccaacctgaataagctgctgaccgattacaccgaaatgaagaaggcgatcctgcatgtgtactgggaagagttccagaaggaccctgtgggcctgatgagccgggtggcccagcctgccagcaagaagatcgatcagaacaagctgaaacctgagatggacgagaagggcaacctgaccaccgccggctttgcctgctctcagtgtggccagcccctgttcgtgtacaagctggagcaggtgtctgagaagggcaaggcttacaccaactacttcggacggtgcaatgtggccgagcacgaaaagctgatcctgctggcccagctgaagcccgagaaggatagcgacgaagccgtgacatatagcctgggaaagtttgggcagagggccctggatttctacagcattcatgtgaccaaggagtccacccaccccgtgaagcccctggcccagatcgccggaaacagatacgcctccggacctgtgggaaaggccctgagcgacgcatgtatgggcacaatcgcctccttcctgtctaagtaccaggacatcatcatcgaacaccagaaggtggtgaagggcaaccagaagagactggagagcctgcgggagctggccggcaaggaaaacctggaataccctagcgtgaccctgccacctcagcctcacaccaaggagggcgttgatgcctacaacgaagtgatcgcccgggtgcgaatgtgggtgaacctgaacctgtggcagaagctgaagctaagcagagatgatgccaagcctctgctgagactgaagggattcccttcctttcctctggtcgagagacaggccaacgaagtggactggtgggacatggtgtgtaacgtgaagaagctgatcaacgagaaaaaggaggatggcaaggtgttttggcagaatctggctggctacaagagacaggaagccctgagaccatacctgagcagcgaggaagatcggaagaagggaaagaaattcgctcggtaccagctgggcgacctgctgctgcacctggaaaagaagcacggcgaggactggggaaaggtgtacgacgaggcctgggagcggattgacaagaaagtggaaggcctgagcaagcacatcaagctggaagaggaacggagaagcgaggacgcccagagcaaggccgccctgaccgactggctgcgggctaaggccagcttcgtgatcgagggcctgaaggaggccgacaaggacgagttctgcagatgcgagctgaagctgcagaagtggtacggggacctgcggggaaagcccttcgccatcgaagccgagaacagcatcctggacatcagcggcttcagcaagcagtacaactgtgccttcatctggcagaaggacggcgtgaagaagctgaacctgtacctgatcatcaactacttcaagggcggcaagctgcggttcaagaagatcaaacctgaagccttcgaagccaacagattctacaccgtgatcaacaaaaagagcggcgagatcgtgcccatggaggtgaacttcaacttcgacgaccccaacctgatcatcctgcctctggcctttggcaagagacagggcagagaattcatctggaacgacctgctgtccctggaaaccggcagcctgaagctggccaacggaagagtgatcgagaagacactgtacaacagaagaacccggcaggatgagcctgccctgttcgtggccctgaccttcgagcggcgggaggtcctggactcctccaatatcaaaccaatgaacctgatcggcgtggcaagaggcgaaaacatccccgccgtgatcgccctgaccgaccccgagggctgcccactgagccggtttaaggatagcctgggaaacccaacccacatcctgagaatcggcgagagctataaggagaagcagcggaccatccaggccaagaaggaggtggagcagcggagagccggcggctacagccggaagtacgccagcaaagccaagaatctggcagacgatatggtgagaaacaccgctagagatctgctgtactacgccgtgacccaggatgccatgctgatcttcgccaacctgagccggggcttcggccggcagggcaagcggaccttcatggccgagagacagtacacacggatggaggactggctgaccgccaagctggcctacgagggcctgagcaagacctacctgtccaagacactggcccagtacacctccaagacatgcagcaactgtgggtttaccatcaccagcgccgactacgacagggtgctggagaagctgaagaagacagcaacaggctggatgaccacaattaacggcaaggagctgaaggtggagggccagattacctactacaacagatacaagagacagaacgtagtcaaggacctgtccgtcgagctggatagactgagcgaagaatctgtgaacaacgacatctcctcctggacaaagggcagaagcggagaagctctgagcctcctgaagaaaagattctcccatagacccgtgcaggagaagttcgtgtgcctgaactgcggcttcgagacacacgcagccgagcaagccgccctgaacatcgccagatcctggctgttcctgcggagccaggagtacaagaaataccagacaaacaagacaaccggcaacaccgataagagagccttcgtcgagacctggcagtccttttaccggaagaagcttaaggaggtgtggaaacctgccgtgcggtctggcggatctggcggaggctcctatggccgccgccgccgccctgagggcccacgcccagagcagcgtgaccttcgaggacgtggccgtgaacttcagcatggaggagtggagcctgctgaacgaggcccagaggtgcctgtacagggacgtgatgctggagaccctgaccctgatcagcagcctgggctgctggcacggcggcgaggacgaggccgcccccagcaagcagagcacctgcatctacatctacaaggagcagggcggcggatctggctccggcagcggccccaagaaaaagagaaaagtctaagctgccttctgcggggcttgccttctggccatgcccttcttctctcccttgcacctgtacctcttggtctttgaataaagcctgagtaggaaggctagcaaaaaaaaaaaaaaaaaaaaaaaaaaaaaaaaaaaaaaaaaaaaaaaaaaaaaaaaaaaaaaaaaaaaaaaaaaaaaaaa

SEQ ID NO: 16476 - RNA, 9485 nt, synthetic construct
  source 1..9485: mol_type = other RNA
aggaaataagagagaaaagaagagtaagaagaaatataagagccaccatggcccctaagaagaagcgtaaagtgagccggatggaacgcctcgtctacgaggtgcggcagaagtgcagaaacatcgaggacatctgcatctcctgcggatctctgaacgtgaccctggagcacccactgttcatcggcggcatgtgccagaactgtaaaaactgttttctggagtgtgcctatcaatacgacgatgacggctaccagagctactgcaccatctgttgcggcggaagagaggtgctgatgtgtggaaataacaactgctgccggtgcttctgcgtggaatgcgtggacctgctggtgggccccggcgccgcccaggccgctattaaggaagatccttggaactgctacatgtgcggccacaagggcacatacggcctgctgagacggagagaggactggcctagcagactgcagatgttcttcgccaataaccacgaccaggagttcgacccccctaaggtgtaccctcccgtccccgccgagaagagaaagcccatccgggtcctgagcctgttcgatggcatcgccaccggtctgctggtgctgaaggacctgggcatccaggtggataggtacattgcctccgaggtgtgcgaggactccatcaccgtgggaatggtgcgtcatcagggcaagatcatgtacgtgggcgacgtgcggagcgtgacacagaagcatatccaggagtggggccctttcgacctggtgatcggcggcagcccttgcaatgacctgagcatcgtgaacccagcccggaagggcctgtacgagggaaccggcagactgttcttcgagttttacagactgctgcacgacgcccggcctaaggaaggcgacgaccggcccttcttttggctgttcgagaatgtggtggccatgggagtcagcgacaagcgggatattagccggttcctggagagcaaccccgtgatgatcgatgccaaggaagtgagcgccgcccaccgggccagatacttctggggcaatctgcctggcatgaacagacccctggccagcaccgtgaacgacaagctggagctgcaggagtgcctggagcacggccggatcgccaagttcagcaaggtgagaaccatcaccacccgaagcaacagcatcaaacaaggcaaggaccagcactttcctgtgttcatgaacgagaaggaggacatcctgtggtgtaccgagatggagagagtgttcgggttcccagtccactacacagatgtcagcaacatgtctagactggccagacagagactgctgggaagaagctggtccgtccctgtgatcagacacctgttcgcccctctgaaggagtacttcgcctgcgtgagcagcggcaacagcaacgccaacagccggggccccagcttctctagcggcctggtgccactgtccctgagagggagccacatgggccccatggagatctacaaaaccgtgagcgcctggaagcggcagcctgtgcgcgtgctgagcctgtttcggaatatcgataaagtcctgaaaagcctgggattcctggagagcggctctggctccggcggtggcaccctgaagtacgtggaggatgtgacaaacgtggtcagacgggatgtggagaagtggggccccttcgatctggtgtacggcagcacccaacccctgggcagctcttgtgaccggtgccctggctggtacatgtttcagttccaccggatcctgcagtacgccctgccgagacaggagtcccagcggccattcttttggattttcatggacaacttgctgctgaccgaggatgaccaggaaactaccactcggttcctgcagaccgaagccgtgaccctgcaggacgtgagaggccgggactaccagaacgccatgcgggtgtggtccaacatccctggactgaaaagcaagcacgcacctctgacccctaaagaagaggagtacctgcaggcccaggtgcggagcagaagcaagctggacgcccctaaggtggatctgctggtgaagaattgcctcctgcccctgagagagtacttcaagtatttcagccagaatagtctgcccctgggaggcagcggcggcggcgccctggtgacatttgaggacgtcgccgtgcggttcacccaggaggaatgggctctgctggatccttctcagaaaatcctgtaccgggacgtgatgagagagacataccggaatctgacctccgtgggcatcaactgggaatgttgggaccttgaagcctgcttcagaagcctgggaagaaacctgagagtgcaggtggtgaagagaaagtgcgagctgaccaacagcggcccctgcgccgagggcggcccaagcagcggcgcccctcctcccagcggcggcagcccagccggctccccaacctctaccgaggagggcacctctgagtccgccacccccgagagcggccctggcacctccaccgagcccagcgagggcagcgcacccggcagccctgccggcagccccacctccacagaggagggaaccagcaccgagcccagcgaaggcagcgccccaggcaccagcaccgagcctagtgagcaggagattaaacggatcaacaagatcagaagaagacttgtgaaagacagcaacaccaagaaggccggcaagacaggccccatgaaaaccctgctggttagagtgatgacacccgatctgagagagcggctggaaaacctgagaaagaagcctgaaaatatcccccagcccatcagcaatacatctagagccaacctgaataagctgctgaccgattacaccgaaatgaagaaggcgatcctgcatgtgtactgggaagagttccagaaggaccctgtgggcctgatgagccgggtggcccagcctgccagcaagaagatcgatcagaacaagctgaaacctgagatggacgagaagggcaacctgaccaccgccggctttgcctgctctcagtgtggccagcccctgttcgtgtacaagctggagcaggtgtctgagaagggcaaggcttacaccaactacttcggacggtgcaatgtggccgagcacgaaaagctgatcctgctggcccagctgaagcccgagaaggatagcgacgaagccgtgacatatagcctgggaaagtttgggcagagggccctggatttctacagcattcatgtgaccaaggagtccacccaccccgtgaagcccctggcccagatcgccggaaacagatacgcctccggacctgtgggaaaggccctgagcgacgcatgtatgggcacaatcgcctccttcctgtctaagtaccaggacatcatcatcgaacaccagaaggtggtgaagggcaaccagaagagactggagagcctgcgggagctggccggcaaggaaaacctggaataccctagcgtgaccctgccacctcagcctcacaccaaggagggcgttgatgcctacaacgaagtgatcgcccgggtgcgaatgtgggtgaacctgaacctgtggcagaagctgaagctaagcagagatgatgccaagcctctgctgagactgaagggattcccttcctttcctctggtcgagagacaggccaacgaagtggactggtgggacatggtgtgtaacgtgaagaagctgatcaacgagaaaaaggaggatggcaaggtgttttggcagaatctggctggctacaagagacaggaagccctgagaccatacctgagcagcgaggaagatcggaagaagggaaagaaattcgctcggtaccagctgggcgacctgctgctgcacctggaaaagaagcacggcgaggactggggaaaggtgtacgacgaggcctgggagcggattgacaagaaagtggaaggcctgagcaagcacatcaagctggaagaggaacggagaagcgaggacgcccagagcaaggccgccctgaccgactggctgcgggctaaggccagcttcgtgatcgagggcctgaaggaggccgacaaggacgagttctgcagatgcgagctgaagctgcagaagtggtacggggacctgcggggaaagcccttcgccatcgaagccgagaacagcatcctggacatcagcggcttcagcaagcagtacaactgtgccttcatctggcagaaggacggcgtgaagaagctgaacctgtacctgatcatcaactacttcaagggcggcaagctgcggttcaagaagatcaaacctgaagccttcgaagccaacagattctacaccgtgatcaacaaaaagagcggcgagatcgtgcccatggaggtgaacttcaacttcgacgaccccaacctgatcatcctgcctctggcctttggcaagagacagggcagagaattcatctggaacgacctgctgtccctggaaaccggcagcctgaagctggccaacggaagagtgatcgagaagacactgtacaacagaagaacccggcaggatgagcctgccctgttcgtggccctgaccttcgagcggcgggaggtcctggactcctccaatatcaaaccaatgaacctgatcggcgtggcaagaggcgaaaacatccccgccgtgatcgccctgaccgaccccgagggctgcccactgagccggtttaaggatagcctgggaaacccaacccacatcctgagaatcggcgagagctataaggagaagcagcggaccatccaggccaagaaggaggtggagcagcggagagccggcggctacagccggaagtacgccagcaaagccaagaatctggcagacgatatggtgagaaacaccgctagagatctgctgtactacgccgtgacccaggatgccatgctgatcttcgccaacctgagccggggcttcggccggcagggcaagcggaccttcatggccgagagacagtacacacggatggaggactggctgaccgccaagctggcctacgagggcctgagcaagacctacctgtccaagacactggcccagtacacctccaagacatgcagcaactgtgggtttaccatcaccagcgccgactacgacagggtgctggagaagctgaagaagacagcaacaggctggatgaccacaattaacggcaaggagctgaaggtggagggccagattacctactacaacagatacaagagacagaacgtagtcaaggacctgtccgtcgagctggatagactgagcgaagaatctgtgaacaacgacatctcctcctggacaaagggcagaagcggagaagctctgagcctcctgaagaaaagattctcccatagacccgtgcaggagaagttcgtgtgcctgaactgcggcttcgagacacacgcagccgagcaagccgccctgaacatcgccagatcctggctgttcctgcggagccaggagtacaagaaataccagacaaacaagacaaccggcaacaccgataagagagccttcgtcgagacctggcagtccttttaccggaagaagcttaaggaggtgtggaaacctgccgtgcggtctggcggatctggcggaggctccgccgacatcaccctgatgagccaggcccaggacagcaggagcatcctgttccaggagagcgtgaccttcgaggacgtggccgtgaacttcaccaacagggagtggcagtgcctgacctacgcccagaggcacctgtacaaggacgtgatgctggagaactacggcaacatggtgagcctgggcttccccttccccaagccccccctgatcagccacctggagagggaggtggacccctgcgtgggcggcccaagcagcggcgcccctcctcccagcggcggcagcccagccggctccccaacctctaccgaggagggcacctctgagtccgccacccccgagagcggccctggcacctccaccgagcccagcgagggcagcgcacccggcagccctgccggcagccccacctccacagaggagggaaccagcaccgagcccagcgaaggcagcgccccaggcaccagcaccgagcctagtgagcaggagattaaacggatcaacaagatcagaagaagacttgtgaaagacagcaacaccaagaaggccggcaagacaggccccatgaaaaccctgctggttagagtgatgacacccgatctgagagagcggctggaaaacctgagaaagaagcctgaaaatatcccccagcccatcagcaatacatctagagccaacctgaataagctgctgaccgattacaccgaaatgaagaaggcgatcctgcatgtgtactgggaagagttccagaaggaccctgtgggcctgatgagccgggtggcccagcctgccagcaagaagatcgatcagaacaagctgaaacctgagatggacgagaagggcaacctgaccaccgccggctttgcctgctctcagtgtggccagcccctgttcgtgtacaagctggagcaggtgtctgagaagggcaaggcttacaccaactacttcggacggtgcaatgtggccgagcacgaaaagctgatcctgctggcccagctgaagcccgagaaggatagcgacgaagccgtgacatatagcctgggaaagtttgggcagagggccctggatttctacagcattcatgtgaccaaggagtccacccaccccgtgaagcccctggcccagatcgccggaaacagatacgcctccggacctgtgggaaaggccctgagcgacgcatgtatgggcacaatcgcctccttcctgtctaagtaccaggacatcatcatcgaacaccagaaggtggtgaagggcaaccagaagagactggagagcctgcgggagctggccggcaaggaaaacctggaataccctagcgtgaccctgccacctcagcctcacaccaaggagggcgttgatgcctacaacgaagtgatcgcccgggtgcgaatgtgggtgaacctgaacctgtggcagaagctgaagctaagcagagatgatgccaagcctctgctgagactgaagggattcccttcctttcctctggtcgagagacaggccaacgaagtggactggtgggacatggtgtgtaacgtgaagaagctgatcaacgagaaaaaggaggatggcaaggtgttttggcagaatctggctggctacaagagacaggaagccctgagaccatacctgagcagcgaggaagatcggaagaagggaaagaaattcgctcggtaccagctgggcgacctgctgctgcacctggaaaagaagcacggcgaggactggggaaaggtgtacgacgaggcctgggagcggattgacaagaaagtggaaggcctgagcaagcacatcaagctggaagaggaacggagaagcgaggacgcccagagcaaggccgccctgaccgactggctgcgggctaaggccagcttcgtgatcgagggcctgaaggaggccgacaaggacgagttctgcagatgcgagctgaagctgcagaagtggtacggggacctgcggggaaagcccttcgccatcgaagccgagaacagcatcctggacatcagcggcttcagcaagcagtacaactgtgccttcatctggcagaaggacggcgtgaagaagctgaacctgtacctgatcatcaactacttcaagggcggcaagctgcggttcaagaagatcaaacctgaagccttcgaagccaacagattctacaccgtgatcaacaaaaagagcggcgagatcgtgcccatggaggtgaacttcaacttcgacgaccccaacctgatcatcctgcctctggcctttggcaagagacagggcagagaattcatctggaacgacctgctgtccctggaaaccggcagcctgaagctggccaacggaagagtgatcgagaagacactgtacaacagaagaacccggcaggatgagcctgccctgttcgtggccctgaccttcgagcggcgggaggtcctggactcctccaatatcaaaccaatgaacctgatcggcgtggcaagaggcgaaaacatccccgccgtgatcgccctgaccgaccccgagggctgcccactgagccggtttaaggatagcctgggaaacccaacccacatcctgagaatcggcgagagctataaggagaagcagcggaccatccaggccaagaaggaggtggagcagcggagagccggcggctacagccggaagtacgccagcaaagccaagaatctggcagacgatatggtgagaaacaccgctagagatctgctgtactacgccgtgacccaggatgccatgctgatcttcgccaacctgagccggggcttcggccggcagggcaagcggaccttcatggccgagagacagtacacacggatggaggactggctgaccgccaagctggcctacgagggcctgagcaagacctacctgtccaagacactggcccagtacacctccaagacatgcagcaactgtgggtttaccatcaccagcgccgactacgacagggtgctggagaagctgaagaagacagcaacaggctggatgaccacaattaacggcaaggagctgaaggtggagggccagattacctactacaacagatacaagagacagaacgtagtcaaggacctgtccgtcgagctggatagactgagcgaagaatctgtgaacaacgacatctcctcctggacaaagggcagaagcggagaagctctgagcctcctgaagaaaagattctcccatagacccgtgcaggagaagttcgtgtgcctgaactgcggcttcgagacacacgcagccgagcaagccgccctgaacatcgccagatcctggctgttcctgcggagccaggagtacaagaaataccagacaaacaagacaaccggcaacaccgataagagagccttcgtcgagacctggcagtccttttaccggaagaagcttaaggaggtgtggaaacctgccgtgcggtctggcggatctggcggaggctcctgccgacatcaccctgatgagccaggcccaggacagcaggagcatcctgttccaggagagcgtgaccttcgaggacgtggccgtgaacttcaccaacagggagtggcagtgcctgacctacgcccagaggcacctgtacaaggacgtgatgctggagaactacggcaacatggtgagcctgggcttccccttccccaagccccccctgatcagccacctggagagggaggtggacccctgcgtgggatctggctccggcagcggccccaagaaaaagagaaaagtctaagctgccttctgcggggcttgccttctggccatgcccttcttctctcccttgcacctgtacctcttggtctttgaataaagcctgagtaggaaggctagcaaaaaaaaaaaaaaaaaaaaaaaaaaaaaaaaaaaaaaaaaaaaaaaaaaaaaaaaaaaaaaaaaaaaaaaaaaaaaaaa

SEQ ID NO: 16477 - RNA, 9485 nt, synthetic construct
  source 1..9485: mol_type = other RNA
aggaaataagagagaaaagaagagtaagaagaaatataagagccaccatggcccctaagaagaagcgtaaagtgagccggatggaacgcctcgtctacgaggtgcggcagaagtgcagaaacatcgaggacatctgcatctcctgcggatctctgaacgtgaccctggagcacccactgttcatcggcggcatgtgccagaactgtaaaaactgttttctggagtgtgcctatcaatacgacgatgacggctaccagagctactgcaccatctgttgcggcggaagagaggtgctgatgtgtggaaataacaactgctgccggtgcttctgcgtggaatgcgtggacctgctggtgggccccggcgccgcccaggccgctattaaggaagatccttggaactgctacatgtgcggccacaagggcacatacggcctgctgagacggagagaggactggcctagcagactgcagatgttcttcgccaataaccacgaccaggagttcgacccccctaaggtgtaccctcccgtccccgccgagaagagaaagcccatccgggtcctgagcctgttcgatggcatcgccaccggtctgctggtgctgaaggacctgggcatccaggtggataggtacattgcctccgaggtgtgcgaggactccatcaccgtgggaatggtgcgtcatcagggcaagatcatgtacgtgggcgacgtgcggagcgtgacacagaagcatatccaggagtggggccctttcgacctggtgatcggcggcagcccttgcaatgacctgagcatcgtgaacccagcccggaagggcctgtacgagggaaccggcagactgttcttcgagttttacagactgctgcacgacgcccggcctaaggaaggcgacgaccggcccttcttttggctgttcgagaatgtggtggccatgggagtcagcgacaagcgggatattagccggttcctggagagcaaccccgtgatgatcgatgccaaggaagtgagcgccgcccaccgggccagatacttctggggcaatctgcctggcatgaacagacccctggccagcaccgtgaacgacaagctggagctgcaggagtgcctggagcacggccggatcgccaagttcagcaaggtgagaaccatcaccacccgaagcaacagcatcaaacaaggcaaggaccagcactttcctgtgttcatgaacgagaaggaggacatcctgtggtgtaccgagatggagagagtgttcgggttcccagtccactacacagatgtcagcaacatgtctagactggccagacagagactgctgggaagaagctggtccgtccctgtgatcagacacctgttcgcccctctgaaggagtacttcgcctgcgtgagcagcggcaacagcaacgccaacagccggggccccagcttctctagcggcctggtgccactgtccctgagagggagccacatgggccccatggagatctacaaaaccgtgagcgcctggaagcggcagcctgtgcgcgtgctgagcctgtttcggaatatcgataaagtcctgaaaagcctgggattcctggagagcggctctggctccggcggtggcaccctgaagtacgtggaggatgtgacaaacgtggtcagacgggatgtggagaagtggggccccttcgatctggtgtacggcagcacccaacccctgggcagctcttgtgaccggtgccctggctggtacatgtttcagttccaccggatcctgcagtacgccctgccgagacaggagtcccagcggccattcttttggattttcatggacaacttgctgctgaccgaggatgaccaggaaactaccactcggttcctgcagaccgaagccgtgaccctgcaggacgtgagaggccgggactaccagaacgccatgcgggtgtggtccaacatccctggactgaaaagcaagcacgcacctctgacccctaaagaagaggagtacctgcaggcccaggtgcggagcagaagcaagctggacgcccctaaggtggatctgctggtgaagaattgcctcctgcccctgagagagtacttcaagtatttcagccagaatagtctgcccctgggaggcagcggcggcggcgccctggtgacatttgaggacgtcgccgtgcggttcacccaggaggaatgggctctgctggatccttctcagaaaatcctgtaccgggacgtgatgagagagacataccggaatctgacctccgtgggcatcaactgggaatgttgggaccttgaagcctgcttcagaagcctgggaagaaacctgagagtgcaggtggtgaagagaaagtgcgagctgaccaacagcggcccctgcgccgagggcggcccaagcagcggcgcccctcctcccagcggcggcagcccagccggctccccaacctctaccgaggagggcacctctgagtccgccacccccgagagcggccctggcacctccaccgagcccagcgagggcagcgcacccggcagccctgccggcagccccacctccacagaggagggaaccagcaccgagcccagcgaaggcagcgccccaggcaccagcaccgagcctagtgagcaggagattaaacggatcaacaagatcagaagaagacttgtgaaagacagcaacaccaagaaggccggcaagacaggccccatgaaaaccctgctggttagagtgatgacacccgatctgagagagcggctggaaaacctgagaaagaagcctgaaaatatcccccagcccatcagcaatacatctagagccaacctgaataagctgctgaccgattacaccgaaatgaagaaggcgatcctgcatgtgtactgggaagagttccagaaggaccctgtgggcctgatgagccgggtggcccagcctgccagcaagaagatcgatcagaacaagctgaaacctgagatggacgagaagggcaacctgaccaccgccggctttgcctgctctcagtgtggccagcccctgttcgtgtacaagctggagcaggtgtctgagaagggcaaggcttacaccaactacttcggacggtgcaatgtggccgagcacgaaaagctgatcctgctggcccagctgaagcccgagaaggatagcgacgaagccgtgacatatagcctgggaaagtttgggcagagggccctggatttctacagcattcatgtgaccaaggagtccacccaccccgtgaagcccctggcccagatcgccggaaacagatacgcctccggacctgtgggaaaggccctgagcgacgcatgtatgggcacaatcgcctccttcctgtctaagtaccaggacatcatcatcgaacaccagaaggtggtgaagggcaaccagaagagactggagagcctgcgggagctggccggcaaggaaaacctggaataccctagcgtgaccctgccacctcagcctcacaccaaggagggcgttgatgcctacaacgaagtgatcgcccgggtgcgaatgtgggtgaacctgaacctgtggcagaagctgaagctaagcagagatgatgccaagcctctgctgagactgaagggattcccttcctttcctctggtcgagagacaggccaacgaagtggactggtgggacatggtgtgtaacgtgaagaagctgatcaacgagaaaaaggaggatggcaaggtgttttggcagaatctggctggctacaagagacaggaagccctgagaccatacctgagcagcgaggaagatcggaagaagggaaagaaattcgctcggtaccagctgggcgacctgctgctgcacctggaaaagaagcacggcgaggactggggaaaggtgtacgacgaggcctgggagcggattgacaagaaagtggaaggcctgagcaagcacatcaagctggaagaggaacggagaagcgaggacgcccagagcaaggccgccctgaccgactggctgcgggctaaggccagcttcgtgatcgagggcctgaaggaggccgacaaggacgagttctgcagatgcgagctgaagctgcagaagtggtacggggacctgcggggaaagcccttcgccatcgaagccgagaacagcatcctggacatcagcggcttcagcaagcagtacaactgtgccttcatctggcagaaggacggcgtgaagaagctgaacctgtacctgatcatcaactacttcaagggcggcaagctgcggttcaagaagatcaaacctgaagccttcgaagccaacagattctacaccgtgatcaacaaaaagagcggcgagatcgtgcccatggaggtgaacttcaacttcgacgaccccaacctgatcatcctgcctctggcctttggcaagagacagggcagagaattcatctggaacgacctgctgtccctggaaaccggcagcctgaagctggccaacggaagagtgatcgagaagacactgtacaacagaagaacccggcaggatgagcctgccctgttcgtggccctgaccttcgagcggcgggaggtcctggactcctccaatatcaaaccaatgaacctgatcggcgtggcaagaggcgaaaacatccccgccgtgatcgccctgaccgaccccgagggctgcccactgagccggtttaaggatagcctgggaaacccaacccacatcctgagaatcggcgagagctataaggagaagcagcggaccatccaggccaagaaggaggtggagcagcggagagccggcggctacagccggaagtacgccagcaaagccaagaatctggcagacgatatggtgagaaacaccgctagagatctgctgtactacgccgtgacccaggatgccatgctgatcttcgccaacctgagccggggcttcggccggcagggcaagcggaccttcatggccgagagacagtacacacggatggaggactggctgaccgccaagctggcctacgagggcctgagcaagacctacctgtccaagacactggcccagtacacctccaagacatgcagcaactgtgggtttaccatcaccagcgccgactacgacagggtgctggagaagctgaagaagacagcaacaggctggatgaccacaattaacggcaaggagctgaaggtggagggccagattacctactacaacagatacaagagacagaacgtagtcaaggacctgtccgtcgagctggatagactgagcgaagaatctgtgaacaacgacatctcctcctggacaaagggcagaagcggagaagctctgagcctcctgaagaaaagattctcccatagacccgtgcaggagaagttcgtgtgcctgaactgcggcttcgagacacacgcagccgagcaagccgccctgaacatcgccagatcctggctgttcctgcggagccaggagtacaagaaataccagacaaacaagacaaccggcaacaccgataagagagccttcgtcgagacctggcagtccttttaccggaagaagcttaaggaggtgtggaaacctgccgtgcggtctggcggatctggcggaggctccgtgttcgacgccgtgaccttcaccgacgtggccgtggacttcagccaggacgagtgggagaggctgaccctggcccagaggaccctgtacaagaaggtgatgctggagaactacagcaacctggccagcctgggcctgtgcatcagcaagcccgacgtgatcagcagcctggagcaggacaaggagccctggaccatgaagggcgagctgaccaggggcccctgcgccgacctggagtacgtgggcggcccaagcagcggcgcccctcctcccagcggcggcagcccagccggctccccaacctctaccgaggagggcacctctgagtccgccacccccgagagcggccctggcacctccaccgagcccagcgagggcagcgcacccggcagccctgccggcagccccacctccacagaggagggaaccagcaccgagcccagcgaaggcagcgccccaggcaccagcaccgagcctagtgagcaggagattaaacggatcaacaagatcagaagaagacttgtgaaagacagcaacaccaagaaggccggcaagacaggccccatgaaaaccctgctggttagagtgatgacacccgatctgagagagcggctggaaaacctgagaaagaagcctgaaaatatcccccagcccatcagcaatacatctagagccaacctgaataagctgctgaccgattacaccgaaatgaagaaggcgatcctgcatgtgtactgggaagagttccagaaggaccctgtgggcctgatgagccgggtggcccagcctgccagcaagaagatcgatcagaacaagctgaaacctgagatggacgagaagggcaacctgaccaccgccggctttgcctgctctcagtgtggccagcccctgttcgtgtacaagctggagcaggtgtctgagaagggcaaggcttacaccaactacttcggacggtgcaatgtggccgagcacgaaaagctgatcctgctggcccagctgaagcccgagaaggatagcgacgaagccgtgacatatagcctgggaaagtttgggcagagggccctggatttctacagcattcatgtgaccaaggagtccacccaccccgtgaagcccctggcccagatcgccggaaacagatacgcctccggacctgtgggaaaggccctgagcgacgcatgtatgggcacaatcgcctccttcctgtctaagtaccaggacatcatcatcgaacaccagaaggtggtgaagggcaaccagaagagactggagagcctgcgggagctggccggcaaggaaaacctggaataccctagcgtgaccctgccacctcagcctcacaccaaggagggcgttgatgcctacaacgaagtgatcgcccgggtgcgaatgtgggtgaacctgaacctgtggcagaagctgaagctaagcagagatgatgccaagcctctgctgagactgaagggattcccttcctttcctctggtcgagagacaggccaacgaagtggactggtgggacatggtgtgtaacgtgaagaagctgatcaacgagaaaaaggaggatggcaaggtgttttggcagaatctggctggctacaagagacaggaagccctgagaccatacctgagcagcgaggaagatcggaagaagggaaagaaattcgctcggtaccagctgggcgacctgctgctgcacctggaaaagaagcacggcgaggactggggaaaggtgtacgacgaggcctgggagcggattgacaagaaagtggaaggcctgagcaagcacatcaagctggaagaggaacggagaagcgaggacgcccagagcaaggccgccctgaccgactggctgcgggctaaggccagcttcgtgatcgagggcctgaaggaggccgacaaggacgagttctgcagatgcgagctgaagctgcagaagtggtacggggacctgcggggaaagcccttcgccatcgaagccgagaacagcatcctggacatcagcggcttcagcaagcagtacaactgtgccttcatctggcagaaggacggcgtgaagaagctgaacctgtacctgatcatcaactacttcaagggcggcaagctgcggttcaagaagatcaaacctgaagccttcgaagccaacagattctacaccgtgatcaacaaaaagagcggcgagatcgtgcccatggaggtgaacttcaacttcgacgaccccaacctgatcatcctgcctctggcctttggcaagagacagggcagagaattcatctggaacgacctgctgtccctggaaaccggcagcctgaagctggccaacggaagagtgatcgagaagacactgtacaacagaagaacccggcaggatgagcctgccctgttcgtggccctgaccttcgagcggcgggaggtcctggactcctccaatatcaaaccaatgaacctgatcggcgtggcaagaggcgaaaacatccccgccgtgatcgccctgaccgaccccgagggctgcccactgagccggtttaaggatagcctgggaaacccaacccacatcctgagaatcggcgagagctataaggagaagcagcggaccatccaggccaagaaggaggtggagcagcggagagccggcggctacagccggaagtacgccagcaaagccaagaatctggcagacgatatggtgagaaacaccgctagagatctgctgtactacgccgtgacccaggatgccatgctgatcttcgccaacctgagccggggcttcggccggcagggcaagcggaccttcatggccgagagacagtacacacggatggaggactggctgaccgccaagctggcctacgagggcctgagcaagacctacctgtccaagacactggcccagtacacctccaagacatgcagcaactgtgggtttaccatcaccagcgccgactacgacagggtgctggagaagctgaagaagacagcaacaggctggatgaccacaattaacggcaaggagctgaaggtggagggccagattacctactacaacagatacaagagacagaacgtagtcaaggacctgtccgtcgagctggatagactgagcgaagaatctgtgaacaacgacatctcctcctggacaaagggcagaagcggagaagctctgagcctcctgaagaaaagattctcccatagacccgtgcaggagaagttcgtgtgcctgaactgcggcttcgagacacacgcagccgagcaagccgccctgaacatcgccagatcctggctgttcctgcggagccaggagtacaagaaataccagacaaacaagacaaccggcaacaccgataagagagccttcgtcgagacctggcagtccttttaccggaagaagcttaaggaggtgtggaaacctgccgtgcggtctggcggatctggcggaggctcctgtgttcgacgccgtgaccttcaccgacgtggccgtggacttcagccaggacgagtgggagaggctgaccctggcccagaggaccctgtacaagaaggtgatgctggagaactacagcaacctggccagcctgggcctgtgcatcagcaagcccgacgtgatcagcagcctggagcaggacaaggagccctggaccatgaagggcgagctgaccaggggcccctgcgccgacctggagtacgtgggatctggctccggcagcggccccaagaaaaagagaaaagtctaagctgccttctgcggggcttgccttctggccatgcccttcttctctcccttgcacctgtacctcttggtctttgaataaagcctgagtaggaaggctagcaaaaaaaaaaaaaaaaaaaaaaaaaaaaaaaaaaaaaaaaaaaaaaaaaaaaaaaaaaaaaaaaaaaaaaaaaaaaaaaa

SEQ ID NO: 16478 - RNA, 9485 nt, synthetic construct
  source 1..9485: mol_type = other RNA
aggaaataagagagaaaagaagagtaagaagaaatataagagccaccatggcccctaagaagaagcgtaaagtgagccggatggaacgcctcgtctacgaggtgcggcagaagtgcagaaacatcgaggacatctgcatctcctgcggatctctgaacgtgaccctggagcacccactgttcatcggcggcatgtgccagaactgtaaaaactgttttctggagtgtgcctatcaatacgacgatgacggctaccagagctactgcaccatctgttgcggcggaagagaggtgctgatgtgtggaaataacaactgctgccggtgcttctgcgtggaatgcgtggacctgctggtgggccccggcgccgcccaggccgctattaaggaagatccttggaactgctacatgtgcggccacaagggcacatacggcctgctgagacggagagaggactggcctagcagactgcagatgttcttcgccaataaccacgaccaggagttcgacccccctaaggtgtaccctcccgtccccgccgagaagagaaagcccatccgggtcctgagcctgttcgatggcatcgccaccggtctgctggtgctgaaggacctgggcatccaggtggataggtacattgcctccgaggtgtgcgaggactccatcaccgtgggaatggtgcgtcatcagggcaagatcatgtacgtgggcgacgtgcggagcgtgacacagaagcatatccaggagtggggccctttcgacctggtgatcggcggcagcccttgcaatgacctgagcatcgtgaacccagcccggaagggcctgtacgagggaaccggcagactgttcttcgagttttacagactgctgcacgacgcccggcctaaggaaggcgacgaccggcccttcttttggctgttcgagaatgtggtggccatgggagtcagcgacaagcgggatattagccggttcctggagagcaaccccgtgatgatcgatgccaaggaagtgagcgccgcccaccgggccagatacttctggggcaatctgcctggcatgaacagacccctggccagcaccgtgaacgacaagctggagctgcaggagtgcctggagcacggccggatcgccaagttcagcaaggtgagaaccatcaccacccgaagcaacagcatcaaacaaggcaaggaccagcactttcctgtgttcatgaacgagaaggaggacatcctgtggtgtaccgagatggagagagtgttcgggttcccagtccactacacagatgtcagcaacatgtctagactggccagacagagactgctgggaagaagctggtccgtccctgtgatcagacacctgttcgcccctctgaaggagtacttcgcctgcgtgagcagcggcaacagcaacgccaacagccggggccccagcttctctagcggcctggtgccactgtccctgagagggagccacatgggccccatggagatctacaaaaccgtgagcgcctggaagcggcagcctgtgcgcgtgctgagcctgtttcggaatatcgataaagtcctgaaaagcctgggattcctggagagcggctctggctccggcggtggcaccctgaagtacgtggaggatgtgacaaacgtggtcagacgggatgtggagaagtggggccccttcgatctggtgtacggcagcacccaacccctgggcagctcttgtgaccggtgccctggctggtacatgtttcagttccaccggatcctgcagtacgccctgccgagacaggagtcccagcggccattcttttggattttcatggacaacttgctgctgaccgaggatgaccaggaaactaccactcggttcctgcagaccgaagccgtgaccctgcaggacgtgagaggccgggactaccagaacgccatgcgggtgtggtccaacatccctggactgaaaagcaagcacgcacctctgacccctaaagaagaggagtacctgcaggcccaggtgcggagcagaagcaagctggacgcccctaaggtggatctgctggtgaagaattgcctcctgcccctgagagagtacttcaagtatttcagccagaatagtctgcccctgggaggcagcggcggcggcgccctggtgacatttgaggacgtcgccgtgcggttcacccaggaggaatgggctctgctggatccttctcagaaaatcctgtaccgggacgtgatgagagagacataccggaatctgacctccgtgggcatcaactgggaatgttgggaccttgaagcctgcttcagaagcctgggaagaaacctgagagtgcaggtggtgaagagaaagtgcgagctgaccaacagcggcccctgcgccgagggcggcccaagcagcggcgcccctcctcccagcggcggcagcccagccggctccccaacctctaccgaggagggcacctctgagtccgccacccccgagagcggccctggcacctccaccgagcccagcgagggcagcgcacccggcagccctgccggcagccccacctccacagaggagggaaccagcaccgagcccagcgaaggcagcgccccaggcaccagcaccgagcctagtgagcaggagattaaacggatcaacaagatcagaagaagacttgtgaaagacagcaacaccaagaaggccggcaagacaggccccatgaaaaccctgctggttagagtgatgacacccgatctgagagagcggctggaaaacctgagaaagaagcctgaaaatatcccccagcccatcagcaatacatctagagccaacctgaataagctgctgaccgattacaccgaaatgaagaaggcgatcctgcatgtgtactgggaagagttccagaaggaccctgtgggcctgatgagccgggtggcccagcctgccagcaagaagatcgatcagaacaagctgaaacctgagatggacgagaagggcaacctgaccaccgccggctttgcctgctctcagtgtggccagcccctgttcgtgtacaagctggagcaggtgtctgagaagggcaaggcttacaccaactacttcggacggtgcaatgtggccgagcacgaaaagctgatcctgctggcccagctgaagcccgagaaggatagcgacgaagccgtgacatatagcctgggaaagtttgggcagagggccctggatttctacagcattcatgtgaccaaggagtccacccaccccgtgaagcccctggcccagatcgccggaaacagatacgcctccggacctgtgggaaaggccctgagcgacgcatgtatgggcacaatcgcctccttcctgtctaagtaccaggacatcatcatcgaacaccagaaggtggtgaagggcaaccagaagagactggagagcctgcgggagctggccggcaaggaaaacctggaataccctagcgtgaccctgccacctcagcctcacaccaaggagggcgttgatgcctacaacgaagtgatcgcccgggtgcgaatgtgggtgaacctgaacctgtggcagaagctgaagctaagcagagatgatgccaagcctctgctgagactgaagggattcccttcctttcctctggtcgagagacaggccaacgaagtggactggtgggacatggtgtgtaacgtgaagaagctgatcaacgagaaaaaggaggatggcaaggtgttttggcagaatctggctggctacaagagacaggaagccctgagaccatacctgagcagcgaggaagatcggaagaagggaaagaaattcgctcggtaccagctgggcgacctgctgctgcacctggaaaagaagcacggcgaggactggggaaaggtgtacgacgaggcctgggagcggattgacaagaaagtggaaggcctgagcaagcacatcaagctggaagaggaacggagaagcgaggacgcccagagcaaggccgccctgaccgactggctgcgggctaaggccagcttcgtgatcgagggcctgaaggaggccgacaaggacgagttctgcagatgcgagctgaagctgcagaagtggtacggggacctgcggggaaagcccttcgccatcgaagccgagaacagcatcctggacatcagcggcttcagcaagcagtacaactgtgccttcatctggcagaaggacggcgtgaagaagctgaacctgtacctgatcatcaactacttcaagggcggcaagctgcggttcaagaagatcaaacctgaagccttcgaagccaacagattctacaccgtgatcaacaaaaagagcggcgagatcgtgcccatggaggtgaacttcaacttcgacgaccccaacctgatcatcctgcctctggcctttggcaagagacagggcagagaattcatctggaacgacctgctgtccctggaaaccggcagcctgaagctggccaacggaagagtgatcgagaagacactgtacaacagaagaacccggcaggatgagcctgccctgttcgtggccctgaccttcgagcggcgggaggtcctggactcctccaatatcaaaccaatgaacctgatcggcgtggcaagaggcgaaaacatccccgccgtgatcgccctgaccgaccccgagggctgcccactgagccggtttaaggatagcctgggaaacccaacccacatcctgagaatcggcgagagctataaggagaagcagcggaccatccaggccaagaaggaggtggagcagcggagagccggcggctacagccggaagtacgccagcaaagccaagaatctggcagacgatatggtgagaaacaccgctagagatctgctgtactacgccgtgacccaggatgccatgctgatcttcgccaacctgagccggggcttcggccggcagggcaagcggaccttcatggccgagagacagtacacacggatggaggactggctgaccgccaagctggcctacgagggcctgagcaagacctacctgtccaagacactggcccagtacacctccaagacatgcagcaactgtgggtttaccatcaccagcgccgactacgacagggtgctggagaagctgaagaagacagcaacaggctggatgaccacaattaacggcaaggagctgaaggtggagggccagattacctactacaacagatacaagagacagaacgtagtcaaggacctgtccgtcgagctggatagactgagcgaagaatctgtgaacaacgacatctcctcctggacaaagggcagaagcggagaagctctgagcctcctgaagaaaagattctcccatagacccgtgcaggagaagttcgtgtgcctgaactgcggcttcgagacacacgcagccgagcaagccgccctgaacatcgccagatcctggctgttcctgcggagccaggagtacaagaaataccagacaaacaagacaaccggcaacaccgataagagagccttcgtcgagacctggcagtccttttaccggaagaagcttaaggaggtgtggaaacctgccgtgcggtctggcggatctggcggaggctccaggcaggagcccgtgaccttcgaggacgtggccgtgtacttcacccagaacgagtgggccagcctggacagcgtgcagagggccctgtacagggaggtgatgctggagaactacgccaacgtggccagcctggccttccccttcatcacccccgtgctggtgagccagctggagcagggcgagctgccctggggcctggacccctgggagcccatgggcagggaggccctgaggggcatctgcggcggcccaagcagcggcgcccctcctcccagcggcggcagcccagccggctccccaacctctaccgaggagggcacctctgagtccgccacccccgagagcggccctggcacctccaccgagcccagcgagggcagcgcacccggcagccctgccggcagccccacctccacagaggagggaaccagcaccgagcccagcgaaggcagcgccccaggcaccagcaccgagcctagtgagcaggagattaaacggatcaacaagatcagaagaagacttgtgaaagacagcaacaccaagaaggccggcaagacaggccccatgaaaaccctgctggttagagtgatgacacccgatctgagagagcggctggaaaacctgagaaagaagcctgaaaatatcccccagcccatcagcaatacatctagagccaacctgaataagctgctgaccgattacaccgaaatgaagaaggcgatcctgcatgtgtactgggaagagttccagaaggaccctgtgggcctgatgagccgggtggcccagcctgccagcaagaagatcgatcagaacaagctgaaacctgagatggacgagaagggcaacctgaccaccgccggctttgcctgctctcagtgtggccagcccctgttcgtgtacaagctggagcaggtgtctgagaagggcaaggcttacaccaactacttcggacggtgcaatgtggccgagcacgaaaagctgatcctgctggcccagctgaagcccgagaaggatagcgacgaagccgtgacatatagcctgggaaagtttgggcagagggccctggatttctacagcattcatgtgaccaaggagtccacccaccccgtgaagcccctggcccagatcgccggaaacagatacgcctccggacctgtgggaaaggccctgagcgacgcatgtatgggcacaatcgcctccttcctgtctaagtaccaggacatcatcatcgaacaccagaaggtggtgaagggcaaccagaagagactggagagcctgcgggagctggccggcaaggaaaacctggaataccctagcgtgaccctgccacctcagcctcacaccaaggagggcgttgatgcctacaacgaagtgatcgcccgggtgcgaatgtgggtgaacctgaacctgtggcagaagctgaagctaagcagagatgatgccaagcctctgctgagactgaagggattcccttcctttcctctggtcgagagacaggccaacgaagtggactggtgggacatggtgtgtaacgtgaagaagctgatcaacgagaaaaaggaggatggcaaggtgttttggcagaatctggctggctacaagagacaggaagccctgagaccatacctgagcagcgaggaagatcggaagaagggaaagaaattcgctcggtaccagctgggcgacctgctgctgcacctggaaaagaagcacggcgaggactggggaaaggtgtacgacgaggcctgggagcggattgacaagaaagtggaaggcctgagcaagcacatcaagctggaagaggaacggagaagcgaggacgcccagagcaaggccgccctgaccgactggctgcgggctaaggccagcttcgtgatcgagggcctgaaggaggccgacaaggacgagttctgcagatgcgagctgaagctgcagaagtggtacggggacctgcggggaaagcccttcgccatcgaagccgagaacagcatcctggacatcagcggcttcagcaagcagtacaactgtgccttcatctggcagaaggacggcgtgaagaagctgaacctgtacctgatcatcaactacttcaagggcggcaagctgcggttcaagaagatcaaacctgaagccttcgaagccaacagattctacaccgtgatcaacaaaaagagcggcgagatcgtgcccatggaggtgaacttcaacttcgacgaccccaacctgatcatcctgcctctggcctttggcaagagacagggcagagaattcatctggaacgacctgctgtccctggaaaccggcagcctgaagctggccaacggaagagtgatcgagaagacactgtacaacagaagaacccggcaggatgagcctgccctgttcgtggccctgaccttcgagcggcgggaggtcctggactcctccaatatcaaaccaatgaacctgatcggcgtggcaagaggcgaaaacatccccgccgtgatcgccctgaccgaccccgagggctgcccactgagccggtttaaggatagcctgggaaacccaacccacatcctgagaatcggcgagagctataaggagaagcagcggaccatccaggccaagaaggaggtggagcagcggagagccggcggctacagccggaagtacgccagcaaagccaagaatctggcagacgatatggtgagaaacaccgctagagatctgctgtactacgccgtgacccaggatgccatgctgatcttcgccaacctgagccggggcttcggccggcagggcaagcggaccttcatggccgagagacagtacacacggatggaggactggctgaccgccaagctggcctacgagggcctgagcaagacctacctgtccaagacactggcccagtacacctccaagacatgcagcaactgtgggtttaccatcaccagcgccgactacgacagggtgctggagaagctgaagaagacagcaacaggctggatgaccacaattaacggcaaggagctgaaggtggagggccagattacctactacaacagatacaagagacagaacgtagtcaaggacctgtccgtcgagctggatagactgagcgaagaatctgtgaacaacgacatctcctcctggacaaagggcagaagcggagaagctctgagcctcctgaagaaaagattctcccatagacccgtgcaggagaagttcgtgtgcctgaactgcggcttcgagacacacgcagccgagcaagccgccctgaacatcgccagatcctggctgttcctgcggagccaggagtacaagaaataccagacaaacaagacaaccggcaacaccgataagagagccttcgtcgagacctggcagtccttttaccggaagaagcttaaggaggtgtggaaacctgccgtgcggtctggcggatctggcggaggctcctaggcaggagcccgtgaccttcgaggacgtggccgtgtacttcacccagaacgagtgggccagcctggacagcgtgcagagggccctgtacagggaggtgatgctggagaactacgccaacgtggccagcctggccttccccttcatcacccccgtgctggtgagccagctggagcagggcgagctgccctggggcctggacccctgggagcccatgggcagggaggccctgaggggcatctgcggatctggctccggcagcggccccaagaaaaagagaaaagtctaagctgccttctgcggggcttgccttctggccatgcccttcttctctcccttgcacctgtacctcttggtctttgaataaagcctgagtaggaaggctagcaaaaaaaaaaaaaaaaaaaaaaaaaaaaaaaaaaaaaaaaaaaaaaaaaaaaaaaaaaaaaaaaaaaaaaaaaaaaaaaa

SEQ ID NO: 16479 - RNA, 9485 nt, synthetic construct
  source 1..9485: mol_type = other RNA
aggaaataagagagaaaagaagagtaagaagaaatataagagccaccatggcccctaagaagaagcgtaaagtgagccggatggaacgcctcgtctacgaggtgcggcagaagtgcagaaacatcgaggacatctgcatctcctgcggatctctgaacgtgaccctggagcacccactgttcatcggcggcatgtgccagaactgtaaaaactgttttctggagtgtgcctatcaatacgacgatgacggctaccagagctactgcaccatctgttgcggcggaagagaggtgctgatgtgtggaaataacaactgctgccggtgcttctgcgtggaatgcgtggacctgctggtgggccccggcgccgcccaggccgctattaaggaagatccttggaactgctacatgtgcggccacaagggcacatacggcctgctgagacggagagaggactggcctagcagactgcagatgttcttcgccaataaccacgaccaggagttcgacccccctaaggtgtaccctcccgtccccgccgagaagagaaagcccatccgggtcctgagcctgttcgatggcatcgccaccggtctgctggtgctgaaggacctgggcatccaggtggataggtacattgcctccgaggtgtgcgaggactccatcaccgtgggaatggtgcgtcatcagggcaagatcatgtacgtgggcgacgtgcggagcgtgacacagaagcatatccaggagtggggccctttcgacctggtgatcggcggcagcccttgcaatgacctgagcatcgtgaacccagcccggaagggcctgtacgagggaaccggcagactgttcttcgagttttacagactgctgcacgacgcccggcctaaggaaggcgacgaccggcccttcttttggctgttcgagaatgtggtggccatgggagtcagcgacaagcgggatattagccggttcctggagagcaaccccgtgatgatcgatgccaaggaagtgagcgccgcccaccgggccagatacttctggggcaatctgcctggcatgaacagacccctggccagcaccgtgaacgacaagctggagctgcaggagtgcctggagcacggccggatcgccaagttcagcaaggtgagaaccatcaccacccgaagcaacagcatcaaacaaggcaaggaccagcactttcctgtgttcatgaacgagaaggaggacatcctgtggtgtaccgagatggagagagtgttcgggttcccagtccactacacagatgtcagcaacatgtctagactggccagacagagactgctgggaagaagctggtccgtccctgtgatcagacacctgttcgcccctctgaaggagtacttcgcctgcgtgagcagcggcaacagcaacgccaacagccggggccccagcttctctagcggcctggtgccactgtccctgagagggagccacatgggccccatggagatctacaaaaccgtgagcgcctggaagcggcagcctgtgcgcgtgctgagcctgtttcggaatatcgataaagtcctgaaaagcctgggattcctggagagcggctctggctccggcggtggcaccctgaagtacgtggaggatgtgacaaacgtggtcagacgggatgtggagaagtggggccccttcgatctggtgtacggcagcacccaacccctgggcagctcttgtgaccggtgccctggctggtacatgtttcagttccaccggatcctgcagtacgccctgccgagacaggagtcccagcggccattcttttggattttcatggacaacttgctgctgaccgaggatgaccaggaaactaccactcggttcctgcagaccgaagccgtgaccctgcaggacgtgagaggccgggactaccagaacgccatgcgggtgtggtccaacatccctggactgaaaagcaagcacgcacctctgacccctaaagaagaggagtacctgcaggcccaggtgcggagcagaagcaagctggacgcccctaaggtggatctgctggtgaagaattgcctcctgcccctgagagagtacttcaagtatttcagccagaatagtctgcccctgggaggcagcggcggcggcgccctggtgacatttgaggacgtcgccgtgcggttcacccaggaggaatgggctctgctggatccttctcagaaaatcctgtaccgggacgtgatgagagagacataccggaatctgacctccgtgggcatcaactgggaatgttgggaccttgaagcctgcttcagaagcctgggaagaaacctgagagtgcaggtggtgaagagaaagtgcgagctgaccaacagcggcccctgcgccgagggcggcccaagcagcggcgcccctcctcccagcggcggcagcccagccggctccccaacctctaccgaggagggcacctctgagtccgccacccccgagagcggccctggcacctccaccgagcccagcgagggcagcgcacccggcagccctgccggcagccccacctccacagaggagggaaccagcaccgagcccagcgaaggcagcgccccaggcaccagcaccgagcctagtgagcaggagattaaacggatcaacaagatcagaagaagacttgtgaaagacagcaacaccaagaaggccggcaagacaggccccatgaaaaccctgctggttagagtgatgacacccgatctgagagagcggctggaaaacctgagaaagaagcctgaaaatatcccccagcccatcagcaatacatctagagccaacctgaataagctgctgaccgattacaccgaaatgaagaaggcgatcctgcatgtgtactgggaagagttccagaaggaccctgtgggcctgatgagccgggtggcccagcctgccagcaagaagatcgatcagaacaagctgaaacctgagatggacgagaagggcaacctgaccaccgccggctttgcctgctctcagtgtggccagcccctgttcgtgtacaagctggagcaggtgtctgagaagggcaaggcttacaccaactacttcggacggtgcaatgtggccgagcacgaaaagctgatcctgctggcccagctgaagcccgagaaggatagcgacgaagccgtgacatatagcctgggaaagtttgggcagagggccctggatttctacagcattcatgtgaccaaggagtccacccaccccgtgaagcccctggcccagatcgccggaaacagatacgcctccggacctgtgggaaaggccctgagcgacgcatgtatgggcacaatcgcctccttcctgtctaagtaccaggacatcatcatcgaacaccagaaggtggtgaagggcaaccagaagagactggagagcctgcgggagctggccggcaaggaaaacctggaataccctagcgtgaccctgccacctcagcctcacaccaaggagggcgttgatgcctacaacgaagtgatcgcccgggtgcgaatgtgggtgaacctgaacctgtggcagaagctgaagctaagcagagatgatgccaagcctctgctgagactgaagggattcccttcctttcctctggtcgagagacaggccaacgaagtggactggtgggacatggtgtgtaacgtgaagaagctgatcaacgagaaaaaggaggatggcaaggtgttttggcagaatctggctggctacaagagacaggaagccctgagaccatacctgagcagcgaggaagatcggaagaagggaaagaaattcgctcggtaccagctgggcgacctgctgctgcacctggaaaagaagcacggcgaggactggggaaaggtgtacgacgaggcctgggagcggattgacaagaaagtggaaggcctgagcaagcacatcaagctggaagaggaacggagaagcgaggacgcccagagcaaggccgccctgaccgactggctgcgggctaaggccagcttcgtgatcgagggcctgaaggaggccgacaaggacgagttctgcagatgcgagctgaagctgcagaagtggtacggggacctgcggggaaagcccttcgccatcgaagccgagaacagcatcctggacatcagcggcttcagcaagcagtacaactgtgccttcatctggcagaaggacggcgtgaagaagctgaacctgtacctgatcatcaactacttcaagggcggcaagctgcggttcaagaagatcaaacctgaagccttcgaagccaacagattctacaccgtgatcaacaaaaagagcggcgagatcgtgcccatggaggtgaacttcaacttcgacgaccccaacctgatcatcctgcctctggcctttggcaagagacagggcagagaattcatctggaacgacctgctgtccctggaaaccggcagcctgaagctggccaacggaagagtgatcgagaagacactgtacaacagaagaacccggcaggatgagcctgccctgttcgtggccctgaccttcgagcggcgggaggtcctggactcctccaatatcaaaccaatgaacctgatcggcgtggcaagaggcgaaaacatccccgccgtgatcgccctgaccgaccccgagggctgcccactgagccggtttaaggatagcctgggaaacccaacccacatcctgagaatcggcgagagctataaggagaagcagcggaccatccaggccaagaaggaggtggagcagcggagagccggcggctacagccggaagtacgccagcaaagccaagaatctggcagacgatatggtgagaaacaccgctagagatctgctgtactacgccgtgacccaggatgccatgctgatcttcgccaacctgagccggggcttcggccggcagggcaagcggaccttcatggccgagagacagtacacacggatggaggactggctgaccgccaagctggcctacgagggcctgagcaagacctacctgtccaagacactggcccagtacacctccaagacatgcagcaactgtgggtttaccatcaccagcgccgactacgacagggtgctggagaagctgaagaagacagcaacaggctggatgaccacaattaacggcaaggagctgaaggtggagggccagattacctactacaacagatacaagagacagaacgtagtcaaggacctgtccgtcgagctggatagactgagcgaagaatctgtgaacaacgacatctcctcctggacaaagggcagaagcggagaagctctgagcctcctgaagaaaagattctcccatagacccgtgcaggagaagttcgtgtgcctgaactgcggcttcgagacacacgcagccgagcaagccgccctgaacatcgccagatcctggctgttcctgcggagccaggagtacaagaaataccagacaaacaagacaaccggcaacaccgataagagagccttcgtcgagacctggcagtccttttaccggaagaagcttaaggaggtgtggaaacctgccgtgcggtctggcggatctggcggaggctccccccagaagagcgtgaccttcgaggacgtggccgtgtacttcacccaggccgagtgggacggcctgagccccgcccagaggaccctgtacagggacgtgatgctggagaactacggcaacgtggccagcctgggcttccccctgctgaagcccgccgtgatcagccagctggagggcggcggcgagctgggcggccccagccccctggccgccggcaccggcctgcacgtgctgaggaccgtgggcggcccaagcagcggcgcccctcctcccagcggcggcagcccagccggctccccaacctctaccgaggagggcacctctgagtccgccacccccgagagcggccctggcacctccaccgagcccagcgagggcagcgcacccggcagccctgccggcagccccacctccacagaggagggaaccagcaccgagcccagcgaaggcagcgccccaggcaccagcaccgagcctagtgagcaggagattaaacggatcaacaagatcagaagaagacttgtgaaagacagcaacaccaagaaggccggcaagacaggccccatgaaaaccctgctggttagagtgatgacacccgatctgagagagcggctggaaaacctgagaaagaagcctgaaaatatcccccagcccatcagcaatacatctagagccaacctgaataagctgctgaccgattacaccgaaatgaagaaggcgatcctgcatgtgtactgggaagagttccagaaggaccctgtgggcctgatgagccgggtggcccagcctgccagcaagaagatcgatcagaacaagctgaaacctgagatggacgagaagggcaacctgaccaccgccggctttgcctgctctcagtgtggccagcccctgttcgtgtacaagctggagcaggtgtctgagaagggcaaggcttacaccaactacttcggacggtgcaatgtggccgagcacgaaaagctgatcctgctggcccagctgaagcccgagaaggatagcgacgaagccgtgacatatagcctgggaaagtttgggcagagggccctggatttctacagcattcatgtgaccaaggagtccacccaccccgtgaagcccctggcccagatcgccggaaacagatacgcctccggacctgtgggaaaggccctgagcgacgcatgtatgggcacaatcgcctccttcctgtctaagtaccaggacatcatcatcgaacaccagaaggtggtgaagggcaaccagaagagactggagagcctgcgggagctggccggcaaggaaaacctggaataccctagcgtgaccctgccacctcagcctcacaccaaggagggcgttgatgcctacaacgaagtgatcgcccgggtgcgaatgtgggtgaacctgaacctgtggcagaagctgaagctaagcagagatgatgccaagcctctgctgagactgaagggattcccttcctttcctctggtcgagagacaggccaacgaagtggactggtgggacatggtgtgtaacgtgaagaagctgatcaacgagaaaaaggaggatggcaaggtgttttggcagaatctggctggctacaagagacaggaagccctgagaccatacctgagcagcgaggaagatcggaagaagggaaagaaattcgctcggtaccagctgggcgacctgctgctgcacctggaaaagaagcacggcgaggactggggaaaggtgtacgacgaggcctgggagcggattgacaagaaagtggaaggcctgagcaagcacatcaagctggaagaggaacggagaagcgaggacgcccagagcaaggccgccctgaccgactggctgcgggctaaggccagcttcgtgatcgagggcctgaaggaggccgacaaggacgagttctgcagatgcgagctgaagctgcagaagtggtacggggacctgcggggaaagcccttcgccatcgaagccgagaacagcatcctggacatcagcggcttcagcaagcagtacaactgtgccttcatctggcagaaggacggcgtgaagaagctgaacctgtacctgatcatcaactacttcaagggcggcaagctgcggttcaagaagatcaaacctgaagccttcgaagccaacagattctacaccgtgatcaacaaaaagagcggcgagatcgtgcccatggaggtgaacttcaacttcgacgaccccaacctgatcatcctgcctctggcctttggcaagagacagggcagagaattcatctggaacgacctgctgtccctggaaaccggcagcctgaagctggccaacggaagagtgatcgagaagacactgtacaacagaagaacccggcaggatgagcctgccctgttcgtggccctgaccttcgagcggcgggaggtcctggactcctccaatatcaaaccaatgaacctgatcggcgtggcaagaggcgaaaacatccccgccgtgatcgccctgaccgaccccgagggctgcccactgagccggtttaaggatagcctgggaaacccaacccacatcctgagaatcggcgagagctataaggagaagcagcggaccatccaggccaagaaggaggtggagcagcggagagccggcggctacagccggaagtacgccagcaaagccaagaatctggcagacgatatggtgagaaacaccgctagagatctgctgtactacgccgtgacccaggatgccatgctgatcttcgccaacctgagccggggcttcggccggcagggcaagcggaccttcatggccgagagacagtacacacggatggaggactggctgaccgccaagctggcctacgagggcctgagcaagacctacctgtccaagacactggcccagtacacctccaagacatgcagcaactgtgggtttaccatcaccagcgccgactacgacagggtgctggagaagctgaagaagacagcaacaggctggatgaccacaattaacggcaaggagctgaaggtggagggccagattacctactacaacagatacaagagacagaacgtagtcaaggacctgtccgtcgagctggatagactgagcgaagaatctgtgaacaacgacatctcctcctggacaaagggcagaagcggagaagctctgagcctcctgaagaaaagattctcccatagacccgtgcaggagaagttcgtgtgcctgaactgcggcttcgagacacacgcagccgagcaagccgccctgaacatcgccagatcctggctgttcctgcggagccaggagtacaagaaataccagacaaacaagacaaccggcaacaccgataagagagccttcgtcgagacctggcagtccttttaccggaagaagcttaaggaggtgtggaaacctgccgtgcggtctggcggatctggcggaggctcctccccagaagagcgtgaccttcgaggacgtggccgtgtacttcacccaggccgagtgggacggcctgagccccgcccagaggaccctgtacagggacgtgatgctggagaactacggcaacgtggccagcctgggcttccccctgctgaagcccgccgtgatcagccagctggagggcggcggcgagctgggcggccccagccccctggccgccggcaccggcctgcacgtgctgaggaccgtgggatctggctccggcagcggccccaagaaaaagagaaaagtctaagctgccttctgcggggcttgccttctggccatgcccttcttctctcccttgcacctgtacctcttggtctttgaataaagcctgagtaggaaggctagcaaaaaaaaaaaaaaaaaaaaaaaaaaaaaaaaaaaaaaaaaaaaaaaaaaaaaaaaaaaaaaaaaaaaaaaaaaaaaaaa

SEQ ID NO: 16480 - RNA, 9485 nt, synthetic construct
  source 1..9485: mol_type = other RNA
aggaaataagagagaaaagaagagtaagaagaaatataagagccaccatggcccctaagaagaagcgtaaagtgagccggatggaacgcctcgtctacgaggtgcggcagaagtgcagaaacatcgaggacatctgcatctcctgcggatctctgaacgtgaccctggagcacccactgttcatcggcggcatgtgccagaactgtaaaaactgttttctggagtgtgcctatcaatacgacgatgacggctaccagagctactgcaccatctgttgcggcggaagagaggtgctgatgtgtggaaataacaactgctgccggtgcttctgcgtggaatgcgtggacctgctggtgggccccggcgccgcccaggccgctattaaggaagatccttggaactgctacatgtgcggccacaagggcacatacggcctgctgagacggagagaggactggcctagcagactgcagatgttcttcgccaataaccacgaccaggagttcgacccccctaaggtgtaccctcccgtccccgccgagaagagaaagcccatccgggtcctgagcctgttcgatggcatcgccaccggtctgctggtgctgaaggacctgggcatccaggtggataggtacattgcctccgaggtgtgcgaggactccatcaccgtgggaatggtgcgtcatcagggcaagatcatgtacgtgggcgacgtgcggagcgtgacacagaagcatatccaggagtggggccctttcgacctggtgatcggcggcagcccttgcaatgacctgagcatcgtgaacccagcccggaagggcctgtacgagggaaccggcagactgttcttcgagttttacagactgctgcacgacgcccggcctaaggaaggcgacgaccggcccttcttttggctgttcgagaatgtggtggccatgggagtcagcgacaagcgggatattagccggttcctggagagcaaccccgtgatgatcgatgccaaggaagtgagcgccgcccaccgggccagatacttctggggcaatctgcctggcatgaacagacccctggccagcaccgtgaacgacaagctggagctgcaggagtgcctggagcacggccggatcgccaagttcagcaaggtgagaaccatcaccacccgaagcaacagcatcaaacaaggcaaggaccagcactttcctgtgttcatgaacgagaaggaggacatcctgtggtgtaccgagatggagagagtgttcgggttcccagtccactacacagatgtcagcaacatgtctagactggccagacagagactgctgggaagaagctggtccgtccctgtgatcagacacctgttcgcccctctgaaggagtacttcgcctgcgtgagcagcggcaacagcaacgccaacagccggggccccagcttctctagcggcctggtgccactgtccctgagagggagccacatgggccccatggagatctacaaaaccgtgagcgcctggaagcggcagcctgtgcgcgtgctgagcctgtttcggaatatcgataaagtcctgaaaagcctgggattcctggagagcggctctggctccggcggtggcaccctgaagtacgtggaggatgtgacaaacgtggtcagacgggatgtggagaagtggggccccttcgatctggtgtacggcagcacccaacccctgggcagctcttgtgaccggtgccctggctggtacatgtttcagttccaccggatcctgcagtacgccctgccgagacaggagtcccagcggccattcttttggattttcatggacaacttgctgctgaccgaggatgaccaggaaactaccactcggttcctgcagaccgaagccgtgaccctgcaggacgtgagaggccgggactaccagaacgccatgcgggtgtggtccaacatccctggactgaaaagcaagcacgcacctctgacccctaaagaagaggagtacctgcaggcccaggtgcggagcagaagcaagctggacgcccctaaggtggatctgctggtgaagaattgcctcctgcccctgagagagtacttcaagtatttcagccagaatagtctgcccctgggaggcagcggcggcggcgccctggtgacatttgaggacgtcgccgtgcggttcacccaggaggaatgggctctgctggatccttctcagaaaatcctgtaccgggacgtgatgagagagacataccggaatctgacctccgtgggcatcaactgggaatgttgggaccttgaagcctgcttcagaagcctgggaagaaacctgagagtgcaggtggtgaagagaaagtgcgagctgaccaacagcggcccctgcgccgagggcggcccaagcagcggcgcccctcctcccagcggcggcagcccagccggctccccaacctctaccgaggagggcacctctgagtccgccacccccgagagcggccctggcacctccaccgagcccagcgagggcagcgcacccggcagccctgccggcagccccacctccacagaggagggaaccagcaccgagcccagcgaaggcagcgccccaggcaccagcaccgagcctagtgagcaggagattaaacggatcaacaagatcagaagaagacttgtgaaagacagcaacaccaagaaggccggcaagacaggccccatgaaaaccctgctggttagagtgatgacacccgatctgagagagcggctggaaaacctgagaaagaagcctgaaaatatcccccagcccatcagcaatacatctagagccaacctgaataagctgctgaccgattacaccgaaatgaagaaggcgatcctgcatgtgtactgggaagagttccagaaggaccctgtgggcctgatgagccgggtggcccagcctgccagcaagaagatcgatcagaacaagctgaaacctgagatggacgagaagggcaacctgaccaccgccggctttgcctgctctcagtgtggccagcccctgttcgtgtacaagctggagcaggtgtctgagaagggcaaggcttacaccaactacttcggacggtgcaatgtggccgagcacgaaaagctgatcctgctggcccagctgaagcccgagaaggatagcgacgaagccgtgacatatagcctgggaaagtttgggcagagggccctggatttctacagcattcatgtgaccaaggagtccacccaccccgtgaagcccctggcccagatcgccggaaacagatacgcctccggacctgtgggaaaggccctgagcgacgcatgtatgggcacaatcgcctccttcctgtctaagtaccaggacatcatcatcgaacaccagaaggtggtgaagggcaaccagaagagactggagagcctgcgggagctggccggcaaggaaaacctggaataccctagcgtgaccctgccacctcagcctcacaccaaggagggcgttgatgcctacaacgaagtgatcgcccgggtgcgaatgtgggtgaacctgaacctgtggcagaagctgaagctaagcagagatgatgccaagcctctgctgagactgaagggattcccttcctttcctctggtcgagagacaggccaacgaagtggactggtgggacatggtgtgtaacgtgaagaagctgatcaacgagaaaaaggaggatggcaaggtgttttggcagaatctggctggctacaagagacaggaagccctgagaccatacctgagcagcgaggaagatcggaagaagggaaagaaattcgctcggtaccagctgggcgacctgctgctgcacctggaaaagaagcacggcgaggactggggaaaggtgtacgacgaggcctgggagcggattgacaagaaagtggaaggcctgagcaagcacatcaagctggaagaggaacggagaagcgaggacgcccagagcaaggccgccctgaccgactggctgcgggctaaggccagcttcgtgatcgagggcctgaaggaggccgacaaggacgagttctgcagatgcgagctgaagctgcagaagtggtacggggacctgcggggaaagcccttcgccatcgaagccgagaacagcatcctggacatcagcggcttcagcaagcagtacaactgtgccttcatctggcagaaggacggcgtgaagaagctgaacctgtacctgatcatcaactacttcaagggcggcaagctgcggttcaagaagatcaaacctgaagccttcgaagccaacagattctacaccgtgatcaacaaaaagagcggcgagatcgtgcccatggaggtgaacttcaacttcgacgaccccaacctgatcatcctgcctctggcctttggcaagagacagggcagagaattcatctggaacgacctgctgtccctggaaaccggcagcctgaagctggccaacggaagagtgatcgagaagacactgtacaacagaagaacccggcaggatgagcctgccctgttcgtggccctgaccttcgagcggcgggaggtcctggactcctccaatatcaaaccaatgaacctgatcggcgtggcaagaggcgaaaacatccccgccgtgatcgccctgaccgaccccgagggctgcccactgagccggtttaaggatagcctgggaaacccaacccacatcctgagaatcggcgagagctataaggagaagcagcggaccatccaggccaagaaggaggtggagcagcggagagccggcggctacagccggaagtacgccagcaaagccaagaatctggcagacgatatggtgagaaacaccgctagagatctgctgtactacgccgtgacccaggatgccatgctgatcttcgccaacctgagccggggcttcggccggcagggcaagcggaccttcatggccgagagacagtacacacggatggaggactggctgaccgccaagctggcctacgagggcctgagcaagacctacctgtccaagacactggcccagtacacctccaagacatgcagcaactgtgggtttaccatcaccagcgccgactacgacagggtgctggagaagctgaagaagacagcaacaggctggatgaccacaattaacggcaaggagctgaaggtggagggccagattacctactacaacagatacaagagacagaacgtagtcaaggacctgtccgtcgagctggatagactgagcgaagaatctgtgaacaacgacatctcctcctggacaaagggcagaagcggagaagctctgagcctcctgaagaaaagattctcccatagacccgtgcaggagaagttcgtgtgcctgaactgcggcttcgagacacacgcagccgagcaagccgccctgaacatcgccagatcctggctgttcctgcggagccaggagtacaagaaataccagacaaacaagacaaccggcaacaccgataagagagccttcgtcgagacctggcagtccttttaccggaagaagcttaaggaggtgtggaaacctgccgtgcggtctggcggatctggcggaggctccaagcccgaggacgtgagcttcgccgaggtggccgtgtacttcagcctggacgagtggggctacctgtggcccgcccagagggccctgtacagggacgtgatgagggagacctacggccacttcggcgagctgggcttccccggccccaagcccgccctgatcagctggatggagcaggagagcgaggcctggagccccgccgcccaggaccccgaggagggcgagagcgtgggcggcgccgtgggcggcccaagcagcggcgcccctcctcccagcggcggcagcccagccggctccccaacctctaccgaggagggcacctctgagtccgccacccccgagagcggccctggcacctccaccgagcccagcgagggcagcgcacccggcagccctgccggcagccccacctccacagaggagggaaccagcaccgagcccagcgaaggcagcgccccaggcaccagcaccgagcctagtgagcaggagattaaacggatcaacaagatcagaagaagacttgtgaaagacagcaacaccaagaaggccggcaagacaggccccatgaaaaccctgctggttagagtgatgacacccgatctgagagagcggctggaaaacctgagaaagaagcctgaaaatatcccccagcccatcagcaatacatctagagccaacctgaataagctgctgaccgattacaccgaaatgaagaaggcgatcctgcatgtgtactgggaagagttccagaaggaccctgtgggcctgatgagccgggtggcccagcctgccagcaagaagatcgatcagaacaagctgaaacctgagatggacgagaagggcaacctgaccaccgccggctttgcctgctctcagtgtggccagcccctgttcgtgtacaagctggagcaggtgtctgagaagggcaaggcttacaccaactacttcggacggtgcaatgtggccgagcacgaaaagctgatcctgctggcccagctgaagcccgagaaggatagcgacgaagccgtgacatatagcctgggaaagtttgggcagagggccctggatttctacagcattcatgtgaccaaggagtccacccaccccgtgaagcccctggcccagatcgccggaaacagatacgcctccggacctgtgggaaaggccctgagcgacgcatgtatgggcacaatcgcctccttcctgtctaagtaccaggacatcatcatcgaacaccagaaggtggtgaagggcaaccagaagagactggagagcctgcgggagctggccggcaaggaaaacctggaataccctagcgtgaccctgccacctcagcctcacaccaaggagggcgttgatgcctacaacgaagtgatcgcccgggtgcgaatgtgggtgaacctgaacctgtggcagaagctgaagctaagcagagatgatgccaagcctctgctgagactgaagggattcccttcctttcctctggtcgagagacaggccaacgaagtggactggtgggacatggtgtgtaacgtgaagaagctgatcaacgagaaaaaggaggatggcaaggtgttttggcagaatctggctggctacaagagacaggaagccctgagaccatacctgagcagcgaggaagatcggaagaagggaaagaaattcgctcggtaccagctgggcgacctgctgctgcacctggaaaagaagcacggcgaggactggggaaaggtgtacgacgaggcctgggagcggattgacaagaaagtggaaggcctgagcaagcacatcaagctggaagaggaacggagaagcgaggacgcccagagcaaggccgccctgaccgactggctgcgggctaaggccagcttcgtgatcgagggcctgaaggaggccgacaaggacgagttctgcagatgcgagctgaagctgcagaagtggtacggggacctgcggggaaagcccttcgccatcgaagccgagaacagcatcctggacatcagcggcttcagcaagcagtacaactgtgccttcatctggcagaaggacggcgtgaagaagctgaacctgtacctgatcatcaactacttcaagggcggcaagctgcggttcaagaagatcaaacctgaagccttcgaagccaacagattctacaccgtgatcaacaaaaagagcggcgagatcgtgcccatggaggtgaacttcaacttcgacgaccccaacctgatcatcctgcctctggcctttggcaagagacagggcagagaattcatctggaacgacctgctgtccctggaaaccggcagcctgaagctggccaacggaagagtgatcgagaagacactgtacaacagaagaacccggcaggatgagcctgccctgttcgtggccctgaccttcgagcggcgggaggtcctggactcctccaatatcaaaccaatgaacctgatcggcgtggcaagaggcgaaaacatccccgccgtgatcgccctgaccgaccccgagggctgcccactgagccggtttaaggatagcctgggaaacccaacccacatcctgagaatcggcgagagctataaggagaagcagcggaccatccaggccaagaaggaggtggagcagcggagagccggcggctacagccggaagtacgccagcaaagccaagaatctggcagacgatatggtgagaaacaccgctagagatctgctgtactacgccgtgacccaggatgccatgctgatcttcgccaacctgagccggggcttcggccggcagggcaagcggaccttcatggccgagagacagtacacacggatggaggactggctgaccgccaagctggcctacgagggcctgagcaagacctacctgtccaagacactggcccagtacacctccaagacatgcagcaactgtgggtttaccatcaccagcgccgactacgacagggtgctggagaagctgaagaagacagcaacaggctggatgaccacaattaacggcaaggagctgaaggtggagggccagattacctactacaacagatacaagagacagaacgtagtcaaggacctgtccgtcgagctggatagactgagcgaagaatctgtgaacaacgacatctcctcctggacaaagggcagaagcggagaagctctgagcctcctgaagaaaagattctcccatagacccgtgcaggagaagttcgtgtgcctgaactgcggcttcgagacacacgcagccgagcaagccgccctgaacatcgccagatcctggctgttcctgcggagccaggagtacaagaaataccagacaaacaagacaaccggcaacaccgataagagagccttcgtcgagacctggcagtccttttaccggaagaagcttaaggaggtgtggaaacctgccgtgcggtctggcggatctggcggaggctcctaagcccgaggacgtgagcttcgccgaggtggccgtgtacttcagcctggacgagtggggctacctgtggcccgcccagagggccctgtacagggacgtgatgagggagacctacggccacttcggcgagctgggcttccccggccccaagcccgccctgatcagctggatggagcaggagagcgaggcctggagccccgccgcccaggaccccgaggagggcgagagcgtgggcggcgccgtgggatctggctccggcagcggccccaagaaaaagagaaaagtctaagctgccttctgcggggcttgccttctggccatgcccttcttctctcccttgcacctgtacctcttggtctttgaataaagcctgagtaggaaggctagcaaaaaaaaaaaaaaaaaaaaaaaaaaaaaaaaaaaaaaaaaaaaaaaaaaaaaaaaaaaaaaaaaaaaaaaaaaaaaaaa

SEQ ID NO: 16481 - RNA, 9485 nt, synthetic construct
  source 1..9485: mol_type = other RNA
aggaaataagagagaaaagaagagtaagaagaaatataagagccaccatggcccctaagaagaagcgtaaagtgagccggatggaacgcctcgtctacgaggtgcggcagaagtgcagaaacatcgaggacatctgcatctcctgcggatctctgaacgtgaccctggagcacccactgttcatcggcggcatgtgccagaactgtaaaaactgttttctggagtgtgcctatcaatacgacgatgacggctaccagagctactgcaccatctgttgcggcggaagagaggtgctgatgtgtggaaataacaactgctgccggtgcttctgcgtggaatgcgtggacctgctggtgggccccggcgccgcccaggccgctattaaggaagatccttggaactgctacatgtgcggccacaagggcacatacggcctgctgagacggagagaggactggcctagcagactgcagatgttcttcgccaataaccacgaccaggagttcgacccccctaaggtgtaccctcccgtccccgccgagaagagaaagcccatccgggtcctgagcctgttcgatggcatcgccaccggtctgctggtgctgaaggacctgggcatccaggtggataggtacattgcctccgaggtgtgcgaggactccatcaccgtgggaatggtgcgtcatcagggcaagatcatgtacgtgggcgacgtgcggagcgtgacacagaagcatatccaggagtggggccctttcgacctggtgatcggcggcagcccttgcaatgacctgagcatcgtgaacccagcccggaagggcctgtacgagggaaccggcagactgttcttcgagttttacagactgctgcacgacgcccggcctaaggaaggcgacgaccggcccttcttttggctgttcgagaatgtggtggccatgggagtcagcgacaagcgggatattagccggttcctggagagcaaccccgtgatgatcgatgccaaggaagtgagcgccgcccaccgggccagatacttctggggcaatctgcctggcatgaacagacccctggccagcaccgtgaacgacaagctggagctgcaggagtgcctggagcacggccggatcgccaagttcagcaaggtgagaaccatcaccacccgaagcaacagcatcaaacaaggcaaggaccagcactttcctgtgttcatgaacgagaaggaggacatcctgtggtgtaccgagatggagagagtgttcgggttcccagtccactacacagatgtcagcaacatgtctagactggccagacagagactgctgggaagaagctggtccgtccctgtgatcagacacctgttcgcccctctgaaggagtacttcgcctgcgtgagcagcggcaacagcaacgccaacagccggggccccagcttctctagcggcctggtgccactgtccctgagagggagccacatgggccccatggagatctacaaaaccgtgagcgcctggaagcggcagcctgtgcgcgtgctgagcctgtttcggaatatcgataaagtcctgaaaagcctgggattcctggagagcggctctggctccggcggtggcaccctgaagtacgtggaggatgtgacaaacgtggtcagacgggatgtggagaagtggggccccttcgatctggtgtacggcagcacccaacccctgggcagctcttgtgaccggtgccctggctggtacatgtttcagttccaccggatcctgcagtacgccctgccgagacaggagtcccagcggccattcttttggattttcatggacaacttgctgctgaccgaggatgaccaggaaactaccactcggttcctgcagaccgaagccgtgaccctgcaggacgtgagaggccgggactaccagaacgccatgcgggtgtggtccaacatccctggactgaaaagcaagcacgcacctctgacccctaaagaagaggagtacctgcaggcccaggtgcggagcagaagcaagctggacgcccctaaggtggatctgctggtgaagaattgcctcctgcccctgagagagtacttcaagtatttcagccagaatagtctgcccctgggaggcagcggcggcggcgccctggtgacatttgaggacgtcgccgtgcggttcacccaggaggaatgggctctgctggatccttctcagaaaatcctgtaccgggacgtgatgagagagacataccggaatctgacctccgtgggcatcaactgggaatgttgggaccttgaagcctgcttcagaagcctgggaagaaacctgagagtgcaggtggtgaagagaaagtgcgagctgaccaacagcggcccctgcgccgagggcggcccaagcagcggcgcccctcctcccagcggcggcagcccagccggctccccaacctctaccgaggagggcacctctgagtccgccacccccgagagcggccctggcacctccaccgagcccagcgagggcagcgcacccggcagccctgccggcagccccacctccacagaggagggaaccagcaccgagcccagcgaaggcagcgccccaggcaccagcaccgagcctagtgagcaggagattaaacggatcaacaagatcagaagaagacttgtgaaagacagcaacaccaagaaggccggcaagacaggccccatgaaaaccctgctggttagagtgatgacacccgatctgagagagcggctggaaaacctgagaaagaagcctgaaaatatcccccagcccatcagcaatacatctagagccaacctgaataagctgctgaccgattacaccgaaatgaagaaggcgatcctgcatgtgtactgggaagagttccagaaggaccctgtgggcctgatgagccgggtggcccagcctgccagcaagaagatcgatcagaacaagctgaaacctgagatggacgagaagggcaacctgaccaccgccggctttgcctgctctcagtgtggccagcccctgttcgtgtacaagctggagcaggtgtctgagaagggcaaggcttacaccaactacttcggacggtgcaatgtggccgagcacgaaaagctgatcctgctggcccagctgaagcccgagaaggatagcgacgaagccgtgacatatagcctgggaaagtttgggcagagggccctggatttctacagcattcatgtgaccaaggagtccacccaccccgtgaagcccctggcccagatcgccggaaacagatacgcctccggacctgtgggaaaggccctgagcgacgcatgtatgggcacaatcgcctccttcctgtctaagtaccaggacatcatcatcgaacaccagaaggtggtgaagggcaaccagaagagactggagagcctgcgggagctggccggcaaggaaaacctggaataccctagcgtgaccctgccacctcagcctcacaccaaggagggcgttgatgcctacaacgaagtgatcgcccgggtgcgaatgtgggtgaacctgaacctgtggcagaagctgaagctaagcagagatgatgccaagcctctgctgagactgaagggattcccttcctttcctctggtcgagagacaggccaacgaagtggactggtgggacatggtgtgtaacgtgaagaagctgatcaacgagaaaaaggaggatggcaaggtgttttggcagaatctggctggctacaagagacaggaagccctgagaccatacctgagcagcgaggaagatcggaagaagggaaagaaattcgctcggtaccagctgggcgacctgctgctgcacctggaaaagaagcacggcgaggactggggaaaggtgtacgacgaggcctgggagcggattgacaagaaagtggaaggcctgagcaagcacatcaagctggaagaggaacggagaagcgaggacgcccagagcaaggccgccctgaccgactggctgcgggctaaggccagcttcgtgatcgagggcctgaaggaggccgacaaggacgagttctgcagatgcgagctgaagctgcagaagtggtacggggacctgcggggaaagcccttcgccatcgaagccgagaacagcatcctggacatcagcggcttcagcaagcagtacaactgtgccttcatctggcagaaggacggcgtgaagaagctgaacctgtacctgatcatcaactacttcaagggcggcaagctgcggttcaagaagatcaaacctgaagccttcgaagccaacagattctacaccgtgatcaacaaaaagagcggcgagatcgtgcccatggaggtgaacttcaacttcgacgaccccaacctgatcatcctgcctctggcctttggcaagagacagggcagagaattcatctggaacgacctgctgtccctggaaaccggcagcctgaagctggccaacggaagagtgatcgagaagacactgtacaacagaagaacccggcaggatgagcctgccctgttcgtggccctgaccttcgagcggcgggaggtcctggactcctccaatatcaaaccaatgaacctgatcggcgtggcaagaggcgaaaacatccccgccgtgatcgccctgaccgaccccgagggctgcccactgagccggtttaaggatagcctgggaaacccaacccacatcctgagaatcggcgagagctataaggagaagcagcggaccatccaggccaagaaggaggtggagcagcggagagccggcggctacagccggaagtacgccagcaaagccaagaatctggcagacgatatggtgagaaacaccgctagagatctgctgtactacgccgtgacccaggatgccatgctgatcttcgccaacctgagccggggcttcggccggcagggcaagcggaccttcatggccgagagacagtacacacggatggaggactggctgaccgccaagctggcctacgagggcctgagcaagacctacctgtccaagacactggcccagtacacctccaagacatgcagcaactgtgggtttaccatcaccagcgccgactacgacagggtgctggagaagctgaagaagacagcaacaggctggatgaccacaattaacggcaaggagctgaaggtggagggccagattacctactacaacagatacaagagacagaacgtagtcaaggacctgtccgtcgagctggatagactgagcgaagaatctgtgaacaacgacatctcctcctggacaaagggcagaagcggagaagctctgagcctcctgaagaaaagattctcccatagacccgtgcaggagaagttcgtgtgcctgaactgcggcttcgagacacacgcagccgagcaagccgccctgaacatcgccagatcctggctgttcctgcggagccaggagtacaagaaataccagacaaacaagacaaccggcaacaccgataagagagccttcgtcgagacctggcagtccttttaccggaagaagcttaaggaggtgtggaaacctgccgtgcggtctggcggatctggcggaggctccagccagggcagcgtgaccttcagggacgtggccatcgacttcagccaggaggagtggaagtggctgcagcccgcccagagggacctgtacaggtgcgtgatgctggagaactacggccacctggtgagcctgggcctgagcatcagcaagcccgacgtggtgagcctgctggagcagggcaaggagccctggctgggcaagagggaggtgaagagggacctgttcagcgtgagcgagagcagcggcggcccaagcagcggcgcccctcctcccagcggcggcagcccagccggctccccaacctctaccgaggagggcacctctgagtccgccacccccgagagcggccctggcacctccaccgagcccagcgagggcagcgcacccggcagccctgccggcagccccacctccacagaggagggaaccagcaccgagcccagcgaaggcagcgccccaggcaccagcaccgagcctagtgagcaggagattaaacggatcaacaagatcagaagaagacttgtgaaagacagcaacaccaagaaggccggcaagacaggccccatgaaaaccctgctggttagagtgatgacacccgatctgagagagcggctggaaaacctgagaaagaagcctgaaaatatcccccagcccatcagcaatacatctagagccaacctgaataagctgctgaccgattacaccgaaatgaagaaggcgatcctgcatgtgtactgggaagagttccagaaggaccctgtgggcctgatgagccgggtggcccagcctgccagcaagaagatcgatcagaacaagctgaaacctgagatggacgagaagggcaacctgaccaccgccggctttgcctgctctcagtgtggccagcccctgttcgtgtacaagctggagcaggtgtctgagaagggcaaggcttacaccaactacttcggacggtgcaatgtggccgagcacgaaaagctgatcctgctggcccagctgaagcccgagaaggatagcgacgaagccgtgacatatagcctgggaaagtttgggcagagggccctggatttctacagcattcatgtgaccaaggagtccacccaccccgtgaagcccctggcccagatcgccggaaacagatacgcctccggacctgtgggaaaggccctgagcgacgcatgtatgggcacaatcgcctccttcctgtctaagtaccaggacatcatcatcgaacaccagaaggtggtgaagggcaaccagaagagactggagagcctgcgggagctggccggcaaggaaaacctggaataccctagcgtgaccctgccacctcagcctcacaccaaggagggcgttgatgcctacaacgaagtgatcgcccgggtgcgaatgtgggtgaacctgaacctgtggcagaagctgaagctaagcagagatgatgccaagcctctgctgagactgaagggattcccttcctttcctctggtcgagagacaggccaacgaagtggactggtgggacatggtgtgtaacgtgaagaagctgatcaacgagaaaaaggaggatggcaaggtgttttggcagaatctggctggctacaagagacaggaagccctgagaccatacctgagcagcgaggaagatcggaagaagggaaagaaattcgctcggtaccagctgggcgacctgctgctgcacctggaaaagaagcacggcgaggactggggaaaggtgtacgacgaggcctgggagcggattgacaagaaagtggaaggcctgagcaagcacatcaagctggaagaggaacggagaagcgaggacgcccagagcaaggccgccctgaccgactggctgcgggctaaggccagcttcgtgatcgagggcctgaaggaggccgacaaggacgagttctgcagatgcgagctgaagctgcagaagtggtacggggacctgcggggaaagcccttcgccatcgaagccgagaacagcatcctggacatcagcggcttcagcaagcagtacaactgtgccttcatctggcagaaggacggcgtgaagaagctgaacctgtacctgatcatcaactacttcaagggcggcaagctgcggttcaagaagatcaaacctgaagccttcgaagccaacagattctacaccgtgatcaacaaaaagagcggcgagatcgtgcccatggaggtgaacttcaacttcgacgaccccaacctgatcatcctgcctctggcctttggcaagagacagggcagagaattcatctggaacgacctgctgtccctggaaaccggcagcctgaagctggccaacggaagagtgatcgagaagacactgtacaacagaagaacccggcaggatgagcctgccctgttcgtggccctgaccttcgagcggcgggaggtcctggactcctccaatatcaaaccaatgaacctgatcggcgtggcaagaggcgaaaacatccccgccgtgatcgccctgaccgaccccgagggctgcccactgagccggtttaaggatagcctgggaaacccaacccacatcctgagaatcggcgagagctataaggagaagcagcggaccatccaggccaagaaggaggtggagcagcggagagccggcggctacagccggaagtacgccagcaaagccaagaatctggcagacgatatggtgagaaacaccgctagagatctgctgtactacgccgtgacccaggatgccatgctgatcttcgccaacctgagccggggcttcggccggcagggcaagcggaccttcatggccgagagacagtacacacggatggaggactggctgaccgccaagctggcctacgagggcctgagcaagacctacctgtccaagacactggcccagtacacctccaagacatgcagcaactgtgggtttaccatcaccagcgccgactacgacagggtgctggagaagctgaagaagacagcaacaggctggatgaccacaattaacggcaaggagctgaaggtggagggccagattacctactacaacagatacaagagacagaacgtagtcaaggacctgtccgtcgagctggatagactgagcgaagaatctgtgaacaacgacatctcctcctggacaaagggcagaagcggagaagctctgagcctcctgaagaaaagattctcccatagacccgtgcaggagaagttcgtgtgcctgaactgcggcttcgagacacacgcagccgagcaagccgccctgaacatcgccagatcctggctgttcctgcggagccaggagtacaagaaataccagacaaacaagacaaccggcaacaccgataagagagccttcgtcgagacctggcagtccttttaccggaagaagcttaaggaggtgtggaaacctgccgtgcggtctggcggatctggcggaggctcctagccagggcagcgtgaccttcagggacgtggccatcgacttcagccaggaggagtggaagtggctgcagcccgcccagagggacctgtacaggtgcgtgatgctggagaactacggccacctggtgagcctgggcctgagcatcagcaagcccgacgtggtgagcctgctggagcagggcaaggagccctggctgggcaagagggaggtgaagagggacctgttcagcgtgagcgagagcagcggatctggctccggcagcggccccaagaaaaagagaaaagtctaagctgccttctgcggggcttgccttctggccatgcccttcttctctcccttgcacctgtacctcttggtctttgaataaagcctgagtaggaaggctagcaaaaaaaaaaaaaaaaaaaaaaaaaaaaaaaaaaaaaaaaaaaaaaaaaaaaaaaaaaaaaaaaaaaaaaaaaaaaaaaa

SEQ ID NO: 16482 - RNA, 9485 nt, synthetic construct
  source 1..9485: mol_type = other RNA
aggaaataagagagaaaagaagagtaagaagaaatataagagccaccatggcccctaagaagaagcgtaaagtgagccggatggaacgcctcgtctacgaggtgcggcagaagtgcagaaacatcgaggacatctgcatctcctgcggatctctgaacgtgaccctggagcacccactgttcatcggcggcatgtgccagaactgtaaaaactgttttctggagtgtgcctatcaatacgacgatgacggctaccagagctactgcaccatctgttgcggcggaagagaggtgctgatgtgtggaaataacaactgctgccggtgcttctgcgtggaatgcgtggacctgctggtgggccccggcgccgcccaggccgctattaaggaagatccttggaactgctacatgtgcggccacaagggcacatacggcctgctgagacggagagaggactggcctagcagactgcagatgttcttcgccaataaccacgaccaggagttcgacccccctaaggtgtaccctcccgtccccgccgagaagagaaagcccatccgggtcctgagcctgttcgatggcatcgccaccggtctgctggtgctgaaggacctgggcatccaggtggataggtacattgcctccgaggtgtgcgaggactccatcaccgtgggaatggtgcgtcatcagggcaagatcatgtacgtgggcgacgtgcggagcgtgacacagaagcatatccaggagtggggccctttcgacctggtgatcggcggcagcccttgcaatgacctgagcatcgtgaacccagcccggaagggcctgtacgagggaaccggcagactgttcttcgagttttacagactgctgcacgacgcccggcctaaggaaggcgacgaccggcccttcttttggctgttcgagaatgtggtggccatgggagtcagcgacaagcgggatattagccggttcctggagagcaaccccgtgatgatcgatgccaaggaagtgagcgccgcccaccgggccagatacttctggggcaatctgcctggcatgaacagacccctggccagcaccgtgaacgacaagctggagctgcaggagtgcctggagcacggccggatcgccaagttcagcaaggtgagaaccatcaccacccgaagcaacagcatcaaacaaggcaaggaccagcactttcctgtgttcatgaacgagaaggaggacatcctgtggtgtaccgagatggagagagtgttcgggttcccagtccactacacagatgtcagcaacatgtctagactggccagacagagactgctgggaagaagctggtccgtccctgtgatcagacacctgttcgcccctctgaaggagtacttcgcctgcgtgagcagcggcaacagcaacgccaacagccggggccccagcttctctagcggcctggtgccactgtccctgagagggagccacatgggccccatggagatctacaaaaccgtgagcgcctggaagcggcagcctgtgcgcgtgctgagcctgtttcggaatatcgataaagtcctgaaaagcctgggattcctggagagcggctctggctccggcggtggcaccctgaagtacgtggaggatgtgacaaacgtggtcagacgggatgtggagaagtggggccccttcgatctggtgtacggcagcacccaacccctgggcagctcttgtgaccggtgccctggctggtacatgtttcagttccaccggatcctgcagtacgccctgccgagacaggagtcccagcggccattcttttggattttcatggacaacttgctgctgaccgaggatgaccaggaaactaccactcggttcctgcagaccgaagccgtgaccctgcaggacgtgagaggccgggactaccagaacgccatgcgggtgtggtccaacatccctggactgaaaagcaagcacgcacctctgacccctaaagaagaggagtacctgcaggcccaggtgcggagcagaagcaagctggacgcccctaaggtggatctgctggtgaagaattgcctcctgcccctgagagagtacttcaagtatttcagccagaatagtctgcccctgggaggcagcggcggcggcgccctggtgacatttgaggacgtcgccgtgcggttcacccaggaggaatgggctctgctggatccttctcagaaaatcctgtaccgggacgtgatgagagagacataccggaatctgacctccgtgggcatcaactgggaatgttgggaccttgaagcctgcttcagaagcctgggaagaaacctgagagtgcaggtggtgaagagaaagtgcgagctgaccaacagcggcccctgcgccgagggcggcccaagcagcggcgcccctcctcccagcggcggcagcccagccggctccccaacctctaccgaggagggcacctctgagtccgccacccccgagagcggccctggcacctccaccgagcccagcgagggcagcgcacccggcagccctgccggcagccccacctccacagaggagggaaccagcaccgagcccagcgaaggcagcgccccaggcaccagcaccgagcctagtgagcaggagattaaacggatcaacaagatcagaagaagacttgtgaaagacagcaacaccaagaaggccggcaagacaggccccatgaaaaccctgctggttagagtgatgacacccgatctgagagagcggctggaaaacctgagaaagaagcctgaaaatatcccccagcccatcagcaatacatctagagccaacctgaataagctgctgaccgattacaccgaaatgaagaaggcgatcctgcatgtgtactgggaagagttccagaaggaccctgtgggcctgatgagccgggtggcccagcctgccagcaagaagatcgatcagaacaagctgaaacctgagatggacgagaagggcaacctgaccaccgccggctttgcctgctctcagtgtggccagcccctgttcgtgtacaagctggagcaggtgtctgagaagggcaaggcttacaccaactacttcggacggtgcaatgtggccgagcacgaaaagctgatcctgctggcccagctgaagcccgagaaggatagcgacgaagccgtgacatatagcctgggaaagtttgggcagagggccctggatttctacagcattcatgtgaccaaggagtccacccaccccgtgaagcccctggcccagatcgccggaaacagatacgcctccggacctgtgggaaaggccctgagcgacgcatgtatgggcacaatcgcctccttcctgtctaagtaccaggacatcatcatcgaacaccagaaggtggtgaagggcaaccagaagagactggagagcctgcgggagctggccggcaaggaaaacctggaataccctagcgtgaccctgccacctcagcctcacaccaaggagggcgttgatgcctacaacgaagtgatcgcccgggtgcgaatgtgggtgaacctgaacctgtggcagaagctgaagctaagcagagatgatgccaagcctctgctgagactgaagggattcccttcctttcctctggtcgagagacaggccaacgaagtggactggtgggacatggtgtgtaacgtgaagaagctgatcaacgagaaaaaggaggatggcaaggtgttttggcagaatctggctggctacaagagacaggaagccctgagaccatacctgagcagcgaggaagatcggaagaagggaaagaaattcgctcggtaccagctgggcgacctgctgctgcacctggaaaagaagcacggcgaggactggggaaaggtgtacgacgaggcctgggagcggattgacaagaaagtggaaggcctgagcaagcacatcaagctggaagaggaacggagaagcgaggacgcccagagcaaggccgccctgaccgactggctgcgggctaaggccagcttcgtgatcgagggcctgaaggaggccgacaaggacgagttctgcagatgcgagctgaagctgcagaagtggtacggggacctgcggggaaagcccttcgccatcgaagccgagaacagcatcctggacatcagcggcttcagcaagcagtacaactgtgccttcatctggcagaaggacggcgtgaagaagctgaacctgtacctgatcatcaactacttcaagggcggcaagctgcggttcaagaagatcaaacctgaagccttcgaagccaacagattctacaccgtgatcaacaaaaagagcggcgagatcgtgcccatggaggtgaacttcaacttcgacgaccccaacctgatcatcctgcctctggcctttggcaagagacagggcagagaattcatctggaacgacctgctgtccctggaaaccggcagcctgaagctggccaacggaagagtgatcgagaagacactgtacaacagaagaacccggcaggatgagcctgccctgttcgtggccctgaccttcgagcggcgggaggtcctggactcctccaatatcaaaccaatgaacctgatcggcgtggcaagaggcgaaaacatccccgccgtgatcgccctgaccgaccccgagggctgcccactgagccggtttaaggatagcctgggaaacccaacccacatcctgagaatcggcgagagctataaggagaagcagcggaccatccaggccaagaaggaggtggagcagcggagagccggcggctacagccggaagtacgccagcaaagccaagaatctggcagacgatatggtgagaaacaccgctagagatctgctgtactacgccgtgacccaggatgccatgctgatcttcgccaacctgagccggggcttcggccggcagggcaagcggaccttcatggccgagagacagtacacacggatggaggactggctgaccgccaagctggcctacgagggcctgagcaagacctacctgtccaagacactggcccagtacacctccaagacatgcagcaactgtgggtttaccatcaccagcgccgactacgacagggtgctggagaagctgaagaagacagcaacaggctggatgaccacaattaacggcaaggagctgaaggtggagggccagattacctactacaacagatacaagagacagaacgtagtcaaggacctgtccgtcgagctggatagactgagcgaagaatctgtgaacaacgacatctcctcctggacaaagggcagaagcggagaagctctgagcctcctgaagaaaagattctcccatagacccgtgcaggagaagttcgtgtgcctgaactgcggcttcgagacacacgcagccgagcaagccgccctgaacatcgccagatcctggctgttcctgcggagccaggagtacaagaaataccagacaaacaagacaaccggcaacaccgataagagagccttcgtcgagacctggcagtccttttaccggaagaagcttaaggaggtgtggaaacctgccgtgcggtctggcggatctggcggaggctccatgggcccccagggcgccaggaggcaggccttcctggccttcggcgacgtgaccgtggacttcacccagaaggagtggaggctgctgagccccacccagagggccctgtacagggaggtgaccctggagaactacagccacctggtgagcctgggcatcctgcacagcaagcccgagctgatcaggaggctggagcagggcgaggccccctggggcgaggagaggaggaggaggcccggccccggcggcccaagcagcggcgcccctcctcccagcggcggcagcccagccggctccccaacctctaccgaggagggcacctctgagtccgccacccccgagagcggccctggcacctccaccgagcccagcgagggcagcgcacccggcagccctgccggcagccccacctccacagaggagggaaccagcaccgagcccagcgaaggcagcgccccaggcaccagcaccgagcctagtgagcaggagattaaacggatcaacaagatcagaagaagacttgtgaaagacagcaacaccaagaaggccggcaagacaggccccatgaaaaccctgctggttagagtgatgacacccgatctgagagagcggctggaaaacctgagaaagaagcctgaaaatatcccccagcccatcagcaatacatctagagccaacctgaataagctgctgaccgattacaccgaaatgaagaaggcgatcctgcatgtgtactgggaagagttccagaaggaccctgtgggcctgatgagccgggtggcccagcctgccagcaagaagatcgatcagaacaagctgaaacctgagatggacgagaagggcaacctgaccaccgccggctttgcctgctctcagtgtggccagcccctgttcgtgtacaagctggagcaggtgtctgagaagggcaaggcttacaccaactacttcggacggtgcaatgtggccgagcacgaaaagctgatcctgctggcccagctgaagcccgagaaggatagcgacgaagccgtgacatatagcctgggaaagtttgggcagagggccctggatttctacagcattcatgtgaccaaggagtccacccaccccgtgaagcccctggcccagatcgccggaaacagatacgcctccggacctgtgggaaaggccctgagcgacgcatgtatgggcacaatcgcctccttcctgtctaagtaccaggacatcatcatcgaacaccagaaggtggtgaagggcaaccagaagagactggagagcctgcgggagctggccggcaaggaaaacctggaataccctagcgtgaccctgccacctcagcctcacaccaaggagggcgttgatgcctacaacgaagtgatcgcccgggtgcgaatgtgggtgaacctgaacctgtggcagaagctgaagctaagcagagatgatgccaagcctctgctgagactgaagggattcccttcctttcctctggtcgagagacaggccaacgaagtggactggtgggacatggtgtgtaacgtgaagaagctgatcaacgagaaaaaggaggatggcaaggtgttttggcagaatctggctggctacaagagacaggaagccctgagaccatacctgagcagcgaggaagatcggaagaagggaaagaaattcgctcggtaccagctgggcgacctgctgctgcacctggaaaagaagcacggcgaggactggggaaaggtgtacgacgaggcctgggagcggattgacaagaaagtggaaggcctgagcaagcacatcaagctggaagaggaacggagaagcgaggacgcccagagcaaggccgccctgaccgactggctgcgggctaaggccagcttcgtgatcgagggcctgaaggaggccgacaaggacgagttctgcagatgcgagctgaagctgcagaagtggtacggggacctgcggggaaagcccttcgccatcgaagccgagaacagcatcctggacatcagcggcttcagcaagcagtacaactgtgccttcatctggcagaaggacggcgtgaagaagctgaacctgtacctgatcatcaactacttcaagggcggcaagctgcggttcaagaagatcaaacctgaagccttcgaagccaacagattctacaccgtgatcaacaaaaagagcggcgagatcgtgcccatggaggtgaacttcaacttcgacgaccccaacctgatcatcctgcctctggcctttggcaagagacagggcagagaattcatctggaacgacctgctgtccctggaaaccggcagcctgaagctggccaacggaagagtgatcgagaagacactgtacaacagaagaacccggcaggatgagcctgccctgttcgtggccctgaccttcgagcggcgggaggtcctggactcctccaatatcaaaccaatgaacctgatcggcgtggcaagaggcgaaaacatccccgccgtgatcgccctgaccgaccccgagggctgcccactgagccggtttaaggatagcctgggaaacccaacccacatcctgagaatcggcgagagctataaggagaagcagcggaccatccaggccaagaaggaggtggagcagcggagagccggcggctacagccggaagtacgccagcaaagccaagaatctggcagacgatatggtgagaaacaccgctagagatctgctgtactacgccgtgacccaggatgccatgctgatcttcgccaacctgagccggggcttcggccggcagggcaagcggaccttcatggccgagagacagtacacacggatggaggactggctgaccgccaagctggcctacgagggcctgagcaagacctacctgtccaagacactggcccagtacacctccaagacatgcagcaactgtgggtttaccatcaccagcgccgactacgacagggtgctggagaagctgaagaagacagcaacaggctggatgaccacaattaacggcaaggagctgaaggtggagggccagattacctactacaacagatacaagagacagaacgtagtcaaggacctgtccgtcgagctggatagactgagcgaagaatctgtgaacaacgacatctcctcctggacaaagggcagaagcggagaagctctgagcctcctgaagaaaagattctcccatagacccgtgcaggagaagttcgtgtgcctgaactgcggcttcgagacacacgcagccgagcaagccgccctgaacatcgccagatcctggctgttcctgcggagccaggagtacaagaaataccagacaaacaagacaaccggcaacaccgataagagagccttcgtcgagacctggcagtccttttaccggaagaagcttaaggaggtgtggaaacctgccgtgcggtctggcggatctggcggaggctcctatgggcccccagggcgccaggaggcaggccttcctggccttcggcgacgtgaccgtggacttcacccagaaggagtggaggctgctgagccccacccagagggccctgtacagggaggtgaccctggagaactacagccacctggtgagcctgggcatcctgcacagcaagcccgagctgatcaggaggctggagcagggcgaggccccctggggcgaggagaggaggaggaggcccggccccggatctggctccggcagcggccccaagaaaaagagaaaagtctaagctgccttctgcggggcttgccttctggccatgcccttcttctctcccttgcacctgtacctcttggtctttgaataaagcctgagtaggaaggctagcaaaaaaaaaaaaaaaaaaaaaaaaaaaaaaaaaaaaaaaaaaaaaaaaaaaaaaaaaaaaaaaaaaaaaaaaaaaaaaaa

SEQ ID NO: 16483 - RNA, 9485 nt, synthetic construct
  source 1..9485: mol_type = other RNA
aggaaataagagagaaaagaagagtaagaagaaatataagagccaccatggcccctaagaagaagcgtaaagtgagccggatggaacgcctcgtctacgaggtgcggcagaagtgcagaaacatcgaggacatctgcatctcctgcggatctctgaacgtgaccctggagcacccactgttcatcggcggcatgtgccagaactgtaaaaactgttttctggagtgtgcctatcaatacgacgatgacggctaccagagctactgcaccatctgttgcggcggaagagaggtgctgatgtgtggaaataacaactgctgccggtgcttctgcgtggaatgcgtggacctgctggtgggccccggcgccgcccaggccgctattaaggaagatccttggaactgctacatgtgcggccacaagggcacatacggcctgctgagacggagagaggactggcctagcagactgcagatgttcttcgccaataaccacgaccaggagttcgacccccctaaggtgtaccctcccgtccccgccgagaagagaaagcccatccgggtcctgagcctgttcgatggcatcgccaccggtctgctggtgctgaaggacctgggcatccaggtggataggtacattgcctccgaggtgtgcgaggactccatcaccgtgggaatggtgcgtcatcagggcaagatcatgtacgtgggcgacgtgcggagcgtgacacagaagcatatccaggagtggggccctttcgacctggtgatcggcggcagcccttgcaatgacctgagcatcgtgaacccagcccggaagggcctgtacgagggaaccggcagactgttcttcgagttttacagactgctgcacgacgcccggcctaaggaaggcgacgaccggcccttcttttggctgttcgagaatgtggtggccatgggagtcagcgacaagcgggatattagccggttcctggagagcaaccccgtgatgatcgatgccaaggaagtgagcgccgcccaccgggccagatacttctggggcaatctgcctggcatgaacagacccctggccagcaccgtgaacgacaagctggagctgcaggagtgcctggagcacggccggatcgccaagttcagcaaggtgagaaccatcaccacccgaagcaacagcatcaaacaaggcaaggaccagcactttcctgtgttcatgaacgagaaggaggacatcctgtggtgtaccgagatggagagagtgttcgggttcccagtccactacacagatgtcagcaacatgtctagactggccagacagagactgctgggaagaagctggtccgtccctgtgatcagacacctgttcgcccctctgaaggagtacttcgcctgcgtgagcagcggcaacagcaacgccaacagccggggccccagcttctctagcggcctggtgccactgtccctgagagggagccacatgggccccatggagatctacaaaaccgtgagcgcctggaagcggcagcctgtgcgcgtgctgagcctgtttcggaatatcgataaagtcctgaaaagcctgggattcctggagagcggctctggctccggcggtggcaccctgaagtacgtggaggatgtgacaaacgtggtcagacgggatgtggagaagtggggccccttcgatctggtgtacggcagcacccaacccctgggcagctcttgtgaccggtgccctggctggtacatgtttcagttccaccggatcctgcagtacgccctgccgagacaggagtcccagcggccattcttttggattttcatggacaacttgctgctgaccgaggatgaccaggaaactaccactcggttcctgcagaccgaagccgtgaccctgcaggacgtgagaggccgggactaccagaacgccatgcgggtgtggtccaacatccctggactgaaaagcaagcacgcacctctgacccctaaagaagaggagtacctgcaggcccaggtgcggagcagaagcaagctggacgcccctaaggtggatctgctggtgaagaattgcctcctgcccctgagagagtacttcaagtatttcagccagaatagtctgcccctgggaggcagcggcggcggcgccctggtgacatttgaggacgtcgccgtgcggttcacccaggaggaatgggctctgctggatccttctcagaaaatcctgtaccgggacgtgatgagagagacataccggaatctgacctccgtgggcatcaactgggaatgttgggaccttgaagcctgcttcagaagcctgggaagaaacctgagagtgcaggtggtgaagagaaagtgcgagctgaccaacagcggcccctgcgccgagggcggcccaagcagcggcgcccctcctcccagcggcggcagcccagccggctccccaacctctaccgaggagggcacctctgagtccgccacccccgagagcggccctggcacctccaccgagcccagcgagggcagcgcacccggcagccctgccggcagccccacctccacagaggagggaaccagcaccgagcccagcgaaggcagcgccccaggcaccagcaccgagcctagtgagcaggagattaaacggatcaacaagatcagaagaagacttgtgaaagacagcaacaccaagaaggccggcaagacaggccccatgaaaaccctgctggttagagtgatgacacccgatctgagagagcggctggaaaacctgagaaagaagcctgaaaatatcccccagcccatcagcaatacatctagagccaacctgaataagctgctgaccgattacaccgaaatgaagaaggcgatcctgcatgtgtactgggaagagttccagaaggaccctgtgggcctgatgagccgggtggcccagcctgccagcaagaagatcgatcagaacaagctgaaacctgagatggacgagaagggcaacctgaccaccgccggctttgcctgctctcagtgtggccagcccctgttcgtgtacaagctggagcaggtgtctgagaagggcaaggcttacaccaactacttcggacggtgcaatgtggccgagcacgaaaagctgatcctgctggcccagctgaagcccgagaaggatagcgacgaagccgtgacatatagcctgggaaagtttgggcagagggccctggatttctacagcattcatgtgaccaaggagtccacccaccccgtgaagcccctggcccagatcgccggaaacagatacgcctccggacctgtgggaaaggccctgagcgacgcatgtatgggcacaatcgcctccttcctgtctaagtaccaggacatcatcatcgaacaccagaaggtggtgaagggcaaccagaagagactggagagcctgcgggagctggccggcaaggaaaacctggaataccctagcgtgaccctgccacctcagcctcacaccaaggagggcgttgatgcctacaacgaagtgatcgcccgggtgcgaatgtgggtgaacctgaacctgtggcagaagctgaagctaagcagagatgatgccaagcctctgctgagactgaagggattcccttcctttcctctggtcgagagacaggccaacgaagtggactggtgggacatggtgtgtaacgtgaagaagctgatcaacgagaaaaaggaggatggcaaggtgttttggcagaatctggctggctacaagagacaggaagccctgagaccatacctgagcagcgaggaagatcggaagaagggaaagaaattcgctcggtaccagctgggcgacctgctgctgcacctggaaaagaagcacggcgaggactggggaaaggtgtacgacgaggcctgggagcggattgacaagaaagtggaaggcctgagcaagcacatcaagctggaagaggaacggagaagcgaggacgcccagagcaaggccgccctgaccgactggctgcgggctaaggccagcttcgtgatcgagggcctgaaggaggccgacaaggacgagttctgcagatgcgagctgaagctgcagaagtggtacggggacctgcggggaaagcccttcgccatcgaagccgagaacagcatcctggacatcagcggcttcagcaagcagtacaactgtgccttcatctggcagaaggacggcgtgaagaagctgaacctgtacctgatcatcaactacttcaagggcggcaagctgcggttcaagaagatcaaacctgaagccttcgaagccaacagattctacaccgtgatcaacaaaaagagcggcgagatcgtgcccatggaggtgaacttcaacttcgacgaccccaacctgatcatcctgcctctggcctttggcaagagacagggcagagaattcatctggaacgacctgctgtccctggaaaccggcagcctgaagctggccaacggaagagtgatcgagaagacactgtacaacagaagaacccggcaggatgagcctgccctgttcgtggccctgaccttcgagcggcgggaggtcctggactcctccaatatcaaaccaatgaacctgatcggcgtggcaagaggcgaaaacatccccgccgtgatcgccctgaccgaccccgagggctgcccactgagccggtttaaggatagcctgggaaacccaacccacatcctgagaatcggcgagagctataaggagaagcagcggaccatccaggccaagaaggaggtggagcagcggagagccggcggctacagccggaagtacgccagcaaagccaagaatctggcagacgatatggtgagaaacaccgctagagatctgctgtactacgccgtgacccaggatgccatgctgatcttcgccaacctgagccggggcttcggccggcagggcaagcggaccttcatggccgagagacagtacacacggatggaggactggctgaccgccaagctggcctacgagggcctgagcaagacctacctgtccaagacactggcccagtacacctccaagacatgcagcaactgtgggtttaccatcaccagcgccgactacgacagggtgctggagaagctgaagaagacagcaacaggctggatgaccacaattaacggcaaggagctgaaggtggagggccagattacctactacaacagatacaagagacagaacgtagtcaaggacctgtccgtcgagctggatagactgagcgaagaatctgtgaacaacgacatctcctcctggacaaagggcagaagcggagaagctctgagcctcctgaagaaaagattctcccatagacccgtgcaggagaagttcgtgtgcctgaactgcggcttcgagacacacgcagccgagcaagccgccctgaacatcgccagatcctggctgttcctgcggagccaggagtacaagaaataccagacaaacaagacaaccggcaacaccgataagagagccttcgtcgagacctggcagtccttttaccggaagaagcttaaggaggtgtggaaacctgccgtgcggtctggcggatctggcggaggctccagccaggtgagcgtgaccttcgaggacgtggccgtgctgttcagcagggacgagtggaggaggctgggccccagccagaagaacctgtaccaggacgtgatgctggagaactacagcaacctggtgagcctgggcctgcccttcagcaagcccaaggtgatcagcctgctgcagcagggcgaggacccctggaaggtggagaaggagagccccggcagcttccccggctgcaagagcagccccggcggcccaagcagcggcgcccctcctcccagcggcggcagcccagccggctccccaacctctaccgaggagggcacctctgagtccgccacccccgagagcggccctggcacctccaccgagcccagcgagggcagcgcacccggcagccctgccggcagccccacctccacagaggagggaaccagcaccgagcccagcgaaggcagcgccccaggcaccagcaccgagcctagtgagcaggagattaaacggatcaacaagatcagaagaagacttgtgaaagacagcaacaccaagaaggccggcaagacaggccccatgaaaaccctgctggttagagtgatgacacccgatctgagagagcggctggaaaacctgagaaagaagcctgaaaatatcccccagcccatcagcaatacatctagagccaacctgaataagctgctgaccgattacaccgaaatgaagaaggcgatcctgcatgtgtactgggaagagttccagaaggaccctgtgggcctgatgagccgggtggcccagcctgccagcaagaagatcgatcagaacaagctgaaacctgagatggacgagaagggcaacctgaccaccgccggctttgcctgctctcagtgtggccagcccctgttcgtgtacaagctggagcaggtgtctgagaagggcaaggcttacaccaactacttcggacggtgcaatgtggccgagcacgaaaagctgatcctgctggcccagctgaagcccgagaaggatagcgacgaagccgtgacatatagcctgggaaagtttgggcagagggccctggatttctacagcattcatgtgaccaaggagtccacccaccccgtgaagcccctggcccagatcgccggaaacagatacgcctccggacctgtgggaaaggccctgagcgacgcatgtatgggcacaatcgcctccttcctgtctaagtaccaggacatcatcatcgaacaccagaaggtggtgaagggcaaccagaagagactggagagcctgcgggagctggccggcaaggaaaacctggaataccctagcgtgaccctgccacctcagcctcacaccaaggagggcgttgatgcctacaacgaagtgatcgcccgggtgcgaatgtgggtgaacctgaacctgtggcagaagctgaagctaagcagagatgatgccaagcctctgctgagactgaagggattcccttcctttcctctggtcgagagacaggccaacgaagtggactggtgggacatggtgtgtaacgtgaagaagctgatcaacgagaaaaaggaggatggcaaggtgttttggcagaatctggctggctacaagagacaggaagccctgagaccatacctgagcagcgaggaagatcggaagaagggaaagaaattcgctcggtaccagctgggcgacctgctgctgcacctggaaaagaagcacggcgaggactggggaaaggtgtacgacgaggcctgggagcggattgacaagaaagtggaaggcctgagcaagcacatcaagctggaagaggaacggagaagcgaggacgcccagagcaaggccgccctgaccgactggctgcgggctaaggccagcttcgtgatcgagggcctgaaggaggccgacaaggacgagttctgcagatgcgagctgaagctgcagaagtggtacggggacctgcggggaaagcccttcgccatcgaagccgagaacagcatcctggacatcagcggcttcagcaagcagtacaactgtgccttcatctggcagaaggacggcgtgaagaagctgaacctgtacctgatcatcaactacttcaagggcggcaagctgcggttcaagaagatcaaacctgaagccttcgaagccaacagattctacaccgtgatcaacaaaaagagcggcgagatcgtgcccatggaggtgaacttcaacttcgacgaccccaacctgatcatcctgcctctggcctttggcaagagacagggcagagaattcatctggaacgacctgctgtccctggaaaccggcagcctgaagctggccaacggaagagtgatcgagaagacactgtacaacagaagaacccggcaggatgagcctgccctgttcgtggccctgaccttcgagcggcgggaggtcctggactcctccaatatcaaaccaatgaacctgatcggcgtggcaagaggcgaaaacatccccgccgtgatcgccctgaccgaccccgagggctgcccactgagccggtttaaggatagcctgggaaacccaacccacatcctgagaatcggcgagagctataaggagaagcagcggaccatccaggccaagaaggaggtggagcagcggagagccggcggctacagccggaagtacgccagcaaagccaagaatctggcagacgatatggtgagaaacaccgctagagatctgctgtactacgccgtgacccaggatgccatgctgatcttcgccaacctgagccggggcttcggccggcagggcaagcggaccttcatggccgagagacagtacacacggatggaggactggctgaccgccaagctggcctacgagggcctgagcaagacctacctgtccaagacactggcccagtacacctccaagacatgcagcaactgtgggtttaccatcaccagcgccgactacgacagggtgctggagaagctgaagaagacagcaacaggctggatgaccacaattaacggcaaggagctgaaggtggagggccagattacctactacaacagatacaagagacagaacgtagtcaaggacctgtccgtcgagctggatagactgagcgaagaatctgtgaacaacgacatctcctcctggacaaagggcagaagcggagaagctctgagcctcctgaagaaaagattctcccatagacccgtgcaggagaagttcgtgtgcctgaactgcggcttcgagacacacgcagccgagcaagccgccctgaacatcgccagatcctggctgttcctgcggagccaggagtacaagaaataccagacaaacaagacaaccggcaacaccgataagagagccttcgtcgagacctggcagtccttttaccggaagaagcttaaggaggtgtggaaacctgccgtgcggtctggcggatctggcggaggctcctagccaggtgagcgtgaccttcgaggacgtggccgtgctgttcagcagggacgagtggaggaggctgggccccagccagaagaacctgtaccaggacgtgatgctggagaactacagcaacctggtgagcctgggcctgcccttcagcaagcccaaggtgatcagcctgctgcagcagggcgaggacccctggaaggtggagaaggagagccccggcagcttccccggctgcaagagcagccccggatctggctccggcagcggccccaagaaaaagagaaaagtctaagctgccttctgcggggcttgccttctggccatgcccttcttctctcccttgcacctgtacctcttggtctttgaataaagcctgagtaggaaggctagcaaaaaaaaaaaaaaaaaaaaaaaaaaaaaaaaaaaaaaaaaaaaaaaaaaaaaaaaaaaaaaaaaaaaaaaaaaaaaaaa

SEQ ID NO: 16484 - RNA, 9485 nt, synthetic construct
  source 1..9485: mol_type = other RNA
aggaaataagagagaaaagaagagtaagaagaaatataagagccaccatggcccctaagaagaagcgtaaagtgagccggatggaacgcctcgtctacgaggtgcggcagaagtgcagaaacatcgaggacatctgcatctcctgcggatctctgaacgtgaccctggagcacccactgttcatcggcggcatgtgccagaactgtaaaaactgttttctggagtgtgcctatcaatacgacgatgacggctaccagagctactgcaccatctgttgcggcggaagagaggtgctgatgtgtggaaataacaactgctgccggtgcttctgcgtggaatgcgtggacctgctggtgggccccggcgccgcccaggccgctattaaggaagatccttggaactgctacatgtgcggccacaagggcacatacggcctgctgagacggagagaggactggcctagcagactgcagatgttcttcgccaataaccacgaccaggagttcgacccccctaaggtgtaccctcccgtccccgccgagaagagaaagcccatccgggtcctgagcctgttcgatggcatcgccaccggtctgctggtgctgaaggacctgggcatccaggtggataggtacattgcctccgaggtgtgcgaggactccatcaccgtgggaatggtgcgtcatcagggcaagatcatgtacgtgggcgacgtgcggagcgtgacacagaagcatatccaggagtggggccctttcgacctggtgatcggcggcagcccttgcaatgacctgagcatcgtgaacccagcccggaagggcctgtacgagggaaccggcagactgttcttcgagttttacagactgctgcacgacgcccggcctaaggaaggcgacgaccggcccttcttttggctgttcgagaatgtggtggccatgggagtcagcgacaagcgggatattagccggttcctggagagcaaccccgtgatgatcgatgccaaggaagtgagcgccgcccaccgggccagatacttctggggcaatctgcctggcatgaacagacccctggccagcaccgtgaacgacaagctggagctgcaggagtgcctggagcacggccggatcgccaagttcagcaaggtgagaaccatcaccacccgaagcaacagcatcaaacaaggcaaggaccagcactttcctgtgttcatgaacgagaaggaggacatcctgtggtgtaccgagatggagagagtgttcgggttcccagtccactacacagatgtcagcaacatgtctagactggccagacagagactgctgggaagaagctggtccgtccctgtgatcagacacctgttcgcccctctgaaggagtacttcgcctgcgtgagcagcggcaacagcaacgccaacagccggggccccagcttctctagcggcctggtgccactgtccctgagagggagccacatgggccccatggagatctacaaaaccgtgagcgcctggaagcggcagcctgtgcgcgtgctgagcctgtttcggaatatcgataaagtcctgaaaagcctgggattcctggagagcggctctggctccggcggtggcaccctgaagtacgtggaggatgtgacaaacgtggtcagacgggatgtggagaagtggggccccttcgatctggtgtacggcagcacccaacccctgggcagctcttgtgaccggtgccctggctggtacatgtttcagttccaccggatcctgcagtacgccctgccgagacaggagtcccagcggccattcttttggattttcatggacaacttgctgctgaccgaggatgaccaggaaactaccactcggttcctgcagaccgaagccgtgaccctgcaggacgtgagaggccgggactaccagaacgccatgcgggtgtggtccaacatccctggactgaaaagcaagcacgcacctctgacccctaaagaagaggagtacctgcaggcccaggtgcggagcagaagcaagctggacgcccctaaggtggatctgctggtgaagaattgcctcctgcccctgagagagtacttcaagtatttcagccagaatagtctgcccctgggaggcagcggcggcggcgccctggtgacatttgaggacgtcgccgtgcggttcacccaggaggaatgggctctgctggatccttctcagaaaatcctgtaccgggacgtgatgagagagacataccggaatctgacctccgtgggcatcaactgggaatgttgggaccttgaagcctgcttcagaagcctgggaagaaacctgagagtgcaggtggtgaagagaaagtgcgagctgaccaacagcggcccctgcgccgagggcggcccaagcagcggcgcccctcctcccagcggcggcagcccagccggctccccaacctctaccgaggagggcacctctgagtccgccacccccgagagcggccctggcacctccaccgagcccagcgagggcagcgcacccggcagccctgccggcagccccacctccacagaggagggaaccagcaccgagcccagcgaaggcagcgccccaggcaccagcaccgagcctagtgagcaggagattaaacggatcaacaagatcagaagaagacttgtgaaagacagcaacaccaagaaggccggcaagacaggccccatgaaaaccctgctggttagagtgatgacacccgatctgagagagcggctggaaaacctgagaaagaagcctgaaaatatcccccagcccatcagcaatacatctagagccaacctgaataagctgctgaccgattacaccgaaatgaagaaggcgatcctgcatgtgtactgggaagagttccagaaggaccctgtgggcctgatgagccgggtggcccagcctgccagcaagaagatcgatcagaacaagctgaaacctgagatggacgagaagggcaacctgaccaccgccggctttgcctgctctcagtgtggccagcccctgttcgtgtacaagctggagcaggtgtctgagaagggcaaggcttacaccaactacttcggacggtgcaatgtggccgagcacgaaaagctgatcctgctggcccagctgaagcccgagaaggatagcgacgaagccgtgacatatagcctgggaaagtttgggcagagggccctggatttctacagcattcatgtgaccaaggagtccacccaccccgtgaagcccctggcccagatcgccggaaacagatacgcctccggacctgtgggaaaggccctgagcgacgcatgtatgggcacaatcgcctccttcctgtctaagtaccaggacatcatcatcgaacaccagaaggtggtgaagggcaaccagaagagactggagagcctgcgggagctggccggcaaggaaaacctggaataccctagcgtgaccctgccacctcagcctcacaccaaggagggcgttgatgcctacaacgaagtgatcgcccgggtgcgaatgtgggtgaacctgaacctgtggcagaagctgaagctaagcagagatgatgccaagcctctgctgagactgaagggattcccttcctttcctctggtcgagagacaggccaacgaagtggactggtgggacatggtgtgtaacgtgaagaagctgatcaacgagaaaaaggaggatggcaaggtgttttggcagaatctggctggctacaagagacaggaagccctgagaccatacctgagcagcgaggaagatcggaagaagggaaagaaattcgctcggtaccagctgggcgacctgctgctgcacctggaaaagaagcacggcgaggactggggaaaggtgtacgacgaggcctgggagcggattgacaagaaagtggaaggcctgagcaagcacatcaagctggaagaggaacggagaagcgaggacgcccagagcaaggccgccctgaccgactggctgcgggctaaggccagcttcgtgatcgagggcctgaaggaggccgacaaggacgagttctgcagatgcgagctgaagctgcagaagtggtacggggacctgcggggaaagcccttcgccatcgaagccgagaacagcatcctggacatcagcggcttcagcaagcagtacaactgtgccttcatctggcagaaggacggcgtgaagaagctgaacctgtacctgatcatcaactacttcaagggcggcaagctgcggttcaagaagatcaaacctgaagccttcgaagccaacagattctacaccgtgatcaacaaaaagagcggcgagatcgtgcccatggaggtgaacttcaacttcgacgaccccaacctgatcatcctgcctctggcctttggcaagagacagggcagagaattcatctggaacgacctgctgtccctggaaaccggcagcctgaagctggccaacggaagagtgatcgagaagacactgtacaacagaagaacccggcaggatgagcctgccctgttcgtggccctgaccttcgagcggcgggaggtcctggactcctccaatatcaaaccaatgaacctgatcggcgtggcaagaggcgaaaacatccccgccgtgatcgccctgaccgaccccgagggctgcccactgagccggtttaaggatagcctgggaaacccaacccacatcctgagaatcggcgagagctataaggagaagcagcggaccatccaggccaagaaggaggtggagcagcggagagccggcggctacagccggaagtacgccagcaaagccaagaatctggcagacgatatggtgagaaacaccgctagagatctgctgtactacgccgtgacccaggatgccatgctgatcttcgccaacctgagccggggcttcggccggcagggcaagcggaccttcatggccgagagacagtacacacggatggaggactggctgaccgccaagctggcctacgagggcctgagcaagacctacctgtccaagacactggcccagtacacctccaagacatgcagcaactgtgggtttaccatcaccagcgccgactacgacagggtgctggagaagctgaagaagacagcaacaggctggatgaccacaattaacggcaaggagctgaaggtggagggccagattacctactacaacagatacaagagacagaacgtagtcaaggacctgtccgtcgagctggatagactgagcgaagaatctgtgaacaacgacatctcctcctggacaaagggcagaagcggagaagctctgagcctcctgaagaaaagattctcccatagacccgtgcaggagaagttcgtgtgcctgaactgcggcttcgagacacacgcagccgagcaagccgccctgaacatcgccagatcctggctgttcctgcggagccaggagtacaagaaataccagacaaacaagacaaccggcaacaccgataagagagccttcgtcgagacctggcagtccttttaccggaagaagcttaaggaggtgtggaaacctgccgtgcggtctggcggatctggcggaggctccaagcccggcaccgtgagcttcgccgacgtggccgtgtacttcagcagggaggagtggggctacctgaggcccgcccagagggccctgtacagggacgtgatgagggagacctactgccacctgggcgccctgggcgtgggcggcagcaagcccgccctgatcagctgggtggaggaggaggccgagctgtgggaccccgccgccagggaccccgaggtgaccaagggcctgaccgagaccgacggcggcccaagcagcggcgcccctcctcccagcggcggcagcccagccggctccccaacctctaccgaggagggcacctctgagtccgccacccccgagagcggccctggcacctccaccgagcccagcgagggcagcgcacccggcagccctgccggcagccccacctccacagaggagggaaccagcaccgagcccagcgaaggcagcgccccaggcaccagcaccgagcctagtgagcaggagattaaacggatcaacaagatcagaagaagacttgtgaaagacagcaacaccaagaaggccggcaagacaggccccatgaaaaccctgctggttagagtgatgacacccgatctgagagagcggctggaaaacctgagaaagaagcctgaaaatatcccccagcccatcagcaatacatctagagccaacctgaataagctgctgaccgattacaccgaaatgaagaaggcgatcctgcatgtgtactgggaagagttccagaaggaccctgtgggcctgatgagccgggtggcccagcctgccagcaagaagatcgatcagaacaagctgaaacctgagatggacgagaagggcaacctgaccaccgccggctttgcctgctctcagtgtggccagcccctgttcgtgtacaagctggagcaggtgtctgagaagggcaaggcttacaccaactacttcggacggtgcaatgtggccgagcacgaaaagctgatcctgctggcccagctgaagcccgagaaggatagcgacgaagccgtgacatatagcctgggaaagtttgggcagagggccctggatttctacagcattcatgtgaccaaggagtccacccaccccgtgaagcccctggcccagatcgccggaaacagatacgcctccggacctgtgggaaaggccctgagcgacgcatgtatgggcacaatcgcctccttcctgtctaagtaccaggacatcatcatcgaacaccagaaggtggtgaagggcaaccagaagagactggagagcctgcgggagctggccggcaaggaaaacctggaataccctagcgtgaccctgccacctcagcctcacaccaaggagggcgttgatgcctacaacgaagtgatcgcccgggtgcgaatgtgggtgaacctgaacctgtggcagaagctgaagctaagcagagatgatgccaagcctctgctgagactgaagggattcccttcctttcctctggtcgagagacaggccaacgaagtggactggtgggacatggtgtgtaacgtgaagaagctgatcaacgagaaaaaggaggatggcaaggtgttttggcagaatctggctggctacaagagacaggaagccctgagaccatacctgagcagcgaggaagatcggaagaagggaaagaaattcgctcggtaccagctgggcgacctgctgctgcacctggaaaagaagcacggcgaggactggggaaaggtgtacgacgaggcctgggagcggattgacaagaaagtggaaggcctgagcaagcacatcaagctggaagaggaacggagaagcgaggacgcccagagcaaggccgccctgaccgactggctgcgggctaaggccagcttcgtgatcgagggcctgaaggaggccgacaaggacgagttctgcagatgcgagctgaagctgcagaagtggtacggggacctgcggggaaagcccttcgccatcgaagccgagaacagcatcctggacatcagcggcttcagcaagcagtacaactgtgccttcatctggcagaaggacggcgtgaagaagctgaacctgtacctgatcatcaactacttcaagggcggcaagctgcggttcaagaagatcaaacctgaagccttcgaagccaacagattctacaccgtgatcaacaaaaagagcggcgagatcgtgcccatggaggtgaacttcaacttcgacgaccccaacctgatcatcctgcctctggcctttggcaagagacagggcagagaattcatctggaacgacctgctgtccctggaaaccggcagcctgaagctggccaacggaagagtgatcgagaagacactgtacaacagaagaacccggcaggatgagcctgccctgttcgtggccctgaccttcgagcggcgggaggtcctggactcctccaatatcaaaccaatgaacctgatcggcgtggcaagaggcgaaaacatccccgccgtgatcgccctgaccgaccccgagggctgcccactgagccggtttaaggatagcctgggaaacccaacccacatcctgagaatcggcgagagctataaggagaagcagcggaccatccaggccaagaaggaggtggagcagcggagagccggcggctacagccggaagtacgccagcaaagccaagaatctggcagacgatatggtgagaaacaccgctagagatctgctgtactacgccgtgacccaggatgccatgctgatcttcgccaacctgagccggggcttcggccggcagggcaagcggaccttcatggccgagagacagtacacacggatggaggactggctgaccgccaagctggcctacgagggcctgagcaagacctacctgtccaagacactggcccagtacacctccaagacatgcagcaactgtgggtttaccatcaccagcgccgactacgacagggtgctggagaagctgaagaagacagcaacaggctggatgaccacaattaacggcaaggagctgaaggtggagggccagattacctactacaacagatacaagagacagaacgtagtcaaggacctgtccgtcgagctggatagactgagcgaagaatctgtgaacaacgacatctcctcctggacaaagggcagaagcggagaagctctgagcctcctgaagaaaagattctcccatagacccgtgcaggagaagttcgtgtgcctgaactgcggcttcgagacacacgcagccgagcaagccgccctgaacatcgccagatcctggctgttcctgcggagccaggagtacaagaaataccagacaaacaagacaaccggcaacaccgataagagagccttcgtcgagacctggcagtccttttaccggaagaagcttaaggaggtgtggaaacctgccgtgcggtctggcggatctggcggaggctcctaagcccggcaccgtgagcttcgccgacgtggccgtgtacttcagcagggaggagtggggctacctgaggcccgcccagagggccctgtacagggacgtgatgagggagacctactgccacctgggcgccctgggcgtgggcggcagcaagcccgccctgatcagctgggtggaggaggaggccgagctgtgggaccccgccgccagggaccccgaggtgaccaagggcctgaccgagaccgacggatctggctccggcagcggccccaagaaaaagagaaaagtctaagctgccttctgcggggcttgccttctggccatgcccttcttctctcccttgcacctgtacctcttggtctttgaataaagcctgagtaggaaggctagcaaaaaaaaaaaaaaaaaaaaaaaaaaaaaaaaaaaaaaaaaaaaaaaaaaaaaaaaaaaaaaaaaaaaaaaaaaaaaaaa

SEQ ID NO: 16485 - RNA, 9485 nt, synthetic construct
  source 1..9485: mol_type = other RNA
aggaaataagagagaaaagaagagtaagaagaaatataagagccaccatggcccctaagaagaagcgtaaagtgagccggatggaacgcctcgtctacgaggtgcggcagaagtgcagaaacatcgaggacatctgcatctcctgcggatctctgaacgtgaccctggagcacccactgttcatcggcggcatgtgccagaactgtaaaaactgttttctggagtgtgcctatcaatacgacgatgacggctaccagagctactgcaccatctgttgcggcggaagagaggtgctgatgtgtggaaataacaactgctgccggtgcttctgcgtggaatgcgtggacctgctggtgggccccggcgccgcccaggccgctattaaggaagatccttggaactgctacatgtgcggccacaagggcacatacggcctgctgagacggagagaggactggcctagcagactgcagatgttcttcgccaataaccacgaccaggagttcgacccccctaaggtgtaccctcccgtccccgccgagaagagaaagcccatccgggtcctgagcctgttcgatggcatcgccaccggtctgctggtgctgaaggacctgggcatccaggtggataggtacattgcctccgaggtgtgcgaggactccatcaccgtgggaatggtgcgtcatcagggcaagatcatgtacgtgggcgacgtgcggagcgtgacacagaagcatatccaggagtggggccctttcgacctggtgatcggcggcagcccttgcaatgacctgagcatcgtgaacccagcccggaagggcctgtacgagggaaccggcagactgttcttcgagttttacagactgctgcacgacgcccggcctaaggaaggcgacgaccggcccttcttttggctgttcgagaatgtggtggccatgggagtcagcgacaagcgggatattagccggttcctggagagcaaccccgtgatgatcgatgccaaggaagtgagcgccgcccaccgggccagatacttctggggcaatctgcctggcatgaacagacccctggccagcaccgtgaacgacaagctggagctgcaggagtgcctggagcacggccggatcgccaagttcagcaaggtgagaaccatcaccacccgaagcaacagcatcaaacaaggcaaggaccagcactttcctgtgttcatgaacgagaaggaggacatcctgtggtgtaccgagatggagagagtgttcgggttcccagtccactacacagatgtcagcaacatgtctagactggccagacagagactgctgggaagaagctggtccgtccctgtgatcagacacctgttcgcccctctgaaggagtacttcgcctgcgtgagcagcggcaacagcaacgccaacagccggggccccagcttctctagcggcctggtgccactgtccctgagagggagccacatgggccccatggagatctacaaaaccgtgagcgcctggaagcggcagcctgtgcgcgtgctgagcctgtttcggaatatcgataaagtcctgaaaagcctgggattcctggagagcggctctggctccggcggtggcaccctgaagtacgtggaggatgtgacaaacgtggtcagacgggatgtggagaagtggggccccttcgatctggtgtacggcagcacccaacccctgggcagctcttgtgaccggtgccctggctggtacatgtttcagttccaccggatcctgcagtacgccctgccgagacaggagtcccagcggccattcttttggattttcatggacaacttgctgctgaccgaggatgaccaggaaactaccactcggttcctgcagaccgaagccgtgaccctgcaggacgtgagaggccgggactaccagaacgccatgcgggtgtggtccaacatccctggactgaaaagcaagcacgcacctctgacccctaaagaagaggagtacctgcaggcccaggtgcggagcagaagcaagctggacgcccctaaggtggatctgctggtgaagaattgcctcctgcccctgagagagtacttcaagtatttcagccagaatagtctgcccctgggaggcagcggcggcggcgccctggtgacatttgaggacgtcgccgtgcggttcacccaggaggaatgggctctgctggatccttctcagaaaatcctgtaccgggacgtgatgagagagacataccggaatctgacctccgtgggcatcaactgggaatgttgggaccttgaagcctgcttcagaagcctgggaagaaacctgagagtgcaggtggtgaagagaaagtgcgagctgaccaacagcggcccctgcgccgagggcggcccaagcagcggcgcccctcctcccagcggcggcagcccagccggctccccaacctctaccgaggagggcacctctgagtccgccacccccgagagcggccctggcacctccaccgagcccagcgagggcagcgcacccggcagccctgccggcagccccacctccacagaggagggaaccagcaccgagcccagcgaaggcagcgccccaggcaccagcaccgagcctagtgagcaggagattaaacggatcaacaagatcagaagaagacttgtgaaagacagcaacaccaagaaggccggcaagacaggccccatgaaaaccctgctggttagagtgatgacacccgatctgagagagcggctggaaaacctgagaaagaagcctgaaaatatcccccagcccatcagcaatacatctagagccaacctgaataagctgctgaccgattacaccgaaatgaagaaggcgatcctgcatgtgtactgggaagagttccagaaggaccctgtgggcctgatgagccgggtggcccagcctgccagcaagaagatcgatcagaacaagctgaaacctgagatggacgagaagggcaacctgaccaccgccggctttgcctgctctcagtgtggccagcccctgttcgtgtacaagctggagcaggtgtctgagaagggcaaggcttacaccaactacttcggacggtgcaatgtggccgagcacgaaaagctgatcctgctggcccagctgaagcccgagaaggatagcgacgaagccgtgacatatagcctgggaaagtttgggcagagggccctggatttctacagcattcatgtgaccaaggagtccacccaccccgtgaagcccctggcccagatcgccggaaacagatacgcctccggacctgtgggaaaggccctgagcgacgcatgtatgggcacaatcgcctccttcctgtctaagtaccaggacatcatcatcgaacaccagaaggtggtgaagggcaaccagaagagactggagagcctgcgggagctggccggcaaggaaaacctggaataccctagcgtgaccctgccacctcagcctcacaccaaggagggcgttgatgcctacaacgaagtgatcgcccgggtgcgaatgtgggtgaacctgaacctgtggcagaagctgaagctaagcagagatgatgccaagcctctgctgagactgaagggattcccttcctttcctctggtcgagagacaggccaacgaagtggactggtgggacatggtgtgtaacgtgaagaagctgatcaacgagaaaaaggaggatggcaaggtgttttggcagaatctggctggctacaagagacaggaagccctgagaccatacctgagcagcgaggaagatcggaagaagggaaagaaattcgctcggtaccagctgggcgacctgctgctgcacctggaaaagaagcacggcgaggactggggaaaggtgtacgacgaggcctgggagcggattgacaagaaagtggaaggcctgagcaagcacatcaagctggaagaggaacggagaagcgaggacgcccagagcaaggccgccctgaccgactggctgcgggctaaggccagcttcgtgatcgagggcctgaaggaggccgacaaggacgagttctgcagatgcgagctgaagctgcagaagtggtacggggacctgcggggaaagcccttcgccatcgaagccgagaacagcatcctggacatcagcggcttcagcaagcagtacaactgtgccttcatctggcagaaggacggcgtgaagaagctgaacctgtacctgatcatcaactacttcaagggcggcaagctgcggttcaagaagatcaaacctgaagccttcgaagccaacagattctacaccgtgatcaacaaaaagagcggcgagatcgtgcccatggaggtgaacttcaacttcgacgaccccaacctgatcatcctgcctctggcctttggcaagagacagggcagagaattcatctggaacgacctgctgtccctggaaaccggcagcctgaagctggccaacggaagagtgatcgagaagacactgtacaacagaagaacccggcaggatgagcctgccctgttcgtggccctgaccttcgagcggcgggaggtcctggactcctccaatatcaaaccaatgaacctgatcggcgtggcaagaggcgaaaacatccccgccgtgatcgccctgaccgaccccgagggctgcccactgagccggtttaaggatagcctgggaaacccaacccacatcctgagaatcggcgagagctataaggagaagcagcggaccatccaggccaagaaggaggtggagcagcggagagccggcggctacagccggaagtacgccagcaaagccaagaatctggcagacgatatggtgagaaacaccgctagagatctgctgtactacgccgtgacccaggatgccatgctgatcttcgccaacctgagccggggcttcggccggcagggcaagcggaccttcatggccgagagacagtacacacggatggaggactggctgaccgccaagctggcctacgagggcctgagcaagacctacctgtccaagacactggcccagtacacctccaagacatgcagcaactgtgggtttaccatcaccagcgccgactacgacagggtgctggagaagctgaagaagacagcaacaggctggatgaccacaattaacggcaaggagctgaaggtggagggccagattacctactacaacagatacaagagacagaacgtagtcaaggacctgtccgtcgagctggatagactgagcgaagaatctgtgaacaacgacatctcctcctggacaaagggcagaagcggagaagctctgagcctcctgaagaaaagattctcccatagacccgtgcaggagaagttcgtgtgcctgaactgcggcttcgagacacacgcagccgagcaagccgccctgaacatcgccagatcctggctgttcctgcggagccaggagtacaagaaataccagacaaacaagacaaccggcaacaccgataagagagccttcgtcgagacctggcagtccttttaccggaagaagcttaaggaggtgtggaaacctgccgtgcggtctggcggatctggcggaggctccatgttcagcgacgtgagcgtggacttcagccaggaggagtgggagtgcctggaccccggccagagggacctgtacagggacgtgatgctggagaactacagcaacctgctgagcatgggcctgtacatccccaagccccaggtgatcagcctgctggagcagggcaaggagccctggatggtgggcagggagctgaccaggggcctgtgcagcgacctggagagcatgtgcgagaccaagctgggcggcccaagcagcggcgcccctcctcccagcggcggcagcccagccggctccccaacctctaccgaggagggcacctctgagtccgccacccccgagagcggccctggcacctccaccgagcccagcgagggcagcgcacccggcagccctgccggcagccccacctccacagaggagggaaccagcaccgagcccagcgaaggcagcgccccaggcaccagcaccgagcctagtgagcaggagattaaacggatcaacaagatcagaagaagacttgtgaaagacagcaacaccaagaaggccggcaagacaggccccatgaaaaccctgctggttagagtgatgacacccgatctgagagagcggctggaaaacctgagaaagaagcctgaaaatatcccccagcccatcagcaatacatctagagccaacctgaataagctgctgaccgattacaccgaaatgaagaaggcgatcctgcatgtgtactgggaagagttccagaaggaccctgtgggcctgatgagccgggtggcccagcctgccagcaagaagatcgatcagaacaagctgaaacctgagatggacgagaagggcaacctgaccaccgccggctttgcctgctctcagtgtggccagcccctgttcgtgtacaagctggagcaggtgtctgagaagggcaaggcttacaccaactacttcggacggtgcaatgtggccgagcacgaaaagctgatcctgctggcccagctgaagcccgagaaggatagcgacgaagccgtgacatatagcctgggaaagtttgggcagagggccctggatttctacagcattcatgtgaccaaggagtccacccaccccgtgaagcccctggcccagatcgccggaaacagatacgcctccggacctgtgggaaaggccctgagcgacgcatgtatgggcacaatcgcctccttcctgtctaagtaccaggacatcatcatcgaacaccagaaggtggtgaagggcaaccagaagagactggagagcctgcgggagctggccggcaaggaaaacctggaataccctagcgtgaccctgccacctcagcctcacaccaaggagggcgttgatgcctacaacgaagtgatcgcccgggtgcgaatgtgggtgaacctgaacctgtggcagaagctgaagctaagcagagatgatgccaagcctctgctgagactgaagggattcccttcctttcctctggtcgagagacaggccaacgaagtggactggtgggacatggtgtgtaacgtgaagaagctgatcaacgagaaaaaggaggatggcaaggtgttttggcagaatctggctggctacaagagacaggaagccctgagaccatacctgagcagcgaggaagatcggaagaagggaaagaaattcgctcggtaccagctgggcgacctgctgctgcacctggaaaagaagcacggcgaggactggggaaaggtgtacgacgaggcctgggagcggattgacaagaaagtggaaggcctgagcaagcacatcaagctggaagaggaacggagaagcgaggacgcccagagcaaggccgccctgaccgactggctgcgggctaaggccagcttcgtgatcgagggcctgaaggaggccgacaaggacgagttctgcagatgcgagctgaagctgcagaagtggtacggggacctgcggggaaagcccttcgccatcgaagccgagaacagcatcctggacatcagcggcttcagcaagcagtacaactgtgccttcatctggcagaaggacggcgtgaagaagctgaacctgtacctgatcatcaactacttcaagggcggcaagctgcggttcaagaagatcaaacctgaagccttcgaagccaacagattctacaccgtgatcaacaaaaagagcggcgagatcgtgcccatggaggtgaacttcaacttcgacgaccccaacctgatcatcctgcctctggcctttggcaagagacagggcagagaattcatctggaacgacctgctgtccctggaaaccggcagcctgaagctggccaacggaagagtgatcgagaagacactgtacaacagaagaacccggcaggatgagcctgccctgttcgtggccctgaccttcgagcggcgggaggtcctggactcctccaatatcaaaccaatgaacctgatcggcgtggcaagaggcgaaaacatccccgccgtgatcgccctgaccgaccccgagggctgcccactgagccggtttaaggatagcctgggaaacccaacccacatcctgagaatcggcgagagctataaggagaagcagcggaccatccaggccaagaaggaggtggagcagcggagagccggcggctacagccggaagtacgccagcaaagccaagaatctggcagacgatatggtgagaaacaccgctagagatctgctgtactacgccgtgacccaggatgccatgctgatcttcgccaacctgagccggggcttcggccggcagggcaagcggaccttcatggccgagagacagtacacacggatggaggactggctgaccgccaagctggcctacgagggcctgagcaagacctacctgtccaagacactggcccagtacacctccaagacatgcagcaactgtgggtttaccatcaccagcgccgactacgacagggtgctggagaagctgaagaagacagcaacaggctggatgaccacaattaacggcaaggagctgaaggtggagggccagattacctactacaacagatacaagagacagaacgtagtcaaggacctgtccgtcgagctggatagactgagcgaagaatctgtgaacaacgacatctcctcctggacaaagggcagaagcggagaagctctgagcctcctgaagaaaagattctcccatagacccgtgcaggagaagttcgtgtgcctgaactgcggcttcgagacacacgcagccgagcaagccgccctgaacatcgccagatcctggctgttcctgcggagccaggagtacaagaaataccagacaaacaagacaaccggcaacaccgataagagagccttcgtcgagacctggcagtccttttaccggaagaagcttaaggaggtgtggaaacctgccgtgcggtctggcggatctggcggaggctcctatgttcagcgacgtgagcgtggacttcagccaggaggagtgggagtgcctggaccccggccagagggacctgtacagggacgtgatgctggagaactacagcaacctgctgagcatgggcctgtacatccccaagccccaggtgatcagcctgctggagcagggcaaggagccctggatggtgggcagggagctgaccaggggcctgtgcagcgacctggagagcatgtgcgagaccaagctgggatctggctccggcagcggccccaagaaaaagagaaaagtctaagctgccttctgcggggcttgccttctggccatgcccttcttctctcccttgcacctgtacctcttggtctttgaataaagcctgagtaggaaggctagcaaaaaaaaaaaaaaaaaaaaaaaaaaaaaaaaaaaaaaaaaaaaaaaaaaaaaaaaaaaaaaaaaaaaaaaaaaaaaaaa

SEQ ID NO: 16486 - RNA, 9485 nt, synthetic construct
  source 1..9485: mol_type = other RNA
aggaaataagagagaaaagaagagtaagaagaaatataagagccaccatggcccctaagaagaagcgtaaagtgagccggatggaacgcctcgtctacgaggtgcggcagaagtgcagaaacatcgaggacatctgcatctcctgcggatctctgaacgtgaccctggagcacccactgttcatcggcggcatgtgccagaactgtaaaaactgttttctggagtgtgcctatcaatacgacgatgacggctaccagagctactgcaccatctgttgcggcggaagagaggtgctgatgtgtggaaataacaactgctgccggtgcttctgcgtggaatgcgtggacctgctggtgggccccggcgccgcccaggccgctattaaggaagatccttggaactgctacatgtgcggccacaagggcacatacggcctgctgagacggagagaggactggcctagcagactgcagatgttcttcgccaataaccacgaccaggagttcgacccccctaaggtgtaccctcccgtccccgccgagaagagaaagcccatccgggtcctgagcctgttcgatggcatcgccaccggtctgctggtgctgaaggacctgggcatccaggtggataggtacattgcctccgaggtgtgcgaggactccatcaccgtgggaatggtgcgtcatcagggcaagatcatgtacgtgggcgacgtgcggagcgtgacacagaagcatatccaggagtggggccctttcgacctggtgatcggcggcagcccttgcaatgacctgagcatcgtgaacccagcccggaagggcctgtacgagggaaccggcagactgttcttcgagttttacagactgctgcacgacgcccggcctaaggaaggcgacgaccggcccttcttttggctgttcgagaatgtggtggccatgggagtcagcgacaagcgggatattagccggttcctggagagcaaccccgtgatgatcgatgccaaggaagtgagcgccgcccaccgggccagatacttctggggcaatctgcctggcatgaacagacccctggccagcaccgtgaacgacaagctggagctgcaggagtgcctggagcacggccggatcgccaagttcagcaaggtgagaaccatcaccacccgaagcaacagcatcaaacaaggcaaggaccagcactttcctgtgttcatgaacgagaaggaggacatcctgtggtgtaccgagatggagagagtgttcgggttcccagtccactacacagatgtcagcaacatgtctagactggccagacagagactgctgggaagaagctggtccgtccctgtgatcagacacctgttcgcccctctgaaggagtacttcgcctgcgtgagcagcggcaacagcaacgccaacagccggggccccagcttctctagcggcctggtgccactgtccctgagagggagccacatgggccccatggagatctacaaaaccgtgagcgcctggaagcggcagcctgtgcgcgtgctgagcctgtttcggaatatcgataaagtcctgaaaagcctgggattcctggagagcggctctggctccggcggtggcaccctgaagtacgtggaggatgtgacaaacgtggtcagacgggatgtggagaagtggggccccttcgatctggtgtacggcagcacccaacccctgggcagctcttgtgaccggtgccctggctggtacatgtttcagttccaccggatcctgcagtacgccctgccgagacaggagtcccagcggccattcttttggattttcatggacaacttgctgctgaccgaggatgaccaggaaactaccactcggttcctgcagaccgaagccgtgaccctgcaggacgtgagaggccgggactaccagaacgccatgcgggtgtggtccaacatccctggactgaaaagcaagcacgcacctctgacccctaaagaagaggagtacctgcaggcccaggtgcggagcagaagcaagctggacgcccctaaggtggatctgctggtgaagaattgcctcctgcccctgagagagtacttcaagtatttcagccagaatagtctgcccctgggaggcagcggcggcggcgccctggtgacatttgaggacgtcgccgtgcggttcacccaggaggaatgggctctgctggatccttctcagaaaatcctgtaccgggacgtgatgagagagacataccggaatctgacctccgtgggcatcaactgggaatgttgggaccttgaagcctgcttcagaagcctgggaagaaacctgagagtgcaggtggtgaagagaaagtgcgagctgaccaacagcggcccctgcgccgagggcggcccaagcagcggcgcccctcctcccagcggcggcagcccagccggctccccaacctctaccgaggagggcacctctgagtccgccacccccgagagcggccctggcacctccaccgagcccagcgagggcagcgcacccggcagccctgccggcagccccacctccacagaggagggaaccagcaccgagcccagcgaaggcagcgccccaggcaccagcaccgagcctagtgagcaggagattaaacggatcaacaagatcagaagaagacttgtgaaagacagcaacaccaagaaggccggcaagacaggccccatgaaaaccctgctggttagagtgatgacacccgatctgagagagcggctggaaaacctgagaaagaagcctgaaaatatcccccagcccatcagcaatacatctagagccaacctgaataagctgctgaccgattacaccgaaatgaagaaggcgatcctgcatgtgtactgggaagagttccagaaggaccctgtgggcctgatgagccgggtggcccagcctgccagcaagaagatcgatcagaacaagctgaaacctgagatggacgagaagggcaacctgaccaccgccggctttgcctgctctcagtgtggccagcccctgttcgtgtacaagctggagcaggtgtctgagaagggcaaggcttacaccaactacttcggacggtgcaatgtggccgagcacgaaaagctgatcctgctggcccagctgaagcccgagaaggatagcgacgaagccgtgacatatagcctgggaaagtttgggcagagggccctggatttctacagcattcatgtgaccaaggagtccacccaccccgtgaagcccctggcccagatcgccggaaacagatacgcctccggacctgtgggaaaggccctgagcgacgcatgtatgggcacaatcgcctccttcctgtctaagtaccaggacatcatcatcgaacaccagaaggtggtgaagggcaaccagaagagactggagagcctgcgggagctggccggcaaggaaaacctggaataccctagcgtgaccctgccacctcagcctcacaccaaggagggcgttgatgcctacaacgaagtgatcgcccgggtgcgaatgtgggtgaacctgaacctgtggcagaagctgaagctaagcagagatgatgccaagcctctgctgagactgaagggattcccttcctttcctctggtcgagagacaggccaacgaagtggactggtgggacatggtgtgtaacgtgaagaagctgatcaacgagaaaaaggaggatggcaaggtgttttggcagaatctggctggctacaagagacaggaagccctgagaccatacctgagcagcgaggaagatcggaagaagggaaagaaattcgctcggtaccagctgggcgacctgctgctgcacctggaaaagaagcacggcgaggactggggaaaggtgtacgacgaggcctgggagcggattgacaagaaagtggaaggcctgagcaagcacatcaagctggaagaggaacggagaagcgaggacgcccagagcaaggccgccctgaccgactggctgcgggctaaggccagcttcgtgatcgagggcctgaaggaggccgacaaggacgagttctgcagatgcgagctgaagctgcagaagtggtacggggacctgcggggaaagcccttcgccatcgaagccgagaacagcatcctggacatcagcggcttcagcaagcagtacaactgtgccttcatctggcagaaggacggcgtgaagaagctgaacctgtacctgatcatcaactacttcaagggcggcaagctgcggttcaagaagatcaaacctgaagccttcgaagccaacagattctacaccgtgatcaacaaaaagagcggcgagatcgtgcccatggaggtgaacttcaacttcgacgaccccaacctgatcatcctgcctctggcctttggcaagagacagggcagagaattcatctggaacgacctgctgtccctggaaaccggcagcctgaagctggccaacggaagagtgatcgagaagacactgtacaacagaagaacccggcaggatgagcctgccctgttcgtggccctgaccttcgagcggcgggaggtcctggactcctccaatatcaaaccaatgaacctgatcggcgtggcaagaggcgaaaacatccccgccgtgatcgccctgaccgaccccgagggctgcccactgagccggtttaaggatagcctgggaaacccaacccacatcctgagaatcggcgagagctataaggagaagcagcggaccatccaggccaagaaggaggtggagcagcggagagccggcggctacagccggaagtacgccagcaaagccaagaatctggcagacgatatggtgagaaacaccgctagagatctgctgtactacgccgtgacccaggatgccatgctgatcttcgccaacctgagccggggcttcggccggcagggcaagcggaccttcatggccgagagacagtacacacggatggaggactggctgaccgccaagctggcctacgagggcctgagcaagacctacctgtccaagacactggcccagtacacctccaagacatgcagcaactgtgggtttaccatcaccagcgccgactacgacagggtgctggagaagctgaagaagacagcaacaggctggatgaccacaattaacggcaaggagctgaaggtggagggccagattacctactacaacagatacaagagacagaacgtagtcaaggacctgtccgtcgagctggatagactgagcgaagaatctgtgaacaacgacatctcctcctggacaaagggcagaagcggagaagctctgagcctcctgaagaaaagattctcccatagacccgtgcaggagaagttcgtgtgcctgaactgcggcttcgagacacacgcagccgagcaagccgccctgaacatcgccagatcctggctgttcctgcggagccaggagtacaagaaataccagacaaacaagacaaccggcaacaccgataagagagccttcgtcgagacctggcagtccttttaccggaagaagcttaaggaggtgtggaaacctgccgtgcggtctggcggatctggcggaggctccaagcagggcggcgtgaccttcgaggacgtggccgtgtacttcagccaggaggagtggagcctgctgaacgaggcccagaggaggctgtaccacgacgtgatgctggagaacttcgccctgatcagcagcctgggctgctgctgcagggccgaggccgtggagacccccttcgagcagagcatcagcgtgggcgtgagccaggccaagacccccaaggagcccaggagcagccagaagacccacggcggcccaagcagcggcgcccctcctcccagcggcggcagcccagccggctccccaacctctaccgaggagggcacctctgagtccgccacccccgagagcggccctggcacctccaccgagcccagcgagggcagcgcacccggcagccctgccggcagccccacctccacagaggagggaaccagcaccgagcccagcgaaggcagcgccccaggcaccagcaccgagcctagtgagcaggagattaaacggatcaacaagatcagaagaagacttgtgaaagacagcaacaccaagaaggccggcaagacaggccccatgaaaaccctgctggttagagtgatgacacccgatctgagagagcggctggaaaacctgagaaagaagcctgaaaatatcccccagcccatcagcaatacatctagagccaacctgaataagctgctgaccgattacaccgaaatgaagaaggcgatcctgcatgtgtactgggaagagttccagaaggaccctgtgggcctgatgagccgggtggcccagcctgccagcaagaagatcgatcagaacaagctgaaacctgagatggacgagaagggcaacctgaccaccgccggctttgcctgctctcagtgtggccagcccctgttcgtgtacaagctggagcaggtgtctgagaagggcaaggcttacaccaactacttcggacggtgcaatgtggccgagcacgaaaagctgatcctgctggcccagctgaagcccgagaaggatagcgacgaagccgtgacatatagcctgggaaagtttgggcagagggccctggatttctacagcattcatgtgaccaaggagtccacccaccccgtgaagcccctggcccagatcgccggaaacagatacgcctccggacctgtgggaaaggccctgagcgacgcatgtatgggcacaatcgcctccttcctgtctaagtaccaggacatcatcatcgaacaccagaaggtggtgaagggcaaccagaagagactggagagcctgcgggagctggccggcaaggaaaacctggaataccctagcgtgaccctgccacctcagcctcacaccaaggagggcgttgatgcctacaacgaagtgatcgcccgggtgcgaatgtgggtgaacctgaacctgtggcagaagctgaagctaagcagagatgatgccaagcctctgctgagactgaagggattcccttcctttcctctggtcgagagacaggccaacgaagtggactggtgggacatggtgtgtaacgtgaagaagctgatcaacgagaaaaaggaggatggcaaggtgttttggcagaatctggctggctacaagagacaggaagccctgagaccatacctgagcagcgaggaagatcggaagaagggaaagaaattcgctcggtaccagctgggcgacctgctgctgcacctggaaaagaagcacggcgaggactggggaaaggtgtacgacgaggcctgggagcggattgacaagaaagtggaaggcctgagcaagcacatcaagctggaagaggaacggagaagcgaggacgcccagagcaaggccgccctgaccgactggctgcgggctaaggccagcttcgtgatcgagggcctgaaggaggccgacaaggacgagttctgcagatgcgagctgaagctgcagaagtggtacggggacctgcggggaaagcccttcgccatcgaagccgagaacagcatcctggacatcagcggcttcagcaagcagtacaactgtgccttcatctggcagaaggacggcgtgaagaagctgaacctgtacctgatcatcaactacttcaagggcggcaagctgcggttcaagaagatcaaacctgaagccttcgaagccaacagattctacaccgtgatcaacaaaaagagcggcgagatcgtgcccatggaggtgaacttcaacttcgacgaccccaacctgatcatcctgcctctggcctttggcaagagacagggcagagaattcatctggaacgacctgctgtccctggaaaccggcagcctgaagctggccaacggaagagtgatcgagaagacactgtacaacagaagaacccggcaggatgagcctgccctgttcgtggccctgaccttcgagcggcgggaggtcctggactcctccaatatcaaaccaatgaacctgatcggcgtggcaagaggcgaaaacatccccgccgtgatcgccctgaccgaccccgagggctgcccactgagccggtttaaggatagcctgggaaacccaacccacatcctgagaatcggcgagagctataaggagaagcagcggaccatccaggccaagaaggaggtggagcagcggagagccggcggctacagccggaagtacgccagcaaagccaagaatctggcagacgatatggtgagaaacaccgctagagatctgctgtactacgccgtgacccaggatgccatgctgatcttcgccaacctgagccggggcttcggccggcagggcaagcggaccttcatggccgagagacagtacacacggatggaggactggctgaccgccaagctggcctacgagggcctgagcaagacctacctgtccaagacactggcccagtacacctccaagacatgcagcaactgtgggtttaccatcaccagcgccgactacgacagggtgctggagaagctgaagaagacagcaacaggctggatgaccacaattaacggcaaggagctgaaggtggagggccagattacctactacaacagatacaagagacagaacgtagtcaaggacctgtccgtcgagctggatagactgagcgaagaatctgtgaacaacgacatctcctcctggacaaagggcagaagcggagaagctctgagcctcctgaagaaaagattctcccatagacccgtgcaggagaagttcgtgtgcctgaactgcggcttcgagacacacgcagccgagcaagccgccctgaacatcgccagatcctggctgttcctgcggagccaggagtacaagaaataccagacaaacaagacaaccggcaacaccgataagagagccttcgtcgagacctggcagtccttttaccggaagaagcttaaggaggtgtggaaacctgccgtgcggtctggcggatctggcggaggctcctaagcagggcggcgtgaccttcgaggacgtggccgtgtacttcagccaggaggagtggagcctgctgaacgaggcccagaggaggctgtaccacgacgtgatgctggagaacttcgccctgatcagcagcctgggctgctgctgcagggccgaggccgtggagacccccttcgagcagagcatcagcgtgggcgtgagccaggccaagacccccaaggagcccaggagcagccagaagacccacggatctggctccggcagcggccccaagaaaaagagaaaagtctaagctgccttctgcggggcttgccttctggccatgcccttcttctctcccttgcacctgtacctcttggtctttgaataaagcctgagtaggaaggctagcaaaaaaaaaaaaaaaaaaaaaaaaaaaaaaaaaaaaaaaaaaaaaaaaaaaaaaaaaaaaaaaaaaaaaaaaaaaaaaaa

SEQ ID NO: 16487 - RNA, 9485 nt, synthetic construct
  source 1..9485: mol_type = other RNA
aggaaataagagagaaaagaagagtaagaagaaatataagagccaccatggcccctaagaagaagcgtaaagtgagccggatggaacgcctcgtctacgaggtgcggcagaagtgcagaaacatcgaggacatctgcatctcctgcggatctctgaacgtgaccctggagcacccactgttcatcggcggcatgtgccagaactgtaaaaactgttttctggagtgtgcctatcaatacgacgatgacggctaccagagctactgcaccatctgttgcggcggaagagaggtgctgatgtgtggaaataacaactgctgccggtgcttctgcgtggaatgcgtggacctgctggtgggccccggcgccgcccaggccgctattaaggaagatccttggaactgctacatgtgcggccacaagggcacatacggcctgctgagacggagagaggactggcctagcagactgcagatgttcttcgccaataaccacgaccaggagttcgacccccctaaggtgtaccctcccgtccccgccgagaagagaaagcccatccgggtcctgagcctgttcgatggcatcgccaccggtctgctggtgctgaaggacctgggcatccaggtggataggtacattgcctccgaggtgtgcgaggactccatcaccgtgggaatggtgcgtcatcagggcaagatcatgtacgtgggcgacgtgcggagcgtgacacagaagcatatccaggagtggggccctttcgacctggtgatcggcggcagcccttgcaatgacctgagcatcgtgaacccagcccggaagggcctgtacgagggaaccggcagactgttcttcgagttttacagactgctgcacgacgcccggcctaaggaaggcgacgaccggcccttcttttggctgttcgagaatgtggtggccatgggagtcagcgacaagcgggatattagccggttcctggagagcaaccccgtgatgatcgatgccaaggaagtgagcgccgcccaccgggccagatacttctggggcaatctgcctggcatgaacagacccctggccagcaccgtgaacgacaagctggagctgcaggagtgcctggagcacggccggatcgccaagttcagcaaggtgagaaccatcaccacccgaagcaacagcatcaaacaaggcaaggaccagcactttcctgtgttcatgaacgagaaggaggacatcctgtggtgtaccgagatggagagagtgttcgggttcccagtccactacacagatgtcagcaacatgtctagactggccagacagagactgctgggaagaagctggtccgtccctgtgatcagacacctgttcgcccctctgaaggagtacttcgcctgcgtgagcagcggcaacagcaacgccaacagccggggccccagcttctctagcggcctggtgccactgtccctgagagggagccacatgggccccatggagatctacaaaaccgtgagcgcctggaagcggcagcctgtgcgcgtgctgagcctgtttcggaatatcgataaagtcctgaaaagcctgggattcctggagagcggctctggctccggcggtggcaccctgaagtacgtggaggatgtgacaaacgtggtcagacgggatgtggagaagtggggccccttcgatctggtgtacggcagcacccaacccctgggcagctcttgtgaccggtgccctggctggtacatgtttcagttccaccggatcctgcagtacgccctgccgagacaggagtcccagcggccattcttttggattttcatggacaacttgctgctgaccgaggatgaccaggaaactaccactcggttcctgcagaccgaagccgtgaccctgcaggacgtgagaggccgggactaccagaacgccatgcgggtgtggtccaacatccctggactgaaaagcaagcacgcacctctgacccctaaagaagaggagtacctgcaggcccaggtgcggagcagaagcaagctggacgcccctaaggtggatctgctggtgaagaattgcctcctgcccctgagagagtacttcaagtatttcagccagaatagtctgcccctgggaggcagcggcggcggcgccctggtgacatttgaggacgtcgccgtgcggttcacccaggaggaatgggctctgctggatccttctcagaaaatcctgtaccgggacgtgatgagagagacataccggaatctgacctccgtgggcatcaactgggaatgttgggaccttgaagcctgcttcagaagcctgggaagaaacctgagagtgcaggtggtgaagagaaagtgcgagctgaccaacagcggcccctgcgccgagggcggcccaagcagcggcgcccctcctcccagcggcggcagcccagccggctccccaacctctaccgaggagggcacctctgagtccgccacccccgagagcggccctggcacctccaccgagcccagcgagggcagcgcacccggcagccctgccggcagccccacctccacagaggagggaaccagcaccgagcccagcgaaggcagcgccccaggcaccagcaccgagcctagtgagcaggagattaaacggatcaacaagatcagaagaagacttgtgaaagacagcaacaccaagaaggccggcaagacaggccccatgaaaaccctgctggttagagtgatgacacccgatctgagagagcggctggaaaacctgagaaagaagcctgaaaatatcccccagcccatcagcaatacatctagagccaacctgaataagctgctgaccgattacaccgaaatgaagaaggcgatcctgcatgtgtactgggaagagttccagaaggaccctgtgggcctgatgagccgggtggcccagcctgccagcaagaagatcgatcagaacaagctgaaacctgagatggacgagaagggcaacctgaccaccgccggctttgcctgctctcagtgtggccagcccctgttcgtgtacaagctggagcaggtgtctgagaagggcaaggcttacaccaactacttcggacggtgcaatgtggccgagcacgaaaagctgatcctgctggcccagctgaagcccgagaaggatagcgacgaagccgtgacatatagcctgggaaagtttgggcagagggccctggatttctacagcattcatgtgaccaaggagtccacccaccccgtgaagcccctggcccagatcgccggaaacagatacgcctccggacctgtgggaaaggccctgagcgacgcatgtatgggcacaatcgcctccttcctgtctaagtaccaggacatcatcatcgaacaccagaaggtggtgaagggcaaccagaagagactggagagcctgcgggagctggccggcaaggaaaacctggaataccctagcgtgaccctgccacctcagcctcacaccaaggagggcgttgatgcctacaacgaagtgatcgcccgggtgcgaatgtgggtgaacctgaacctgtggcagaagctgaagctaagcagagatgatgccaagcctctgctgagactgaagggattcccttcctttcctctggtcgagagacaggccaacgaagtggactggtgggacatggtgtgtaacgtgaagaagctgatcaacgagaaaaaggaggatggcaaggtgttttggcagaatctggctggctacaagagacaggaagccctgagaccatacctgagcagcgaggaagatcggaagaagggaaagaaattcgctcggtaccagctgggcgacctgctgctgcacctggaaaagaagcacggcgaggactggggaaaggtgtacgacgaggcctgggagcggattgacaagaaagtggaaggcctgagcaagcacatcaagctggaagaggaacggagaagcgaggacgcccagagcaaggccgccctgaccgactggctgcgggctaaggccagcttcgtgatcgagggcctgaaggaggccgacaaggacgagttctgcagatgcgagctgaagctgcagaagtggtacggggacctgcggggaaagcccttcgccatcgaagccgagaacagcatcctggacatcagcggcttcagcaagcagtacaactgtgccttcatctggcagaaggacggcgtgaagaagctgaacctgtacctgatcatcaactacttcaagggcggcaagctgcggttcaagaagatcaaacctgaagccttcgaagccaacagattctacaccgtgatcaacaaaaagagcggcgagatcgtgcccatggaggtgaacttcaacttcgacgaccccaacctgatcatcctgcctctggcctttggcaagagacagggcagagaattcatctggaacgacctgctgtccctggaaaccggcagcctgaagctggccaacggaagagtgatcgagaagacactgtacaacagaagaacccggcaggatgagcctgccctgttcgtggccctgaccttcgagcggcgggaggtcctggactcctccaatatcaaaccaatgaacctgatcggcgtggcaagaggcgaaaacatccccgccgtgatcgccctgaccgaccccgagggctgcccactgagccggtttaaggatagcctgggaaacccaacccacatcctgagaatcggcgagagctataaggagaagcagcggaccatccaggccaagaaggaggtggagcagcggagagccggcggctacagccggaagtacgccagcaaagccaagaatctggcagacgatatggtgagaaacaccgctagagatctgctgtactacgccgtgacccaggatgccatgctgatcttcgccaacctgagccggggcttcggccggcagggcaagcggaccttcatggccgagagacagtacacacggatggaggactggctgaccgccaagctggcctacgagggcctgagcaagacctacctgtccaagacactggcccagtacacctccaagacatgcagcaactgtgggtttaccatcaccagcgccgactacgacagggtgctggagaagctgaagaagacagcaacaggctggatgaccacaattaacggcaaggagctgaaggtggagggccagattacctactacaacagatacaagagacagaacgtagtcaaggacctgtccgtcgagctggatagactgagcgaagaatctgtgaacaacgacatctcctcctggacaaagggcagaagcggagaagctctgagcctcctgaagaaaagattctcccatagacccgtgcaggagaagttcgtgtgcctgaactgcggcttcgagacacacgcagccgagcaagccgccctgaacatcgccagatcctggctgttcctgcggagccaggagtacaagaaataccagacaaacaagacaaccggcaacaccgataagagagccttcgtcgagacctggcagtccttttaccggaagaagcttaaggaggtgtggaaacctgccgtgcggtctggcggatctggcggaggctcctgcagccacaggagctgcagggaggaccccggcaccagcgagagcagggagatggaccccgtggccttcaaggacgtggccgtgaacttcacccaggaggagtgggccctgctggacatcagccagaggaagctgtacagggaggtgatgctggagaccttcaggaacctgaccagcatcggcaagaagtggaaggaccagaacatcgagttcgagtaccagaaccccaggaggaacttcaggggcggcccaagcagcggcgcccctcctcccagcggcggcagcccagccggctccccaacctctaccgaggagggcacctctgagtccgccacccccgagagcggccctggcacctccaccgagcccagcgagggcagcgcacccggcagccctgccggcagccccacctccacagaggagggaaccagcaccgagcccagcgaaggcagcgccccaggcaccagcaccgagcctagtgagcaggagattaaacggatcaacaagatcagaagaagacttgtgaaagacagcaacaccaagaaggccggcaagacaggccccatgaaaaccctgctggttagagtgatgacacccgatctgagagagcggctggaaaacctgagaaagaagcctgaaaatatcccccagcccatcagcaatacatctagagccaacctgaataagctgctgaccgattacaccgaaatgaagaaggcgatcctgcatgtgtactgggaagagttccagaaggaccctgtgggcctgatgagccgggtggcccagcctgccagcaagaagatcgatcagaacaagctgaaacctgagatggacgagaagggcaacctgaccaccgccggctttgcctgctctcagtgtggccagcccctgttcgtgtacaagctggagcaggtgtctgagaagggcaaggcttacaccaactacttcggacggtgcaatgtggccgagcacgaaaagctgatcctgctggcccagctgaagcccgagaaggatagcgacgaagccgtgacatatagcctgggaaagtttgggcagagggccctggatttctacagcattcatgtgaccaaggagtccacccaccccgtgaagcccctggcccagatcgccggaaacagatacgcctccggacctgtgggaaaggccctgagcgacgcatgtatgggcacaatcgcctccttcctgtctaagtaccaggacatcatcatcgaacaccagaaggtggtgaagggcaaccagaagagactggagagcctgcgggagctggccggcaaggaaaacctggaataccctagcgtgaccctgccacctcagcctcacaccaaggagggcgttgatgcctacaacgaagtgatcgcccgggtgcgaatgtgggtgaacctgaacctgtggcagaagctgaagctaagcagagatgatgccaagcctctgctgagactgaagggattcccttcctttcctctggtcgagagacaggccaacgaagtggactggtgggacatggtgtgtaacgtgaagaagctgatcaacgagaaaaaggaggatggcaaggtgttttggcagaatctggctggctacaagagacaggaagccctgagaccatacctgagcagcgaggaagatcggaagaagggaaagaaattcgctcggtaccagctgggcgacctgctgctgcacctggaaaagaagcacggcgaggactggggaaaggtgtacgacgaggcctgggagcggattgacaagaaagtggaaggcctgagcaagcacatcaagctggaagaggaacggagaagcgaggacgcccagagcaaggccgccctgaccgactggctgcgggctaaggccagcttcgtgatcgagggcctgaaggaggccgacaaggacgagttctgcagatgcgagctgaagctgcagaagtggtacggggacctgcggggaaagcccttcgccatcgaagccgagaacagcatcctggacatcagcggcttcagcaagcagtacaactgtgccttcatctggcagaaggacggcgtgaagaagctgaacctgtacctgatcatcaactacttcaagggcggcaagctgcggttcaagaagatcaaacctgaagccttcgaagccaacagattctacaccgtgatcaacaaaaagagcggcgagatcgtgcccatggaggtgaacttcaacttcgacgaccccaacctgatcatcctgcctctggcctttggcaagagacagggcagagaattcatctggaacgacctgctgtccctggaaaccggcagcctgaagctggccaacggaagagtgatcgagaagacactgtacaacagaagaacccggcaggatgagcctgccctgttcgtggccctgaccttcgagcggcgggaggtcctggactcctccaatatcaaaccaatgaacctgatcggcgtggcaagaggcgaaaacatccccgccgtgatcgccctgaccgaccccgagggctgcccactgagccggtttaaggatagcctgggaaacccaacccacatcctgagaatcggcgagagctataaggagaagcagcggaccatccaggccaagaaggaggtggagcagcggagagccggcggctacagccggaagtacgccagcaaagccaagaatctggcagacgatatggtgagaaacaccgctagagatctgctgtactacgccgtgacccaggatgccatgctgatcttcgccaacctgagccggggcttcggccggcagggcaagcggaccttcatggccgagagacagtacacacggatggaggactggctgaccgccaagctggcctacgagggcctgagcaagacctacctgtccaagacactggcccagtacacctccaagacatgcagcaactgtgggtttaccatcaccagcgccgactacgacagggtgctggagaagctgaagaagacagcaacaggctggatgaccacaattaacggcaaggagctgaaggtggagggccagattacctactacaacagatacaagagacagaacgtagtcaaggacctgtccgtcgagctggatagactgagcgaagaatctgtgaacaacgacatctcctcctggacaaagggcagaagcggagaagctctgagcctcctgaagaaaagattctcccatagacccgtgcaggagaagttcgtgtgcctgaactgcggcttcgagacacacgcagccgagcaagccgccctgaacatcgccagatcctggctgttcctgcggagccaggagtacaagaaataccagacaaacaagacaaccggcaacaccgataagagagccttcgtcgagacctggcagtccttttaccggaagaagcttaaggaggtgtggaaacctgccgtgcggtctggcggatctggcggaggctccttgcagccacaggagctgcagggaggaccccggcaccagcgagagcagggagatggaccccgtggccttcaaggacgtggccgtgaacttcacccaggaggagtgggccctgctggacatcagccagaggaagctgtacagggaggtgatgctggagaccttcaggaacctgaccagcatcggcaagaagtggaaggaccagaacatcgagttcgagtaccagaaccccaggaggaacttcaggggatctggctccggcagcggccccaagaaaaagagaaaagtctaagctgccttctgcggggcttgccttctggccatgcccttcttctctcccttgcacctgtacctcttggtctttgaataaagcctgagtaggaaggctagcaaaaaaaaaaaaaaaaaaaaaaaaaaaaaaaaaaaaaaaaaaaaaaaaaaaaaaaaaaaaaaaaaaaaaaaaaaaaaaaa

SEQ ID NO: 16488 - RNA, 9485 nt, synthetic construct
  source 1..9485: mol_type = other RNA
aggaaataagagagaaaagaagagtaagaagaaatataagagccaccatggcccctaagaagaagcgtaaagtgagccggatggaacgcctcgtctacgaggtgcggcagaagtgcagaaacatcgaggacatctgcatctcctgcggatctctgaacgtgaccctggagcacccactgttcatcggcggcatgtgccagaactgtaaaaactgttttctggagtgtgcctatcaatacgacgatgacggctaccagagctactgcaccatctgttgcggcggaagagaggtgctgatgtgtggaaataacaactgctgccggtgcttctgcgtggaatgcgtggacctgctggtgggccccggcgccgcccaggccgctattaaggaagatccttggaactgctacatgtgcggccacaagggcacatacggcctgctgagacggagagaggactggcctagcagactgcagatgttcttcgccaataaccacgaccaggagttcgacccccctaaggtgtaccctcccgtccccgccgagaagagaaagcccatccgggtcctgagcctgttcgatggcatcgccaccggtctgctggtgctgaaggacctgggcatccaggtggataggtacattgcctccgaggtgtgcgaggactccatcaccgtgggaatggtgcgtcatcagggcaagatcatgtacgtgggcgacgtgcggagcgtgacacagaagcatatccaggagtggggccctttcgacctggtgatcggcggcagcccttgcaatgacctgagcatcgtgaacccagcccggaagggcctgtacgagggaaccggcagactgttcttcgagttttacagactgctgcacgacgcccggcctaaggaaggcgacgaccggcccttcttttggctgttcgagaatgtggtggccatgggagtcagcgacaagcgggatattagccggttcctggagagcaaccccgtgatgatcgatgccaaggaagtgagcgccgcccaccgggccagatacttctggggcaatctgcctggcatgaacagacccctggccagcaccgtgaacgacaagctggagctgcaggagtgcctggagcacggccggatcgccaagttcagcaaggtgagaaccatcaccacccgaagcaacagcatcaaacaaggcaaggaccagcactttcctgtgttcatgaacgagaaggaggacatcctgtggtgtaccgagatggagagagtgttcgggttcccagtccactacacagatgtcagcaacatgtctagactggccagacagagactgctgggaagaagctggtccgtccctgtgatcagacacctgttcgcccctctgaaggagtacttcgcctgcgtgagcagcggcaacagcaacgccaacagccggggccccagcttctctagcggcctggtgccactgtccctgagagggagccacatgggccccatggagatctacaaaaccgtgagcgcctggaagcggcagcctgtgcgcgtgctgagcctgtttcggaatatcgataaagtcctgaaaagcctgggattcctggagagcggctctggctccggcggtggcaccctgaagtacgtggaggatgtgacaaacgtggtcagacgggatgtggagaagtggggccccttcgatctggtgtacggcagcacccaacccctgggcagctcttgtgaccggtgccctggctggtacatgtttcagttccaccggatcctgcagtacgccctgccgagacaggagtcccagcggccattcttttggattttcatggacaacttgctgctgaccgaggatgaccaggaaactaccactcggttcctgcagaccgaagccgtgaccctgcaggacgtgagaggccgggactaccagaacgccatgcgggtgtggtccaacatccctggactgaaaagcaagcacgcacctctgacccctaaagaagaggagtacctgcaggcccaggtgcggagcagaagcaagctggacgcccctaaggtggatctgctggtgaagaattgcctcctgcccctgagagagtacttcaagtatttcagccagaatagtctgcccctgggaggcagcggcggcggcgccctggtgacatttgaggacgtcgccgtgcggttcacccaggaggaatgggctctgctggatccttctcagaaaatcctgtaccgggacgtgatgagagagacataccggaatctgacctccgtgggcatcaactgggaatgttgggaccttgaagcctgcttcagaagcctgggaagaaacctgagagtgcaggtggtgaagagaaagtgcgagctgaccaacagcggcccctgcgccgagggcggcccaagcagcggcgcccctcctcccagcggcggcagcccagccggctccccaacctctaccgaggagggcacctctgagtccgccacccccgagagcggccctggcacctccaccgagcccagcgagggcagcgcacccggcagccctgccggcagccccacctccacagaggagggaaccagcaccgagcccagcgaaggcagcgccccaggcaccagcaccgagcctagtgagcaggagattaaacggatcaacaagatcagaagaagacttgtgaaagacagcaacaccaagaaggccggcaagacaggccccatgaaaaccctgctggttagagtgatgacacccgatctgagagagcggctggaaaacctgagaaagaagcctgaaaatatcccccagcccatcagcaatacatctagagccaacctgaataagctgctgaccgattacaccgaaatgaagaaggcgatcctgcatgtgtactgggaagagttccagaaggaccctgtgggcctgatgagccgggtggcccagcctgccagcaagaagatcgatcagaacaagctgaaacctgagatggacgagaagggcaacctgaccaccgccggctttgcctgctctcagtgtggccagcccctgttcgtgtacaagctggagcaggtgtctgagaagggcaaggcttacaccaactacttcggacggtgcaatgtggccgagcacgaaaagctgatcctgctggcccagctgaagcccgagaaggatagcgacgaagccgtgacatatagcctgggaaagtttgggcagagggccctggatttctacagcattcatgtgaccaaggagtccacccaccccgtgaagcccctggcccagatcgccggaaacagatacgcctccggacctgtgggaaaggccctgagcgacgcatgtatgggcacaatcgcctccttcctgtctaagtaccaggacatcatcatcgaacaccagaaggtggtgaagggcaaccagaagagactggagagcctgcgggagctggccggcaaggaaaacctggaataccctagcgtgaccctgccacctcagcctcacaccaaggagggcgttgatgcctacaacgaagtgatcgcccgggtgcgaatgtgggtgaacctgaacctgtggcagaagctgaagctaagcagagatgatgccaagcctctgctgagactgaagggattcccttcctttcctctggtcgagagacaggccaacgaagtggactggtgggacatggtgtgtaacgtgaagaagctgatcaacgagaaaaaggaggatggcaaggtgttttggcagaatctggctggctacaagagacaggaagccctgagaccatacctgagcagcgaggaagatcggaagaagggaaagaaattcgctcggtaccagctgggcgacctgctgctgcacctggaaaagaagcacggcgaggactggggaaaggtgtacgacgaggcctgggagcggattgacaagaaagtggaaggcctgagcaagcacatcaagctggaagaggaacggagaagcgaggacgcccagagcaaggccgccctgaccgactggctgcgggctaaggccagcttcgtgatcgagggcctgaaggaggccgacaaggacgagttctgcagatgcgagctgaagctgcagaagtggtacggggacctgcggggaaagcccttcgccatcgaagccgagaacagcatcctggacatcagcggcttcagcaagcagtacaactgtgccttcatctggcagaaggacggcgtgaagaagctgaacctgtacctgatcatcaactacttcaagggcggcaagctgcggttcaagaagatcaaacctgaagccttcgaagccaacagattctacaccgtgatcaacaaaaagagcggcgagatcgtgcccatggaggtgaacttcaacttcgacgaccccaacctgatcatcctgcctctggcctttggcaagagacagggcagagaattcatctggaacgacctgctgtccctggaaaccggcagcctgaagctggccaacggaagagtgatcgagaagacactgtacaacagaagaacccggcaggatgagcctgccctgttcgtggccctgaccttcgagcggcgggaggtcctggactcctccaatatcaaaccaatgaacctgatcggcgtggcaagaggcgaaaacatccccgccgtgatcgccctgaccgaccccgagggctgcccactgagccggtttaaggatagcctgggaaacccaacccacatcctgagaatcggcgagagctataaggagaagcagcggaccatccaggccaagaaggaggtggagcagcggagagccggcggctacagccggaagtacgccagcaaagccaagaatctggcagacgatatggtgagaaacaccgctagagatctgctgtactacgccgtgacccaggatgccatgctgatcttcgccaacctgagccggggcttcggccggcagggcaagcggaccttcatggccgagagacagtacacacggatggaggactggctgaccgccaagctggcctacgagggcctgagcaagacctacctgtccaagacactggcccagtacacctccaagacatgcagcaactgtgggtttaccatcaccagcgccgactacgacagggtgctggagaagctgaagaagacagcaacaggctggatgaccacaattaacggcaaggagctgaaggtggagggccagattacctactacaacagatacaagagacagaacgtagtcaaggacctgtccgtcgagctggatagactgagcgaagaatctgtgaacaacgacatctcctcctggacaaagggcagaagcggagaagctctgagcctcctgaagaaaagattctcccatagacccgtgcaggagaagttcgtgtgcctgaactgcggcttcgagacacacgcagccgagcaagccgccctgaacatcgccagatcctggctgttcctgcggagccaggagtacaagaaataccagacaaacaagacaaccggcaacaccgataagagagccttcgtcgagacctggcagtccttttaccggaagaagcttaaggaggtgtggaaacctgccgtgcggtctggcggatctggcggaggctccagccagggcagcatcaccttcaaggacgtggccgtggacttcacccaggaggagtggtgcctgctggaccccagccagaaggagctgtacagggaggtgatgctggagaacgtgcagaacctgctgttcgtggagaccaacttcgaggtgaaggagatcagcaccaagcagagcctgttcgtggagggcagcggcccccccaggggcaagaacaagggcccctgcgacttcctgctgagggagggcggcccaagcagcggcgcccctcctcccagcggcggcagcccagccggctccccaacctctaccgaggagggcacctctgagtccgccacccccgagagcggccctggcacctccaccgagcccagcgagggcagcgcacccggcagccctgccggcagccccacctccacagaggagggaaccagcaccgagcccagcgaaggcagcgccccaggcaccagcaccgagcctagtgagcaggagattaaacggatcaacaagatcagaagaagacttgtgaaagacagcaacaccaagaaggccggcaagacaggccccatgaaaaccctgctggttagagtgatgacacccgatctgagagagcggctggaaaacctgagaaagaagcctgaaaatatcccccagcccatcagcaatacatctagagccaacctgaataagctgctgaccgattacaccgaaatgaagaaggcgatcctgcatgtgtactgggaagagttccagaaggaccctgtgggcctgatgagccgggtggcccagcctgccagcaagaagatcgatcagaacaagctgaaacctgagatggacgagaagggcaacctgaccaccgccggctttgcctgctctcagtgtggccagcccctgttcgtgtacaagctggagcaggtgtctgagaagggcaaggcttacaccaactacttcggacggtgcaatgtggccgagcacgaaaagctgatcctgctggcccagctgaagcccgagaaggatagcgacgaagccgtgacatatagcctgggaaagtttgggcagagggccctggatttctacagcattcatgtgaccaaggagtccacccaccccgtgaagcccctggcccagatcgccggaaacagatacgcctccggacctgtgggaaaggccctgagcgacgcatgtatgggcacaatcgcctccttcctgtctaagtaccaggacatcatcatcgaacaccagaaggtggtgaagggcaaccagaagagactggagagcctgcgggagctggccggcaaggaaaacctggaataccctagcgtgaccctgccacctcagcctcacaccaaggagggcgttgatgcctacaacgaagtgatcgcccgggtgcgaatgtgggtgaacctgaacctgtggcagaagctgaagctaagcagagatgatgccaagcctctgctgagactgaagggattcccttcctttcctctggtcgagagacaggccaacgaagtggactggtgggacatggtgtgtaacgtgaagaagctgatcaacgagaaaaaggaggatggcaaggtgttttggcagaatctggctggctacaagagacaggaagccctgagaccatacctgagcagcgaggaagatcggaagaagggaaagaaattcgctcggtaccagctgggcgacctgctgctgcacctggaaaagaagcacggcgaggactggggaaaggtgtacgacgaggcctgggagcggattgacaagaaagtggaaggcctgagcaagcacatcaagctggaagaggaacggagaagcgaggacgcccagagcaaggccgccctgaccgactggctgcgggctaaggccagcttcgtgatcgagggcctgaaggaggccgacaaggacgagttctgcagatgcgagctgaagctgcagaagtggtacggggacctgcggggaaagcccttcgccatcgaagccgagaacagcatcctggacatcagcggcttcagcaagcagtacaactgtgccttcatctggcagaaggacggcgtgaagaagctgaacctgtacctgatcatcaactacttcaagggcggcaagctgcggttcaagaagatcaaacctgaagccttcgaagccaacagattctacaccgtgatcaacaaaaagagcggcgagatcgtgcccatggaggtgaacttcaacttcgacgaccccaacctgatcatcctgcctctggcctttggcaagagacagggcagagaattcatctggaacgacctgctgtccctggaaaccggcagcctgaagctggccaacggaagagtgatcgagaagacactgtacaacagaagaacccggcaggatgagcctgccctgttcgtggccctgaccttcgagcggcgggaggtcctggactcctccaatatcaaaccaatgaacctgatcggcgtggcaagaggcgaaaacatccccgccgtgatcgccctgaccgaccccgagggctgcccactgagccggtttaaggatagcctgggaaacccaacccacatcctgagaatcggcgagagctataaggagaagcagcggaccatccaggccaagaaggaggtggagcagcggagagccggcggctacagccggaagtacgccagcaaagccaagaatctggcagacgatatggtgagaaacaccgctagagatctgctgtactacgccgtgacccaggatgccatgctgatcttcgccaacctgagccggggcttcggccggcagggcaagcggaccttcatggccgagagacagtacacacggatggaggactggctgaccgccaagctggcctacgagggcctgagcaagacctacctgtccaagacactggcccagtacacctccaagacatgcagcaactgtgggtttaccatcaccagcgccgactacgacagggtgctggagaagctgaagaagacagcaacaggctggatgaccacaattaacggcaaggagctgaaggtggagggccagattacctactacaacagatacaagagacagaacgtagtcaaggacctgtccgtcgagctggatagactgagcgaagaatctgtgaacaacgacatctcctcctggacaaagggcagaagcggagaagctctgagcctcctgaagaaaagattctcccatagacccgtgcaggagaagttcgtgtgcctgaactgcggcttcgagacacacgcagccgagcaagccgccctgaacatcgccagatcctggctgttcctgcggagccaggagtacaagaaataccagacaaacaagacaaccggcaacaccgataagagagccttcgtcgagacctggcagtccttttaccggaagaagcttaaggaggtgtggaaacctgccgtgcggtctggcggatctggcggaggctcctagccagggcagcatcaccttcaaggacgtggccgtggacttcacccaggaggagtggtgcctgctggaccccagccagaaggagctgtacagggaggtgatgctggagaacgtgcagaacctgctgttcgtggagaccaacttcgaggtgaaggagatcagcaccaagcagagcctgttcgtggagggcagcggcccccccaggggcaagaacaagggcccctgcgacttcctgctgagggagggatctggctccggcagcggccccaagaaaaagagaaaagtctaagctgccttctgcggggcttgccttctggccatgcccttcttctctcccttgcacctgtacctcttggtctttgaataaagcctgagtaggaaggctagcaaaaaaaaaaaaaaaaaaaaaaaaaaaaaaaaaaaaaaaaaaaaaaaaaaaaaaaaaaaaaaaaaaaaaaaaaaaaaaaa

SEQ ID NO: 16489 - RNA, 9485 nt, synthetic construct
  source 1..9485: mol_type = other RNA
aggaaataagagagaaaagaagagtaagaagaaatataagagccaccatggcccctaagaagaagcgtaaagtgagccggatggaacgcctcgtctacgaggtgcggcagaagtgcagaaacatcgaggacatctgcatctcctgcggatctctgaacgtgaccctggagcacccactgttcatcggcggcatgtgccagaactgtaaaaactgttttctggagtgtgcctatcaatacgacgatgacggctaccagagctactgcaccatctgttgcggcggaagagaggtgctgatgtgtggaaataacaactgctgccggtgcttctgcgtggaatgcgtggacctgctggtgggccccggcgccgcccaggccgctattaaggaagatccttggaactgctacatgtgcggccacaagggcacatacggcctgctgagacggagagaggactggcctagcagactgcagatgttcttcgccaataaccacgaccaggagttcgacccccctaaggtgtaccctcccgtccccgccgagaagagaaagcccatccgggtcctgagcctgttcgatggcatcgccaccggtctgctggtgctgaaggacctgggcatccaggtggataggtacattgcctccgaggtgtgcgaggactccatcaccgtgggaatggtgcgtcatcagggcaagatcatgtacgtgggcgacgtgcggagcgtgacacagaagcatatccaggagtggggccctttcgacctggtgatcggcggcagcccttgcaatgacctgagcatcgtgaacccagcccggaagggcctgtacgagggaaccggcagactgttcttcgagttttacagactgctgcacgacgcccggcctaaggaaggcgacgaccggcccttcttttggctgttcgagaatgtggtggccatgggagtcagcgacaagcgggatattagccggttcctggagagcaaccccgtgatgatcgatgccaaggaagtgagcgccgcccaccgggccagatacttctggggcaatctgcctggcatgaacagacccctggccagcaccgtgaacgacaagctggagctgcaggagtgcctggagcacggccggatcgccaagttcagcaaggtgagaaccatcaccacccgaagcaacagcatcaaacaaggcaaggaccagcactttcctgtgttcatgaacgagaaggaggacatcctgtggtgtaccgagatggagagagtgttcgggttcccagtccactacacagatgtcagcaacatgtctagactggccagacagagactgctgggaagaagctggtccgtccctgtgatcagacacctgttcgcccctctgaaggagtacttcgcctgcgtgagcagcggcaacagcaacgccaacagccggggccccagcttctctagcggcctggtgccactgtccctgagagggagccacatgggccccatggagatctacaaaaccgtgagcgcctggaagcggcagcctgtgcgcgtgctgagcctgtttcggaatatcgataaagtcctgaaaagcctgggattcctggagagcggctctggctccggcggtggcaccctgaagtacgtggaggatgtgacaaacgtggtcagacgggatgtggagaagtggggccccttcgatctggtgtacggcagcacccaacccctgggcagctcttgtgaccggtgccctggctggtacatgtttcagttccaccggatcctgcagtacgccctgccgagacaggagtcccagcggccattcttttggattttcatggacaacttgctgctgaccgaggatgaccaggaaactaccactcggttcctgcagaccgaagccgtgaccctgcaggacgtgagaggccgggactaccagaacgccatgcgggtgtggtccaacatccctggactgaaaagcaagcacgcacctctgacccctaaagaagaggagtacctgcaggcccaggtgcggagcagaagcaagctggacgcccctaaggtggatctgctggtgaagaattgcctcctgcccctgagagagtacttcaagtatttcagccagaatagtctgcccctgggaggcagcggcggcggcgccctggtgacatttgaggacgtcgccgtgcggttcacccaggaggaatgggctctgctggatccttctcagaaaatcctgtaccgggacgtgatgagagagacataccggaatctgacctccgtgggcatcaactgggaatgttgggaccttgaagcctgcttcagaagcctgggaagaaacctgagagtgcaggtggtgaagagaaagtgcgagctgaccaacagcggcccctgcgccgagggcggcccaagcagcggcgcccctcctcccagcggcggcagcccagccggctccccaacctctaccgaggagggcacctctgagtccgccacccccgagagcggccctggcacctccaccgagcccagcgagggcagcgcacccggcagccctgccggcagccccacctccacagaggagggaaccagcaccgagcccagcgaaggcagcgccccaggcaccagcaccgagcctagtgagcaggagattaaacggatcaacaagatcagaagaagacttgtgaaagacagcaacaccaagaaggccggcaagacaggccccatgaaaaccctgctggttagagtgatgacacccgatctgagagagcggctggaaaacctgagaaagaagcctgaaaatatcccccagcccatcagcaatacatctagagccaacctgaataagctgctgaccgattacaccgaaatgaagaaggcgatcctgcatgtgtactgggaagagttccagaaggaccctgtgggcctgatgagccgggtggcccagcctgccagcaagaagatcgatcagaacaagctgaaacctgagatggacgagaagggcaacctgaccaccgccggctttgcctgctctcagtgtggccagcccctgttcgtgtacaagctggagcaggtgtctgagaagggcaaggcttacaccaactacttcggacggtgcaatgtggccgagcacgaaaagctgatcctgctggcccagctgaagcccgagaaggatagcgacgaagccgtgacatatagcctgggaaagtttgggcagagggccctggatttctacagcattcatgtgaccaaggagtccacccaccccgtgaagcccctggcccagatcgccggaaacagatacgcctccggacctgtgggaaaggccctgagcgacgcatgtatgggcacaatcgcctccttcctgtctaagtaccaggacatcatcatcgaacaccagaaggtggtgaagggcaaccagaagagactggagagcctgcgggagctggccggcaaggaaaacctggaataccctagcgtgaccctgccacctcagcctcacaccaaggagggcgttgatgcctacaacgaagtgatcgcccgggtgcgaatgtgggtgaacctgaacctgtggcagaagctgaagctaagcagagatgatgccaagcctctgctgagactgaagggattcccttcctttcctctggtcgagagacaggccaacgaagtggactggtgggacatggtgtgtaacgtgaagaagctgatcaacgagaaaaaggaggatggcaaggtgttttggcagaatctggctggctacaagagacaggaagccctgagaccatacctgagcagcgaggaagatcggaagaagggaaagaaattcgctcggtaccagctgggcgacctgctgctgcacctggaaaagaagcacggcgaggactggggaaaggtgtacgacgaggcctgggagcggattgacaagaaagtggaaggcctgagcaagcacatcaagctggaagaggaacggagaagcgaggacgcccagagcaaggccgccctgaccgactggctgcgggctaaggccagcttcgtgatcgagggcctgaaggaggccgacaaggacgagttctgcagatgcgagctgaagctgcagaagtggtacggggacctgcggggaaagcccttcgccatcgaagccgagaacagcatcctggacatcagcggcttcagcaagcagtacaactgtgccttcatctggcagaaggacggcgtgaagaagctgaacctgtacctgatcatcaactacttcaagggcggcaagctgcggttcaagaagatcaaacctgaagccttcgaagccaacagattctacaccgtgatcaacaaaaagagcggcgagatcgtgcccatggaggtgaacttcaacttcgacgaccccaacctgatcatcctgcctctggcctttggcaagagacagggcagagaattcatctggaacgacctgctgtccctggaaaccggcagcctgaagctggccaacggaagagtgatcgagaagacactgtacaacagaagaacccggcaggatgagcctgccctgttcgtggccctgaccttcgagcggcgggaggtcctggactcctccaatatcaaaccaatgaacctgatcggcgtggcaagaggcgaaaacatccccgccgtgatcgccctgaccgaccccgagggctgcccactgagccggtttaaggatagcctgggaaacccaacccacatcctgagaatcggcgagagctataaggagaagcagcggaccatccaggccaagaaggaggtggagcagcggagagccggcggctacagccggaagtacgccagcaaagccaagaatctggcagacgatatggtgagaaacaccgctagagatctgctgtactacgccgtgacccaggatgccatgctgatcttcgccaacctgagccggggcttcggccggcagggcaagcggaccttcatggccgagagacagtacacacggatggaggactggctgaccgccaagctggcctacgagggcctgagcaagacctacctgtccaagacactggcccagtacacctccaagacatgcagcaactgtgggtttaccatcaccagcgccgactacgacagggtgctggagaagctgaagaagacagcaacaggctggatgaccacaattaacggcaaggagctgaaggtggagggccagattacctactacaacagatacaagagacagaacgtagtcaaggacctgtccgtcgagctggatagactgagcgaagaatctgtgaacaacgacatctcctcctggacaaagggcagaagcggagaagctctgagcctcctgaagaaaagattctcccatagacccgtgcaggagaagttcgtgtgcctgaactgcggcttcgagacacacgcagccgagcaagccgccctgaacatcgccagatcctggctgttcctgcggagccaggagtacaagaaataccagacaaacaagacaaccggcaacaccgataagagagccttcgtcgagacctggcagtccttttaccggaagaagcttaaggaggtgtggaaacctgccgtgcggtctggcggatctggcggaggctcccccctggagagcgtgaccttcgaggacgtggccatcaacttcacccaggaggagtgggccctgctggacaccagccagaggaacctgttcaggaacgtgatgctggagaacatcagccacctggtgagcatcggctaccagatcagcaagagcgacgtgatcagccagctgaagcagggcaaggagctgaggaagagcaccgtgagcaagcagtgcggcaagagcctgagccagggcagcttcggcggcccaagcagcggcgcccctcctcccagcggcggcagcccagccggctccccaacctctaccgaggagggcacctctgagtccgccacccccgagagcggccctggcacctccaccgagcccagcgagggcagcgcacccggcagccctgccggcagccccacctccacagaggagggaaccagcaccgagcccagcgaaggcagcgccccaggcaccagcaccgagcctagtgagcaggagattaaacggatcaacaagatcagaagaagacttgtgaaagacagcaacaccaagaaggccggcaagacaggccccatgaaaaccctgctggttagagtgatgacacccgatctgagagagcggctggaaaacctgagaaagaagcctgaaaatatcccccagcccatcagcaatacatctagagccaacctgaataagctgctgaccgattacaccgaaatgaagaaggcgatcctgcatgtgtactgggaagagttccagaaggaccctgtgggcctgatgagccgggtggcccagcctgccagcaagaagatcgatcagaacaagctgaaacctgagatggacgagaagggcaacctgaccaccgccggctttgcctgctctcagtgtggccagcccctgttcgtgtacaagctggagcaggtgtctgagaagggcaaggcttacaccaactacttcggacggtgcaatgtggccgagcacgaaaagctgatcctgctggcccagctgaagcccgagaaggatagcgacgaagccgtgacatatagcctgggaaagtttgggcagagggccctggatttctacagcattcatgtgaccaaggagtccacccaccccgtgaagcccctggcccagatcgccggaaacagatacgcctccggacctgtgggaaaggccctgagcgacgcatgtatgggcacaatcgcctccttcctgtctaagtaccaggacatcatcatcgaacaccagaaggtggtgaagggcaaccagaagagactggagagcctgcgggagctggccggcaaggaaaacctggaataccctagcgtgaccctgccacctcagcctcacaccaaggagggcgttgatgcctacaacgaagtgatcgcccgggtgcgaatgtgggtgaacctgaacctgtggcagaagctgaagctaagcagagatgatgccaagcctctgctgagactgaagggattcccttcctttcctctggtcgagagacaggccaacgaagtggactggtgggacatggtgtgtaacgtgaagaagctgatcaacgagaaaaaggaggatggcaaggtgttttggcagaatctggctggctacaagagacaggaagccctgagaccatacctgagcagcgaggaagatcggaagaagggaaagaaattcgctcggtaccagctgggcgacctgctgctgcacctggaaaagaagcacggcgaggactggggaaaggtgtacgacgaggcctgggagcggattgacaagaaagtggaaggcctgagcaagcacatcaagctggaagaggaacggagaagcgaggacgcccagagcaaggccgccctgaccgactggctgcgggctaaggccagcttcgtgatcgagggcctgaaggaggccgacaaggacgagttctgcagatgcgagctgaagctgcagaagtggtacggggacctgcggggaaagcccttcgccatcgaagccgagaacagcatcctggacatcagcggcttcagcaagcagtacaactgtgccttcatctggcagaaggacggcgtgaagaagctgaacctgtacctgatcatcaactacttcaagggcggcaagctgcggttcaagaagatcaaacctgaagccttcgaagccaacagattctacaccgtgatcaacaaaaagagcggcgagatcgtgcccatggaggtgaacttcaacttcgacgaccccaacctgatcatcctgcctctggcctttggcaagagacagggcagagaattcatctggaacgacctgctgtccctggaaaccggcagcctgaagctggccaacggaagagtgatcgagaagacactgtacaacagaagaacccggcaggatgagcctgccctgttcgtggccctgaccttcgagcggcgggaggtcctggactcctccaatatcaaaccaatgaacctgatcggcgtggcaagaggcgaaaacatccccgccgtgatcgccctgaccgaccccgagggctgcccactgagccggtttaaggatagcctgggaaacccaacccacatcctgagaatcggcgagagctataaggagaagcagcggaccatccaggccaagaaggaggtggagcagcggagagccggcggctacagccggaagtacgccagcaaagccaagaatctggcagacgatatggtgagaaacaccgctagagatctgctgtactacgccgtgacccaggatgccatgctgatcttcgccaacctgagccggggcttcggccggcagggcaagcggaccttcatggccgagagacagtacacacggatggaggactggctgaccgccaagctggcctacgagggcctgagcaagacctacctgtccaagacactggcccagtacacctccaagacatgcagcaactgtgggtttaccatcaccagcgccgactacgacagggtgctggagaagctgaagaagacagcaacaggctggatgaccacaattaacggcaaggagctgaaggtggagggccagattacctactacaacagatacaagagacagaacgtagtcaaggacctgtccgtcgagctggatagactgagcgaagaatctgtgaacaacgacatctcctcctggacaaagggcagaagcggagaagctctgagcctcctgaagaaaagattctcccatagacccgtgcaggagaagttcgtgtgcctgaactgcggcttcgagacacacgcagccgagcaagccgccctgaacatcgccagatcctggctgttcctgcggagccaggagtacaagaaataccagacaaacaagacaaccggcaacaccgataagagagccttcgtcgagacctggcagtccttttaccggaagaagcttaaggaggtgtggaaacctgccgtgcggtctggcggatctggcggaggctcctcccctggagagcgtgaccttcgaggacgtggccatcaacttcacccaggaggagtgggccctgctggacaccagccagaggaacctgttcaggaacgtgatgctggagaacatcagccacctggtgagcatcggctaccagatcagcaagagcgacgtgatcagccagctgaagcagggcaaggagctgaggaagagcaccgtgagcaagcagtgcggcaagagcctgagccagggcagcttcggatctggctccggcagcggccccaagaaaaagagaaaagtctaagctgccttctgcggggcttgccttctggccatgcccttcttctctcccttgcacctgtacctcttggtctttgaataaagcctgagtaggaaggctagcaaaaaaaaaaaaaaaaaaaaaaaaaaaaaaaaaaaaaaaaaaaaaaaaaaaaaaaaaaaaaaaaaaaaaaaaaaaaaaaa

SEQ ID NO: 16490 - RNA, 9485 nt, synthetic construct
  source 1..9485: mol_type = other RNA
aggaaataagagagaaaagaagagtaagaagaaatataagagccaccatggcccctaagaagaagcgtaaagtgagccggatggaacgcctcgtctacgaggtgcggcagaagtgcagaaacatcgaggacatctgcatctcctgcggatctctgaacgtgaccctggagcacccactgttcatcggcggcatgtgccagaactgtaaaaactgttttctggagtgtgcctatcaatacgacgatgacggctaccagagctactgcaccatctgttgcggcggaagagaggtgctgatgtgtggaaataacaactgctgccggtgcttctgcgtggaatgcgtggacctgctggtgggccccggcgccgcccaggccgctattaaggaagatccttggaactgctacatgtgcggccacaagggcacatacggcctgctgagacggagagaggactggcctagcagactgcagatgttcttcgccaataaccacgaccaggagttcgacccccctaaggtgtaccctcccgtccccgccgagaagagaaagcccatccgggtcctgagcctgttcgatggcatcgccaccggtctgctggtgctgaaggacctgggcatccaggtggataggtacattgcctccgaggtgtgcgaggactccatcaccgtgggaatggtgcgtcatcagggcaagatcatgtacgtgggcgacgtgcggagcgtgacacagaagcatatccaggagtggggccctttcgacctggtgatcggcggcagcccttgcaatgacctgagcatcgtgaacccagcccggaagggcctgtacgagggaaccggcagactgttcttcgagttttacagactgctgcacgacgcccggcctaaggaaggcgacgaccggcccttcttttggctgttcgagaatgtggtggccatgggagtcagcgacaagcgggatattagccggttcctggagagcaaccccgtgatgatcgatgccaaggaagtgagcgccgcccaccgggccagatacttctggggcaatctgcctggcatgaacagacccctggccagcaccgtgaacgacaagctggagctgcaggagtgcctggagcacggccggatcgccaagttcagcaaggtgagaaccatcaccacccgaagcaacagcatcaaacaaggcaaggaccagcactttcctgtgttcatgaacgagaaggaggacatcctgtggtgtaccgagatggagagagtgttcgggttcccagtccactacacagatgtcagcaacatgtctagactggccagacagagactgctgggaagaagctggtccgtccctgtgatcagacacctgttcgcccctctgaaggagtacttcgcctgcgtgagcagcggcaacagcaacgccaacagccggggccccagcttctctagcggcctggtgccactgtccctgagagggagccacatgggccccatggagatctacaaaaccgtgagcgcctggaagcggcagcctgtgcgcgtgctgagcctgtttcggaatatcgataaagtcctgaaaagcctgggattcctggagagcggctctggctccggcggtggcaccctgaagtacgtggaggatgtgacaaacgtggtcagacgggatgtggagaagtggggccccttcgatctggtgtacggcagcacccaacccctgggcagctcttgtgaccggtgccctggctggtacatgtttcagttccaccggatcctgcagtacgccctgccgagacaggagtcccagcggccattcttttggattttcatggacaacttgctgctgaccgaggatgaccaggaaactaccactcggttcctgcagaccgaagccgtgaccctgcaggacgtgagaggccgggactaccagaacgccatgcgggtgtggtccaacatccctggactgaaaagcaagcacgcacctctgacccctaaagaagaggagtacctgcaggcccaggtgcggagcagaagcaagctggacgcccctaaggtggatctgctggtgaagaattgcctcctgcccctgagagagtacttcaagtatttcagccagaatagtctgcccctgggaggcagcggcggcggcgccctggtgacatttgaggacgtcgccgtgcggttcacccaggaggaatgggctctgctggatccttctcagaaaatcctgtaccgggacgtgatgagagagacataccggaatctgacctccgtgggcatcaactgggaatgttgggaccttgaagcctgcttcagaagcctgggaagaaacctgagagtgcaggtggtgaagagaaagtgcgagctgaccaacagcggcccctgcgccgagggcggcccaagcagcggcgcccctcctcccagcggcggcagcccagccggctccccaacctctaccgaggagggcacctctgagtccgccacccccgagagcggccctggcacctccaccgagcccagcgagggcagcgcacccggcagccctgccggcagccccacctccacagaggagggaaccagcaccgagcccagcgaaggcagcgccccaggcaccagcaccgagcctagtgagcaggagattaaacggatcaacaagatcagaagaagacttgtgaaagacagcaacaccaagaaggccggcaagacaggccccatgaaaaccctgctggttagagtgatgacacccgatctgagagagcggctggaaaacctgagaaagaagcctgaaaatatcccccagcccatcagcaatacatctagagccaacctgaataagctgctgaccgattacaccgaaatgaagaaggcgatcctgcatgtgtactgggaagagttccagaaggaccctgtgggcctgatgagccgggtggcccagcctgccagcaagaagatcgatcagaacaagctgaaacctgagatggacgagaagggcaacctgaccaccgccggctttgcctgctctcagtgtggccagcccctgttcgtgtacaagctggagcaggtgtctgagaagggcaaggcttacaccaactacttcggacggtgcaatgtggccgagcacgaaaagctgatcctgctggcccagctgaagcccgagaaggatagcgacgaagccgtgacatatagcctgggaaagtttgggcagagggccctggatttctacagcattcatgtgaccaaggagtccacccaccccgtgaagcccctggcccagatcgccggaaacagatacgcctccggacctgtgggaaaggccctgagcgacgcatgtatgggcacaatcgcctccttcctgtctaagtaccaggacatcatcatcgaacaccagaaggtggtgaagggcaaccagaagagactggagagcctgcgggagctggccggcaaggaaaacctggaataccctagcgtgaccctgccacctcagcctcacaccaaggagggcgttgatgcctacaacgaagtgatcgcccgggtgcgaatgtgggtgaacctgaacctgtggcagaagctgaagctaagcagagatgatgccaagcctctgctgagactgaagggattcccttcctttcctctggtcgagagacaggccaacgaagtggactggtgggacatggtgtgtaacgtgaagaagctgatcaacgagaaaaaggaggatggcaaggtgttttggcagaatctggctggctacaagagacaggaagccctgagaccatacctgagcagcgaggaagatcggaagaagggaaagaaattcgctcggtaccagctgggcgacctgctgctgcacctggaaaagaagcacggcgaggactggggaaaggtgtacgacgaggcctgggagcggattgacaagaaagtggaaggcctgagcaagcacatcaagctggaagaggaacggagaagcgaggacgcccagagcaaggccgccctgaccgactggctgcgggctaaggccagcttcgtgatcgagggcctgaaggaggccgacaaggacgagttctgcagatgcgagctgaagctgcagaagtggtacggggacctgcggggaaagcccttcgccatcgaagccgagaacagcatcctggacatcagcggcttcagcaagcagtacaactgtgccttcatctggcagaaggacggcgtgaagaagctgaacctgtacctgatcatcaactacttcaagggcggcaagctgcggttcaagaagatcaaacctgaagccttcgaagccaacagattctacaccgtgatcaacaaaaagagcggcgagatcgtgcccatggaggtgaacttcaacttcgacgaccccaacctgatcatcctgcctctggcctttggcaagagacagggcagagaattcatctggaacgacctgctgtccctggaaaccggcagcctgaagctggccaacggaagagtgatcgagaagacactgtacaacagaagaacccggcaggatgagcctgccctgttcgtggccctgaccttcgagcggcgggaggtcctggactcctccaatatcaaaccaatgaacctgatcggcgtggcaagaggcgaaaacatccccgccgtgatcgccctgaccgaccccgagggctgcccactgagccggtttaaggatagcctgggaaacccaacccacatcctgagaatcggcgagagctataaggagaagcagcggaccatccaggccaagaaggaggtggagcagcggagagccggcggctacagccggaagtacgccagcaaagccaagaatctggcagacgatatggtgagaaacaccgctagagatctgctgtactacgccgtgacccaggatgccatgctgatcttcgccaacctgagccggggcttcggccggcagggcaagcggaccttcatggccgagagacagtacacacggatggaggactggctgaccgccaagctggcctacgagggcctgagcaagacctacctgtccaagacactggcccagtacacctccaagacatgcagcaactgtgggtttaccatcaccagcgccgactacgacagggtgctggagaagctgaagaagacagcaacaggctggatgaccacaattaacggcaaggagctgaaggtggagggccagattacctactacaacagatacaagagacagaacgtagtcaaggacctgtccgtcgagctggatagactgagcgaagaatctgtgaacaacgacatctcctcctggacaaagggcagaagcggagaagctctgagcctcctgaagaaaagattctcccatagacccgtgcaggagaagttcgtgtgcctgaactgcggcttcgagacacacgcagccgagcaagccgccctgaacatcgccagatcctggctgttcctgcggagccaggagtacaagaaataccagacaaacaagacaaccggcaacaccgataagagagccttcgtcgagacctggcagtccttttaccggaagaagcttaaggaggtgtggaaacctgccgtgcggtctggcggatctggcggaggctccatgagcctgggcagcgagctgttcagggacgtggccatcgtgttcagccaggaggagtggcagtgcctggcccccgcccagagggacctgtacagggacgtgatgctggagacctacaacaacctggtgagcctgggcctggccatcagcaagcccgacgtgatcagcttcctggagcagggcaaggagccctggatggtggagagggtggtgagcggcggcctgtgccccgtgctggagagcggcggcccaagcagcggcgcccctcctcccagcggcggcagcccagccggctccccaacctctaccgaggagggcacctctgagtccgccacccccgagagcggccctggcacctccaccgagcccagcgagggcagcgcacccggcagccctgccggcagccccacctccacagaggagggaaccagcaccgagcccagcgaaggcagcgccccaggcaccagcaccgagcctagtgagcaggagattaaacggatcaacaagatcagaagaagacttgtgaaagacagcaacaccaagaaggccggcaagacaggccccatgaaaaccctgctggttagagtgatgacacccgatctgagagagcggctggaaaacctgagaaagaagcctgaaaatatcccccagcccatcagcaatacatctagagccaacctgaataagctgctgaccgattacaccgaaatgaagaaggcgatcctgcatgtgtactgggaagagttccagaaggaccctgtgggcctgatgagccgggtggcccagcctgccagcaagaagatcgatcagaacaagctgaaacctgagatggacgagaagggcaacctgaccaccgccggctttgcctgctctcagtgtggccagcccctgttcgtgtacaagctggagcaggtgtctgagaagggcaaggcttacaccaactacttcggacggtgcaatgtggccgagcacgaaaagctgatcctgctggcccagctgaagcccgagaaggatagcgacgaagccgtgacatatagcctgggaaagtttgggcagagggccctggatttctacagcattcatgtgaccaaggagtccacccaccccgtgaagcccctggcccagatcgccggaaacagatacgcctccggacctgtgggaaaggccctgagcgacgcatgtatgggcacaatcgcctccttcctgtctaagtaccaggacatcatcatcgaacaccagaaggtggtgaagggcaaccagaagagactggagagcctgcgggagctggccggcaaggaaaacctggaataccctagcgtgaccctgccacctcagcctcacaccaaggagggcgttgatgcctacaacgaagtgatcgcccgggtgcgaatgtgggtgaacctgaacctgtggcagaagctgaagctaagcagagatgatgccaagcctctgctgagactgaagggattcccttcctttcctctggtcgagagacaggccaacgaagtggactggtgggacatggtgtgtaacgtgaagaagctgatcaacgagaaaaaggaggatggcaaggtgttttggcagaatctggctggctacaagagacaggaagccctgagaccatacctgagcagcgaggaagatcggaagaagggaaagaaattcgctcggtaccagctgggcgacctgctgctgcacctggaaaagaagcacggcgaggactggggaaaggtgtacgacgaggcctgggagcggattgacaagaaagtggaaggcctgagcaagcacatcaagctggaagaggaacggagaagcgaggacgcccagagcaaggccgccctgaccgactggctgcgggctaaggccagcttcgtgatcgagggcctgaaggaggccgacaaggacgagttctgcagatgcgagctgaagctgcagaagtggtacggggacctgcggggaaagcccttcgccatcgaagccgagaacagcatcctggacatcagcggcttcagcaagcagtacaactgtgccttcatctggcagaaggacggcgtgaagaagctgaacctgtacctgatcatcaactacttcaagggcggcaagctgcggttcaagaagatcaaacctgaagccttcgaagccaacagattctacaccgtgatcaacaaaaagagcggcgagatcgtgcccatggaggtgaacttcaacttcgacgaccccaacctgatcatcctgcctctggcctttggcaagagacagggcagagaattcatctggaacgacctgctgtccctggaaaccggcagcctgaagctggccaacggaagagtgatcgagaagacactgtacaacagaagaacccggcaggatgagcctgccctgttcgtggccctgaccttcgagcggcgggaggtcctggactcctccaatatcaaaccaatgaacctgatcggcgtggcaagaggcgaaaacatccccgccgtgatcgccctgaccgaccccgagggctgcccactgagccggtttaaggatagcctgggaaacccaacccacatcctgagaatcggcgagagctataaggagaagcagcggaccatccaggccaagaaggaggtggagcagcggagagccggcggctacagccggaagtacgccagcaaagccaagaatctggcagacgatatggtgagaaacaccgctagagatctgctgtactacgccgtgacccaggatgccatgctgatcttcgccaacctgagccggggcttcggccggcagggcaagcggaccttcatggccgagagacagtacacacggatggaggactggctgaccgccaagctggcctacgagggcctgagcaagacctacctgtccaagacactggcccagtacacctccaagacatgcagcaactgtgggtttaccatcaccagcgccgactacgacagggtgctggagaagctgaagaagacagcaacaggctggatgaccacaattaacggcaaggagctgaaggtggagggccagattacctactacaacagatacaagagacagaacgtagtcaaggacctgtccgtcgagctggatagactgagcgaagaatctgtgaacaacgacatctcctcctggacaaagggcagaagcggagaagctctgagcctcctgaagaaaagattctcccatagacccgtgcaggagaagttcgtgtgcctgaactgcggcttcgagacacacgcagccgagcaagccgccctgaacatcgccagatcctggctgttcctgcggagccaggagtacaagaaataccagacaaacaagacaaccggcaacaccgataagagagccttcgtcgagacctggcagtccttttaccggaagaagcttaaggaggtgtggaaacctgccgtgcggtctggcggatctggcggaggctcctatgagcctgggcagcgagctgttcagggacgtggccatcgtgttcagccaggaggagtggcagtgcctggcccccgcccagagggacctgtacagggacgtgatgctggagacctacaacaacctggtgagcctgggcctggccatcagcaagcccgacgtgatcagcttcctggagcagggcaaggagccctggatggtggagagggtggtgagcggcggcctgtgccccgtgctggagagcggatctggctccggcagcggccccaagaaaaagagaaaagtctaagctgccttctgcggggcttgccttctggccatgcccttcttctctcccttgcacctgtacctcttggtctttgaataaagcctgagtaggaaggctagcaaaaaaaaaaaaaaaaaaaaaaaaaaaaaaaaaaaaaaaaaaaaaaaaaaaaaaaaaaaaaaaaaaaaaaaaaaaaaaaa

SEQ ID NO: 16491 - RNA, 9485 nt, synthetic construct
  source 1..9485: mol_type = other RNA
aggaaataagagagaaaagaagagtaagaagaaatataagagccaccatggcccctaagaagaagcgtaaagtgagccggatggaacgcctcgtctacgaggtgcggcagaagtgcagaaacatcgaggacatctgcatctcctgcggatctctgaacgtgaccctggagcacccactgttcatcggcggcatgtgccagaactgtaaaaactgttttctggagtgtgcctatcaatacgacgatgacggctaccagagctactgcaccatctgttgcggcggaagagaggtgctgatgtgtggaaataacaactgctgccggtgcttctgcgtggaatgcgtggacctgctggtgggccccggcgccgcccaggccgctattaaggaagatccttggaactgctacatgtgcggccacaagggcacatacggcctgctgagacggagagaggactggcctagcagactgcagatgttcttcgccaataaccacgaccaggagttcgacccccctaaggtgtaccctcccgtccccgccgagaagagaaagcccatccgggtcctgagcctgttcgatggcatcgccaccggtctgctggtgctgaaggacctgggcatccaggtggataggtacattgcctccgaggtgtgcgaggactccatcaccgtgggaatggtgcgtcatcagggcaagatcatgtacgtgggcgacgtgcggagcgtgacacagaagcatatccaggagtggggccctttcgacctggtgatcggcggcagcccttgcaatgacctgagcatcgtgaacccagcccggaagggcctgtacgagggaaccggcagactgttcttcgagttttacagactgctgcacgacgcccggcctaaggaaggcgacgaccggcccttcttttggctgttcgagaatgtggtggccatgggagtcagcgacaagcgggatattagccggttcctggagagcaaccccgtgatgatcgatgccaaggaagtgagcgccgcccaccgggccagatacttctggggcaatctgcctggcatgaacagacccctggccagcaccgtgaacgacaagctggagctgcaggagtgcctggagcacggccggatcgccaagttcagcaaggtgagaaccatcaccacccgaagcaacagcatcaaacaaggcaaggaccagcactttcctgtgttcatgaacgagaaggaggacatcctgtggtgtaccgagatggagagagtgttcgggttcccagtccactacacagatgtcagcaacatgtctagactggccagacagagactgctgggaagaagctggtccgtccctgtgatcagacacctgttcgcccctctgaaggagtacttcgcctgcgtgagcagcggcaacagcaacgccaacagccggggccccagcttctctagcggcctggtgccactgtccctgagagggagccacatgggccccatggagatctacaaaaccgtgagcgcctggaagcggcagcctgtgcgcgtgctgagcctgtttcggaatatcgataaagtcctgaaaagcctgggattcctggagagcggctctggctccggcggtggcaccctgaagtacgtggaggatgtgacaaacgtggtcagacgggatgtggagaagtggggccccttcgatctggtgtacggcagcacccaacccctgggcagctcttgtgaccggtgccctggctggtacatgtttcagttccaccggatcctgcagtacgccctgccgagacaggagtcccagcggccattcttttggattttcatggacaacttgctgctgaccgaggatgaccaggaaactaccactcggttcctgcagaccgaagccgtgaccctgcaggacgtgagaggccgggactaccagaacgccatgcgggtgtggtccaacatccctggactgaaaagcaagcacgcacctctgacccctaaagaagaggagtacctgcaggcccaggtgcggagcagaagcaagctggacgcccctaaggtggatctgctggtgaagaattgcctcctgcccctgagagagtacttcaagtatttcagccagaatagtctgcccctgggaggcagcggcggcggcgccctggtgacatttgaggacgtcgccgtgcggttcacccaggaggaatgggctctgctggatccttctcagaaaatcctgtaccgggacgtgatgagagagacataccggaatctgacctccgtgggcatcaactgggaatgttgggaccttgaagcctgcttcagaagcctgggaagaaacctgagagtgcaggtggtgaagagaaagtgcgagctgaccaacagcggcccctgcgccgagggcggcccaagcagcggcgcccctcctcccagcggcggcagcccagccggctccccaacctctaccgaggagggcacctctgagtccgccacccccgagagcggccctggcacctccaccgagcccagcgagggcagcgcacccggcagccctgccggcagccccacctccacagaggagggaaccagcaccgagcccagcgaaggcagcgccccaggcaccagcaccgagcctagtgagcaggagattaaacggatcaacaagatcagaagaagacttgtgaaagacagcaacaccaagaaggccggcaagacaggccccatgaaaaccctgctggttagagtgatgacacccgatctgagagagcggctggaaaacctgagaaagaagcctgaaaatatcccccagcccatcagcaatacatctagagccaacctgaataagctgctgaccgattacaccgaaatgaagaaggcgatcctgcatgtgtactgggaagagttccagaaggaccctgtgggcctgatgagccgggtggcccagcctgccagcaagaagatcgatcagaacaagctgaaacctgagatggacgagaagggcaacctgaccaccgccggctttgcctgctctcagtgtggccagcccctgttcgtgtacaagctggagcaggtgtctgagaagggcaaggcttacaccaactacttcggacggtgcaatgtggccgagcacgaaaagctgatcctgctggcccagctgaagcccgagaaggatagcgacgaagccgtgacatatagcctgggaaagtttgggcagagggccctggatttctacagcattcatgtgaccaaggagtccacccaccccgtgaagcccctggcccagatcgccggaaacagatacgcctccggacctgtgggaaaggccctgagcgacgcatgtatgggcacaatcgcctccttcctgtctaagtaccaggacatcatcatcgaacaccagaaggtggtgaagggcaaccagaagagactggagagcctgcgggagctggccggcaaggaaaacctggaataccctagcgtgaccctgccacctcagcctcacaccaaggagggcgttgatgcctacaacgaagtgatcgcccgggtgcgaatgtgggtgaacctgaacctgtggcagaagctgaagctaagcagagatgatgccaagcctctgctgagactgaagggattcccttcctttcctctggtcgagagacaggccaacgaagtggactggtgggacatggtgtgtaacgtgaagaagctgatcaacgagaaaaaggaggatggcaaggtgttttggcagaatctggctggctacaagagacaggaagccctgagaccatacctgagcagcgaggaagatcggaagaagggaaagaaattcgctcggtaccagctgggcgacctgctgctgcacctggaaaagaagcacggcgaggactggggaaaggtgtacgacgaggcctgggagcggattgacaagaaagtggaaggcctgagcaagcacatcaagctggaagaggaacggagaagcgaggacgcccagagcaaggccgccctgaccgactggctgcgggctaaggccagcttcgtgatcgagggcctgaaggaggccgacaaggacgagttctgcagatgcgagctgaagctgcagaagtggtacggggacctgcggggaaagcccttcgccatcgaagccgagaacagcatcctggacatcagcggcttcagcaagcagtacaactgtgccttcatctggcagaaggacggcgtgaagaagctgaacctgtacctgatcatcaactacttcaagggcggcaagctgcggttcaagaagatcaaacctgaagccttcgaagccaacagattctacaccgtgatcaacaaaaagagcggcgagatcgtgcccatggaggtgaacttcaacttcgacgaccccaacctgatcatcctgcctctggcctttggcaagagacagggcagagaattcatctggaacgacctgctgtccctggaaaccggcagcctgaagctggccaacggaagagtgatcgagaagacactgtacaacagaagaacccggcaggatgagcctgccctgttcgtggccctgaccttcgagcggcgggaggtcctggactcctccaatatcaaaccaatgaacctgatcggcgtggcaagaggcgaaaacatccccgccgtgatcgccctgaccgaccccgagggctgcccactgagccggtttaaggatagcctgggaaacccaacccacatcctgagaatcggcgagagctataaggagaagcagcggaccatccaggccaagaaggaggtggagcagcggagagccggcggctacagccggaagtacgccagcaaagccaagaatctggcagacgatatggtgagaaacaccgctagagatctgctgtactacgccgtgacccaggatgccatgctgatcttcgccaacctgagccggggcttcggccggcagggcaagcggaccttcatggccgagagacagtacacacggatggaggactggctgaccgccaagctggcctacgagggcctgagcaagacctacctgtccaagacactggcccagtacacctccaagacatgcagcaactgtgggtttaccatcaccagcgccgactacgacagggtgctggagaagctgaagaagacagcaacaggctggatgaccacaattaacggcaaggagctgaaggtggagggccagattacctactacaacagatacaagagacagaacgtagtcaaggacctgtccgtcgagctggatagactgagcgaagaatctgtgaacaacgacatctcctcctggacaaagggcagaagcggagaagctctgagcctcctgaagaaaagattctcccatagacccgtgcaggagaagttcgtgtgcctgaactgcggcttcgagacacacgcagccgagcaagccgccctgaacatcgccagatcctggctgttcctgcggagccaggagtacaagaaataccagacaaacaagacaaccggcaacaccgataagagagccttcgtcgagacctggcagtccttttaccggaagaagcttaaggaggtgtggaaacctgccgtgcggtctggcggatctggcggaggctccatgctgcagaccgtgtggttccaggagcccgtgaccttcgaggacgtggccgtgtacttcacccagaacgagtgggccagcctgcaccccacccagagggccctgtacagggaggtgatgctggagaactacgccaacgtgaccagcctgagcgccttccccttccccaagcccgacctgatcttccagctggagcagggcgaggccgcctggggccccgacccctggaccctggccggcggcggcggcccaagcagcggcgcccctcctcccagcggcggcagcccagccggctccccaacctctaccgaggagggcacctctgagtccgccacccccgagagcggccctggcacctccaccgagcccagcgagggcagcgcacccggcagccctgccggcagccccacctccacagaggagggaaccagcaccgagcccagcgaaggcagcgccccaggcaccagcaccgagcctagtgagcaggagattaaacggatcaacaagatcagaagaagacttgtgaaagacagcaacaccaagaaggccggcaagacaggccccatgaaaaccctgctggttagagtgatgacacccgatctgagagagcggctggaaaacctgagaaagaagcctgaaaatatcccccagcccatcagcaatacatctagagccaacctgaataagctgctgaccgattacaccgaaatgaagaaggcgatcctgcatgtgtactgggaagagttccagaaggaccctgtgggcctgatgagccgggtggcccagcctgccagcaagaagatcgatcagaacaagctgaaacctgagatggacgagaagggcaacctgaccaccgccggctttgcctgctctcagtgtggccagcccctgttcgtgtacaagctggagcaggtgtctgagaagggcaaggcttacaccaactacttcggacggtgcaatgtggccgagcacgaaaagctgatcctgctggcccagctgaagcccgagaaggatagcgacgaagccgtgacatatagcctgggaaagtttgggcagagggccctggatttctacagcattcatgtgaccaaggagtccacccaccccgtgaagcccctggcccagatcgccggaaacagatacgcctccggacctgtgggaaaggccctgagcgacgcatgtatgggcacaatcgcctccttcctgtctaagtaccaggacatcatcatcgaacaccagaaggtggtgaagggcaaccagaagagactggagagcctgcgggagctggccggcaaggaaaacctggaataccctagcgtgaccctgccacctcagcctcacaccaaggagggcgttgatgcctacaacgaagtgatcgcccgggtgcgaatgtgggtgaacctgaacctgtggcagaagctgaagctaagcagagatgatgccaagcctctgctgagactgaagggattcccttcctttcctctggtcgagagacaggccaacgaagtggactggtgggacatggtgtgtaacgtgaagaagctgatcaacgagaaaaaggaggatggcaaggtgttttggcagaatctggctggctacaagagacaggaagccctgagaccatacctgagcagcgaggaagatcggaagaagggaaagaaattcgctcggtaccagctgggcgacctgctgctgcacctggaaaagaagcacggcgaggactggggaaaggtgtacgacgaggcctgggagcggattgacaagaaagtggaaggcctgagcaagcacatcaagctggaagaggaacggagaagcgaggacgcccagagcaaggccgccctgaccgactggctgcgggctaaggccagcttcgtgatcgagggcctgaaggaggccgacaaggacgagttctgcagatgcgagctgaagctgcagaagtggtacggggacctgcggggaaagcccttcgccatcgaagccgagaacagcatcctggacatcagcggcttcagcaagcagtacaactgtgccttcatctggcagaaggacggcgtgaagaagctgaacctgtacctgatcatcaactacttcaagggcggcaagctgcggttcaagaagatcaaacctgaagccttcgaagccaacagattctacaccgtgatcaacaaaaagagcggcgagatcgtgcccatggaggtgaacttcaacttcgacgaccccaacctgatcatcctgcctctggcctttggcaagagacagggcagagaattcatctggaacgacctgctgtccctggaaaccggcagcctgaagctggccaacggaagagtgatcgagaagacactgtacaacagaagaacccggcaggatgagcctgccctgttcgtggccctgaccttcgagcggcgggaggtcctggactcctccaatatcaaaccaatgaacctgatcggcgtggcaagaggcgaaaacatccccgccgtgatcgccctgaccgaccccgagggctgcccactgagccggtttaaggatagcctgggaaacccaacccacatcctgagaatcggcgagagctataaggagaagcagcggaccatccaggccaagaaggaggtggagcagcggagagccggcggctacagccggaagtacgccagcaaagccaagaatctggcagacgatatggtgagaaacaccgctagagatctgctgtactacgccgtgacccaggatgccatgctgatcttcgccaacctgagccggggcttcggccggcagggcaagcggaccttcatggccgagagacagtacacacggatggaggactggctgaccgccaagctggcctacgagggcctgagcaagacctacctgtccaagacactggcccagtacacctccaagacatgcagcaactgtgggtttaccatcaccagcgccgactacgacagggtgctggagaagctgaagaagacagcaacaggctggatgaccacaattaacggcaaggagctgaaggtggagggccagattacctactacaacagatacaagagacagaacgtagtcaaggacctgtccgtcgagctggatagactgagcgaagaatctgtgaacaacgacatctcctcctggacaaagggcagaagcggagaagctctgagcctcctgaagaaaagattctcccatagacccgtgcaggagaagttcgtgtgcctgaactgcggcttcgagacacacgcagccgagcaagccgccctgaacatcgccagatcctggctgttcctgcggagccaggagtacaagaaataccagacaaacaagacaaccggcaacaccgataagagagccttcgtcgagacctggcagtccttttaccggaagaagcttaaggaggtgtggaaacctgccgtgcggtctggcggatctggcggaggctcctatgctgcagaccgtgtggttccaggagcccgtgaccttcgaggacgtggccgtgtacttcacccagaacgagtgggccagcctgcaccccacccagagggccctgtacagggaggtgatgctggagaactacgccaacgtgaccagcctgagcgccttccccttccccaagcccgacctgatcttccagctggagcagggcgaggccgcctggggccccgacccctggaccctggccggcggcggatctggctccggcagcggccccaagaaaaagagaaaagtctaagctgccttctgcggggcttgccttctggccatgcccttcttctctcccttgcacctgtacctcttggtctttgaataaagcctgagtaggaaggctagcaaaaaaaaaaaaaaaaaaaaaaaaaaaaaaaaaaaaaaaaaaaaaaaaaaaaaaaaaaaaaaaaaaaaaaaaaaaaaaaa

SEQ ID NO: 16492 - RNA, 9485 nt, synthetic construct
  source 1..9485: mol_type = other RNA
aggaaataagagagaaaagaagagtaagaagaaatataagagccaccatggcccctaagaagaagcgtaaagtgagccggatggaacgcctcgtctacgaggtgcggcagaagtgcagaaacatcgaggacatctgcatctcctgcggatctctgaacgtgaccctggagcacccactgttcatcggcggcatgtgccagaactgtaaaaactgttttctggagtgtgcctatcaatacgacgatgacggctaccagagctactgcaccatctgttgcggcggaagagaggtgctgatgtgtggaaataacaactgctgccggtgcttctgcgtggaatgcgtggacctgctggtgggccccggcgccgcccaggccgctattaaggaagatccttggaactgctacatgtgcggccacaagggcacatacggcctgctgagacggagagaggactggcctagcagactgcagatgttcttcgccaataaccacgaccaggagttcgacccccctaaggtgtaccctcccgtccccgccgagaagagaaagcccatccgggtcctgagcctgttcgatggcatcgccaccggtctgctggtgctgaaggacctgggcatccaggtggataggtacattgcctccgaggtgtgcgaggactccatcaccgtgggaatggtgcgtcatcagggcaagatcatgtacgtgggcgacgtgcggagcgtgacacagaagcatatccaggagtggggccctttcgacctggtgatcggcggcagcccttgcaatgacctgagcatcgtgaacccagcccggaagggcctgtacgagggaaccggcagactgttcttcgagttttacagactgctgcacgacgcccggcctaaggaaggcgacgaccggcccttcttttggctgttcgagaatgtggtggccatgggagtcagcgacaagcgggatattagccggttcctggagagcaaccccgtgatgatcgatgccaaggaagtgagcgccgcccaccgggccagatacttctggggcaatctgcctggcatgaacagacccctggccagcaccgtgaacgacaagctggagctgcaggagtgcctggagcacggccggatcgccaagttcagcaaggtgagaaccatcaccacccgaagcaacagcatcaaacaaggcaaggaccagcactttcctgtgttcatgaacgagaaggaggacatcctgtggtgtaccgagatggagagagtgttcgggttcccagtccactacacagatgtcagcaacatgtctagactggccagacagagactgctgggaagaagctggtccgtccctgtgatcagacacctgttcgcccctctgaaggagtacttcgcctgcgtgagcagcggcaacagcaacgccaacagccggggccccagcttctctagcggcctggtgccactgtccctgagagggagccacatgggccccatggagatctacaaaaccgtgagcgcctggaagcggcagcctgtgcgcgtgctgagcctgtttcggaatatcgataaagtcctgaaaagcctgggattcctggagagcggctctggctccggcggtggcaccctgaagtacgtggaggatgtgacaaacgtggtcagacgggatgtggagaagtggggccccttcgatctggtgtacggcagcacccaacccctgggcagctcttgtgaccggtgccctggctggtacatgtttcagttccaccggatcctgcagtacgccctgccgagacaggagtcccagcggccattcttttggattttcatggacaacttgctgctgaccgaggatgaccaggaaactaccactcggttcctgcagaccgaagccgtgaccctgcaggacgtgagaggccgggactaccagaacgccatgcgggtgtggtccaacatccctggactgaaaagcaagcacgcacctctgacccctaaagaagaggagtacctgcaggcccaggtgcggagcagaagcaagctggacgcccctaaggtggatctgctggtgaagaattgcctcctgcccctgagagagtacttcaagtatttcagccagaatagtctgcccctgggaggcagcggcggcggcgccctggtgacatttgaggacgtcgccgtgcggttcacccaggaggaatgggctctgctggatccttctcagaaaatcctgtaccgggacgtgatgagagagacataccggaatctgacctccgtgggcatcaactgggaatgttgggaccttgaagcctgcttcagaagcctgggaagaaacctgagagtgcaggtggtgaagagaaagtgcgagctgaccaacagcggcccctgcgccgagggcggcccaagcagcggcgcccctcctcccagcggcggcagcccagccggctccccaacctctaccgaggagggcacctctgagtccgccacccccgagagcggccctggcacctccaccgagcccagcgagggcagcgcacccggcagccctgccggcagccccacctccacagaggagggaaccagcaccgagcccagcgaaggcagcgccccaggcaccagcaccgagcctagtgagcaggagattaaacggatcaacaagatcagaagaagacttgtgaaagacagcaacaccaagaaggccggcaagacaggccccatgaaaaccctgctggttagagtgatgacacccgatctgagagagcggctggaaaacctgagaaagaagcctgaaaatatcccccagcccatcagcaatacatctagagccaacctgaataagctgctgaccgattacaccgaaatgaagaaggcgatcctgcatgtgtactgggaagagttccagaaggaccctgtgggcctgatgagccgggtggcccagcctgccagcaagaagatcgatcagaacaagctgaaacctgagatggacgagaagggcaacctgaccaccgccggctttgcctgctctcagtgtggccagcccctgttcgtgtacaagctggagcaggtgtctgagaagggcaaggcttacaccaactacttcggacggtgcaatgtggccgagcacgaaaagctgatcctgctggcccagctgaagcccgagaaggatagcgacgaagccgtgacatatagcctgggaaagtttgggcagagggccctggatttctacagcattcatgtgaccaaggagtccacccaccccgtgaagcccctggcccagatcgccggaaacagatacgcctccggacctgtgggaaaggccctgagcgacgcatgtatgggcacaatcgcctccttcctgtctaagtaccaggacatcatcatcgaacaccagaaggtggtgaagggcaaccagaagagactggagagcctgcgggagctggccggcaaggaaaacctggaataccctagcgtgaccctgccacctcagcctcacaccaaggagggcgttgatgcctacaacgaagtgatcgcccgggtgcgaatgtgggtgaacctgaacctgtggcagaagctgaagctaagcagagatgatgccaagcctctgctgagactgaagggattcccttcctttcctctggtcgagagacaggccaacgaagtggactggtgggacatggtgtgtaacgtgaagaagctgatcaacgagaaaaaggaggatggcaaggtgttttggcagaatctggctggctacaagagacaggaagccctgagaccatacctgagcagcgaggaagatcggaagaagggaaagaaattcgctcggtaccagctgggcgacctgctgctgcacctggaaaagaagcacggcgaggactggggaaaggtgtacgacgaggcctgggagcggattgacaagaaagtggaaggcctgagcaagcacatcaagctggaagaggaacggagaagcgaggacgcccagagcaaggccgccctgaccgactggctgcgggctaaggccagcttcgtgatcgagggcctgaaggaggccgacaaggacgagttctgcagatgcgagctgaagctgcagaagtggtacggggacctgcggggaaagcccttcgccatcgaagccgagaacagcatcctggacatcagcggcttcagcaagcagtacaactgtgccttcatctggcagaaggacggcgtgaagaagctgaacctgtacctgatcatcaactacttcaagggcggcaagctgcggttcaagaagatcaaacctgaagccttcgaagccaacagattctacaccgtgatcaacaaaaagagcggcgagatcgtgcccatggaggtgaacttcaacttcgacgaccccaacctgatcatcctgcctctggcctttggcaagagacagggcagagaattcatctggaacgacctgctgtccctggaaaccggcagcctgaagctggccaacggaagagtgatcgagaagacactgtacaacagaagaacccggcaggatgagcctgccctgttcgtggccctgaccttcgagcggcgggaggtcctggactcctccaatatcaaaccaatgaacctgatcggcgtggcaagaggcgaaaacatccccgccgtgatcgccctgaccgaccccgagggctgcccactgagccggtttaaggatagcctgggaaacccaacccacatcctgagaatcggcgagagctataaggagaagcagcggaccatccaggccaagaaggaggtggagcagcggagagccggcggctacagccggaagtacgccagcaaagccaagaatctggcagacgatatggtgagaaacaccgctagagatctgctgtactacgccgtgacccaggatgccatgctgatcttcgccaacctgagccggggcttcggccggcagggcaagcggaccttcatggccgagagacagtacacacggatggaggactggctgaccgccaagctggcctacgagggcctgagcaagacctacctgtccaagacactggcccagtacacctccaagacatgcagcaactgtgggtttaccatcaccagcgccgactacgacagggtgctggagaagctgaagaagacagcaacaggctggatgaccacaattaacggcaaggagctgaaggtggagggccagattacctactacaacagatacaagagacagaacgtagtcaaggacctgtccgtcgagctggatagactgagcgaagaatctgtgaacaacgacatctcctcctggacaaagggcagaagcggagaagctctgagcctcctgaagaaaagattctcccatagacccgtgcaggagaagttcgtgtgcctgaactgcggcttcgagacacacgcagccgagcaagccgccctgaacatcgccagatcctggctgttcctgcggagccaggagtacaagaaataccagacaaacaagacaaccggcaacaccgataagagagccttcgtcgagacctggcagtccttttaccggaagaagcttaaggaggtgtggaaacctgccgtgcggtctggcggatctggcggaggctccttccaggagctggtgaccttcgaggacgtgtgcgtggacttcaccagcgaggagctgagctgcctgagcaccagccagaggaccctgtacagggaggtgatgctggagaactacaggaacctggtgagcctgggccaccagttcagcaagcccgagctgatcagcaggctggaggaggaggagttccaggccatggccgccgacagcagcgccgtggccggcgacagcggcgccgtggccggcggcggcccaagcagcggcgcccctcctcccagcggcggcagcccagccggctccccaacctctaccgaggagggcacctctgagtccgccacccccgagagcggccctggcacctccaccgagcccagcgagggcagcgcacccggcagccctgccggcagccccacctccacagaggagggaaccagcaccgagcccagcgaaggcagcgccccaggcaccagcaccgagcctagtgagcaggagattaaacggatcaacaagatcagaagaagacttgtgaaagacagcaacaccaagaaggccggcaagacaggccccatgaaaaccctgctggttagagtgatgacacccgatctgagagagcggctggaaaacctgagaaagaagcctgaaaatatcccccagcccatcagcaatacatctagagccaacctgaataagctgctgaccgattacaccgaaatgaagaaggcgatcctgcatgtgtactgggaagagttccagaaggaccctgtgggcctgatgagccgggtggcccagcctgccagcaagaagatcgatcagaacaagctgaaacctgagatggacgagaagggcaacctgaccaccgccggctttgcctgctctcagtgtggccagcccctgttcgtgtacaagctggagcaggtgtctgagaagggcaaggcttacaccaactacttcggacggtgcaatgtggccgagcacgaaaagctgatcctgctggcccagctgaagcccgagaaggatagcgacgaagccgtgacatatagcctgggaaagtttgggcagagggccctggatttctacagcattcatgtgaccaaggagtccacccaccccgtgaagcccctggcccagatcgccggaaacagatacgcctccggacctgtgggaaaggccctgagcgacgcatgtatgggcacaatcgcctccttcctgtctaagtaccaggacatcatcatcgaacaccagaaggtggtgaagggcaaccagaagagactggagagcctgcgggagctggccggcaaggaaaacctggaataccctagcgtgaccctgccacctcagcctcacaccaaggagggcgttgatgcctacaacgaagtgatcgcccgggtgcgaatgtgggtgaacctgaacctgtggcagaagctgaagctaagcagagatgatgccaagcctctgctgagactgaagggattcccttcctttcctctggtcgagagacaggccaacgaagtggactggtgggacatggtgtgtaacgtgaagaagctgatcaacgagaaaaaggaggatggcaaggtgttttggcagaatctggctggctacaagagacaggaagccctgagaccatacctgagcagcgaggaagatcggaagaagggaaagaaattcgctcggtaccagctgggcgacctgctgctgcacctggaaaagaagcacggcgaggactggggaaaggtgtacgacgaggcctgggagcggattgacaagaaagtggaaggcctgagcaagcacatcaagctggaagaggaacggagaagcgaggacgcccagagcaaggccgccctgaccgactggctgcgggctaaggccagcttcgtgatcgagggcctgaaggaggccgacaaggacgagttctgcagatgcgagctgaagctgcagaagtggtacggggacctgcggggaaagcccttcgccatcgaagccgagaacagcatcctggacatcagcggcttcagcaagcagtacaactgtgccttcatctggcagaaggacggcgtgaagaagctgaacctgtacctgatcatcaactacttcaagggcggcaagctgcggttcaagaagatcaaacctgaagccttcgaagccaacagattctacaccgtgatcaacaaaaagagcggcgagatcgtgcccatggaggtgaacttcaacttcgacgaccccaacctgatcatcctgcctctggcctttggcaagagacagggcagagaattcatctggaacgacctgctgtccctggaaaccggcagcctgaagctggccaacggaagagtgatcgagaagacactgtacaacagaagaacccggcaggatgagcctgccctgttcgtggccctgaccttcgagcggcgggaggtcctggactcctccaatatcaaaccaatgaacctgatcggcgtggcaagaggcgaaaacatccccgccgtgatcgccctgaccgaccccgagggctgcccactgagccggtttaaggatagcctgggaaacccaacccacatcctgagaatcggcgagagctataaggagaagcagcggaccatccaggccaagaaggaggtggagcagcggagagccggcggctacagccggaagtacgccagcaaagccaagaatctggcagacgatatggtgagaaacaccgctagagatctgctgtactacgccgtgacccaggatgccatgctgatcttcgccaacctgagccggggcttcggccggcagggcaagcggaccttcatggccgagagacagtacacacggatggaggactggctgaccgccaagctggcctacgagggcctgagcaagacctacctgtccaagacactggcccagtacacctccaagacatgcagcaactgtgggtttaccatcaccagcgccgactacgacagggtgctggagaagctgaagaagacagcaacaggctggatgaccacaattaacggcaaggagctgaaggtggagggccagattacctactacaacagatacaagagacagaacgtagtcaaggacctgtccgtcgagctggatagactgagcgaagaatctgtgaacaacgacatctcctcctggacaaagggcagaagcggagaagctctgagcctcctgaagaaaagattctcccatagacccgtgcaggagaagttcgtgtgcctgaactgcggcttcgagacacacgcagccgagcaagccgccctgaacatcgccagatcctggctgttcctgcggagccaggagtacaagaaataccagacaaacaagacaaccggcaacaccgataagagagccttcgtcgagacctggcagtccttttaccggaagaagcttaaggaggtgtggaaacctgccgtgcggtctggcggatctggcggaggctcctttccaggagctggtgaccttcgaggacgtgtgcgtggacttcaccagcgaggagctgagctgcctgagcaccagccagaggaccctgtacagggaggtgatgctggagaactacaggaacctggtgagcctgggccaccagttcagcaagcccgagctgatcagcaggctggaggaggaggagttccaggccatggccgccgacagcagcgccgtggccggcgacagcggcgccgtggccggcggatctggctccggcagcggccccaagaaaaagagaaaagtctaagctgccttctgcggggcttgccttctggccatgcccttcttctctcccttgcacctgtacctcttggtctttgaataaagcctgagtaggaaggctagcaaaaaaaaaaaaaaaaaaaaaaaaaaaaaaaaaaaaaaaaaaaaaaaaaaaaaaaaaaaaaaaaaaaaaaaaaaaaaaaa

SEQ ID NO: 16493 - RNA, 9485 nt, synthetic construct
  source 1..9485: mol_type = other RNA
aggaaataagagagaaaagaagagtaagaagaaatataagagccaccatggcccctaagaagaagcgtaaagtgagccggatggaacgcctcgtctacgaggtgcggcagaagtgcagaaacatcgaggacatctgcatctcctgcggatctctgaacgtgaccctggagcacccactgttcatcggcggcatgtgccagaactgtaaaaactgttttctggagtgtgcctatcaatacgacgatgacggctaccagagctactgcaccatctgttgcggcggaagagaggtgctgatgtgtggaaataacaactgctgccggtgcttctgcgtggaatgcgtggacctgctggtgggccccggcgccgcccaggccgctattaaggaagatccttggaactgctacatgtgcggccacaagggcacatacggcctgctgagacggagagaggactggcctagcagactgcagatgttcttcgccaataaccacgaccaggagttcgacccccctaaggtgtaccctcccgtccccgccgagaagagaaagcccatccgggtcctgagcctgttcgatggcatcgccaccggtctgctggtgctgaaggacctgggcatccaggtggataggtacattgcctccgaggtgtgcgaggactccatcaccgtgggaatggtgcgtcatcagggcaagatcatgtacgtgggcgacgtgcggagcgtgacacagaagcatatccaggagtggggccctttcgacctggtgatcggcggcagcccttgcaatgacctgagcatcgtgaacccagcccggaagggcctgtacgagggaaccggcagactgttcttcgagttttacagactgctgcacgacgcccggcctaaggaaggcgacgaccggcccttcttttggctgttcgagaatgtggtggccatgggagtcagcgacaagcgggatattagccggttcctggagagcaaccccgtgatgatcgatgccaaggaagtgagcgccgcccaccgggccagatacttctggggcaatctgcctggcatgaacagacccctggccagcaccgtgaacgacaagctggagctgcaggagtgcctggagcacggccggatcgccaagttcagcaaggtgagaaccatcaccacccgaagcaacagcatcaaacaaggcaaggaccagcactttcctgtgttcatgaacgagaaggaggacatcctgtggtgtaccgagatggagagagtgttcgggttcccagtccactacacagatgtcagcaacatgtctagactggccagacagagactgctgggaagaagctggtccgtccctgtgatcagacacctgttcgcccctctgaaggagtacttcgcctgcgtgagcagcggcaacagcaacgccaacagccggggccccagcttctctagcggcctggtgccactgtccctgagagggagccacatgggccccatggagatctacaaaaccgtgagcgcctggaagcggcagcctgtgcgcgtgctgagcctgtttcggaatatcgataaagtcctgaaaagcctgggattcctggagagcggctctggctccggcggtggcaccctgaagtacgtggaggatgtgacaaacgtggtcagacgggatgtggagaagtggggccccttcgatctggtgtacggcagcacccaacccctgggcagctcttgtgaccggtgccctggctggtacatgtttcagttccaccggatcctgcagtacgccctgccgagacaggagtcccagcggccattcttttggattttcatggacaacttgctgctgaccgaggatgaccaggaaactaccactcggttcctgcagaccgaagccgtgaccctgcaggacgtgagaggccgggactaccagaacgccatgcgggtgtggtccaacatccctggactgaaaagcaagcacgcacctctgacccctaaagaagaggagtacctgcaggcccaggtgcggagcagaagcaagctggacgcccctaaggtggatctgctggtgaagaattgcctcctgcccctgagagagtacttcaagtatttcagccagaatagtctgcccctgggaggcagcggcggcggcgccctggtgacatttgaggacgtcgccgtgcggttcacccaggaggaatgggctctgctggatccttctcagaaaatcctgtaccgggacgtgatgagagagacataccggaatctgacctccgtgggcatcaactgggaatgttgggaccttgaagcctgcttcagaagcctgggaagaaacctgagagtgcaggtggtgaagagaaagtgcgagctgaccaacagcggcccctgcgccgagggcggcccaagcagcggcgcccctcctcccagcggcggcagcccagccggctccccaacctctaccgaggagggcacctctgagtccgccacccccgagagcggccctggcacctccaccgagcccagcgagggcagcgcacccggcagccctgccggcagccccacctccacagaggagggaaccagcaccgagcccagcgaaggcagcgccccaggcaccagcaccgagcctagtgagcaggagattaaacggatcaacaagatcagaagaagacttgtgaaagacagcaacaccaagaaggccggcaagacaggccccatgaaaaccctgctggttagagtgatgacacccgatctgagagagcggctggaaaacctgagaaagaagcctgaaaatatcccccagcccatcagcaatacatctagagccaacctgaataagctgctgaccgattacaccgaaatgaagaaggcgatcctgcatgtgtactgggaagagttccagaaggaccctgtgggcctgatgagccgggtggcccagcctgccagcaagaagatcgatcagaacaagctgaaacctgagatggacgagaagggcaacctgaccaccgccggctttgcctgctctcagtgtggccagcccctgttcgtgtacaagctggagcaggtgtctgagaagggcaaggcttacaccaactacttcggacggtgcaatgtggccgagcacgaaaagctgatcctgctggcccagctgaagcccgagaaggatagcgacgaagccgtgacatatagcctgggaaagtttgggcagagggccctggatttctacagcattcatgtgaccaaggagtccacccaccccgtgaagcccctggcccagatcgccggaaacagatacgcctccggacctgtgggaaaggccctgagcgacgcatgtatgggcacaatcgcctccttcctgtctaagtaccaggacatcatcatcgaacaccagaaggtggtgaagggcaaccagaagagactggagagcctgcgggagctggccggcaaggaaaacctggaataccctagcgtgaccctgccacctcagcctcacaccaaggagggcgttgatgcctacaacgaagtgatcgcccgggtgcgaatgtgggtgaacctgaacctgtggcagaagctgaagctaagcagagatgatgccaagcctctgctgagactgaagggattcccttcctttcctctggtcgagagacaggccaacgaagtggactggtgggacatggtgtgtaacgtgaagaagctgatcaacgagaaaaaggaggatggcaaggtgttttggcagaatctggctggctacaagagacaggaagccctgagaccatacctgagcagcgaggaagatcggaagaagggaaagaaattcgctcggtaccagctgggcgacctgctgctgcacctggaaaagaagcacggcgaggactggggaaaggtgtacgacgaggcctgggagcggattgacaagaaagtggaaggcctgagcaagcacatcaagctggaagaggaacggagaagcgaggacgcccagagcaaggccgccctgaccgactggctgcgggctaaggccagcttcgtgatcgagggcctgaaggaggccgacaaggacgagttctgcagatgcgagctgaagctgcagaagtggtacggggacctgcggggaaagcccttcgccatcgaagccgagaacagcatcctggacatcagcggcttcagcaagcagtacaactgtgccttcatctggcagaaggacggcgtgaagaagctgaacctgtacctgatcatcaactacttcaagggcggcaagctgcggttcaagaagatcaaacctgaagccttcgaagccaacagattctacaccgtgatcaacaaaaagagcggcgagatcgtgcccatggaggtgaacttcaacttcgacgaccccaacctgatcatcctgcctctggcctttggcaagagacagggcagagaattcatctggaacgacctgctgtccctggaaaccggcagcctgaagctggccaacggaagagtgatcgagaagacactgtacaacagaagaacccggcaggatgagcctgccctgttcgtggccctgaccttcgagcggcgggaggtcctggactcctccaatatcaaaccaatgaacctgatcggcgtggcaagaggcgaaaacatccccgccgtgatcgccctgaccgaccccgagggctgcccactgagccggtttaaggatagcctgggaaacccaacccacatcctgagaatcggcgagagctataaggagaagcagcggaccatccaggccaagaaggaggtggagcagcggagagccggcggctacagccggaagtacgccagcaaagccaagaatctggcagacgatatggtgagaaacaccgctagagatctgctgtactacgccgtgacccaggatgccatgctgatcttcgccaacctgagccggggcttcggccggcagggcaagcggaccttcatggccgagagacagtacacacggatggaggactggctgaccgccaagctggcctacgagggcctgagcaagacctacctgtccaagacactggcccagtacacctccaagacatgcagcaactgtgggtttaccatcaccagcgccgactacgacagggtgctggagaagctgaagaagacagcaacaggctggatgaccacaattaacggcaaggagctgaaggtggagggccagattacctactacaacagatacaagagacagaacgtagtcaaggacctgtccgtcgagctggatagactgagcgaagaatctgtgaacaacgacatctcctcctggacaaagggcagaagcggagaagctctgagcctcctgaagaaaagattctcccatagacccgtgcaggagaagttcgtgtgcctgaactgcggcttcgagacacacgcagccgagcaagccgccctgaacatcgccagatcctggctgttcctgcggagccaggagtacaagaaataccagacaaacaagacaaccggcaacaccgataagagagccttcgtcgagacctggcagtccttttaccggaagaagcttaaggaggtgtggaaacctgccgtgcggtctggcggatctggcggaggctccatgaacatggagggcctggtgatgttccaggacctgagcatcgacttcagccaggaggagtgggagtgcctggacgccgcccagaaggacctgtacagggacgtgatgatggagaactacagcagcctggtgagcctgggcctgagcatccccaagcccgacgtgatcagcctgctggagcagggcaaggagccctggatggtgagcagggacatgctgggcggctggtgccccgacagcgagggcggcccaagcagcggcgcccctcctcccagcggcggcagcccagccggctccccaacctctaccgaggagggcacctctgagtccgccacccccgagagcggccctggcacctccaccgagcccagcgagggcagcgcacccggcagccctgccggcagccccacctccacagaggagggaaccagcaccgagcccagcgaaggcagcgccccaggcaccagcaccgagcctagtgagcaggagattaaacggatcaacaagatcagaagaagacttgtgaaagacagcaacaccaagaaggccggcaagacaggccccatgaaaaccctgctggttagagtgatgacacccgatctgagagagcggctggaaaacctgagaaagaagcctgaaaatatcccccagcccatcagcaatacatctagagccaacctgaataagctgctgaccgattacaccgaaatgaagaaggcgatcctgcatgtgtactgggaagagttccagaaggaccctgtgggcctgatgagccgggtggcccagcctgccagcaagaagatcgatcagaacaagctgaaacctgagatggacgagaagggcaacctgaccaccgccggctttgcctgctctcagtgtggccagcccctgttcgtgtacaagctggagcaggtgtctgagaagggcaaggcttacaccaactacttcggacggtgcaatgtggccgagcacgaaaagctgatcctgctggcccagctgaagcccgagaaggatagcgacgaagccgtgacatatagcctgggaaagtttgggcagagggccctggatttctacagcattcatgtgaccaaggagtccacccaccccgtgaagcccctggcccagatcgccggaaacagatacgcctccggacctgtgggaaaggccctgagcgacgcatgtatgggcacaatcgcctccttcctgtctaagtaccaggacatcatcatcgaacaccagaaggtggtgaagggcaaccagaagagactggagagcctgcgggagctggccggcaaggaaaacctggaataccctagcgtgaccctgccacctcagcctcacaccaaggagggcgttgatgcctacaacgaagtgatcgcccgggtgcgaatgtgggtgaacctgaacctgtggcagaagctgaagctaagcagagatgatgccaagcctctgctgagactgaagggattcccttcctttcctctggtcgagagacaggccaacgaagtggactggtgggacatggtgtgtaacgtgaagaagctgatcaacgagaaaaaggaggatggcaaggtgttttggcagaatctggctggctacaagagacaggaagccctgagaccatacctgagcagcgaggaagatcggaagaagggaaagaaattcgctcggtaccagctgggcgacctgctgctgcacctggaaaagaagcacggcgaggactggggaaaggtgtacgacgaggcctgggagcggattgacaagaaagtggaaggcctgagcaagcacatcaagctggaagaggaacggagaagcgaggacgcccagagcaaggccgccctgaccgactggctgcgggctaaggccagcttcgtgatcgagggcctgaaggaggccgacaaggacgagttctgcagatgcgagctgaagctgcagaagtggtacggggacctgcggggaaagcccttcgccatcgaagccgagaacagcatcctggacatcagcggcttcagcaagcagtacaactgtgccttcatctggcagaaggacggcgtgaagaagctgaacctgtacctgatcatcaactacttcaagggcggcaagctgcggttcaagaagatcaaacctgaagccttcgaagccaacagattctacaccgtgatcaacaaaaagagcggcgagatcgtgcccatggaggtgaacttcaacttcgacgaccccaacctgatcatcctgcctctggcctttggcaagagacagggcagagaattcatctggaacgacctgctgtccctggaaaccggcagcctgaagctggccaacggaagagtgatcgagaagacactgtacaacagaagaacccggcaggatgagcctgccctgttcgtggccctgaccttcgagcggcgggaggtcctggactcctccaatatcaaaccaatgaacctgatcggcgtggcaagaggcgaaaacatccccgccgtgatcgccctgaccgaccccgagggctgcccactgagccggtttaaggatagcctgggaaacccaacccacatcctgagaatcggcgagagctataaggagaagcagcggaccatccaggccaagaaggaggtggagcagcggagagccggcggctacagccggaagtacgccagcaaagccaagaatctggcagacgatatggtgagaaacaccgctagagatctgctgtactacgccgtgacccaggatgccatgctgatcttcgccaacctgagccggggcttcggccggcagggcaagcggaccttcatggccgagagacagtacacacggatggaggactggctgaccgccaagctggcctacgagggcctgagcaagacctacctgtccaagacactggcccagtacacctccaagacatgcagcaactgtgggtttaccatcaccagcgccgactacgacagggtgctggagaagctgaagaagacagcaacaggctggatgaccacaattaacggcaaggagctgaaggtggagggccagattacctactacaacagatacaagagacagaacgtagtcaaggacctgtccgtcgagctggatagactgagcgaagaatctgtgaacaacgacatctcctcctggacaaagggcagaagcggagaagctctgagcctcctgaagaaaagattctcccatagacccgtgcaggagaagttcgtgtgcctgaactgcggcttcgagacacacgcagccgagcaagccgccctgaacatcgccagatcctggctgttcctgcggagccaggagtacaagaaataccagacaaacaagacaaccggcaacaccgataagagagccttcgtcgagacctggcagtccttttaccggaagaagcttaaggaggtgtggaaacctgccgtgcggtctggcggatctggcggaggctcctatgaacatggagggcctggtgatgttccaggacctgagcatcgacttcagccaggaggagtgggagtgcctggacgccgcccagaaggacctgtacagggacgtgatgatggagaactacagcagcctggtgagcctgggcctgagcatccccaagcccgacgtgatcagcctgctggagcagggcaaggagccctggatggtgagcagggacatgctgggcggctggtgccccgacagcgagggatctggctccggcagcggccccaagaaaaagagaaaagtctaagctgccttctgcggggcttgccttctggccatgcccttcttctctcccttgcacctgtacctcttggtctttgaataaagcctgagtaggaaggctagcaaaaaaaaaaaaaaaaaaaaaaaaaaaaaaaaaaaaaaaaaaaaaaaaaaaaaaaaaaaaaaaaaaaaaaaaaaaaaaaa

SEQ ID NO: 16494 - RNA, 9485 nt, synthetic construct
  source 1..9485: mol_type = other RNA
aggaaataagagagaaaagaagagtaagaagaaatataagagccaccatggcccctaagaagaagcgtaaagtgagccggatggaacgcctcgtctacgaggtgcggcagaagtgcagaaacatcgaggacatctgcatctcctgcggatctctgaacgtgaccctggagcacccactgttcatcggcggcatgtgccagaactgtaaaaactgttttctggagtgtgcctatcaatacgacgatgacggctaccagagctactgcaccatctgttgcggcggaagagaggtgctgatgtgtggaaataacaactgctgccggtgcttctgcgtggaatgcgtggacctgctggtgggccccggcgccgcccaggccgctattaaggaagatccttggaactgctacatgtgcggccacaagggcacatacggcctgctgagacggagagaggactggcctagcagactgcagatgttcttcgccaataaccacgaccaggagttcgacccccctaaggtgtaccctcccgtccccgccgagaagagaaagcccatccgggtcctgagcctgttcgatggcatcgccaccggtctgctggtgctgaaggacctgggcatccaggtggataggtacattgcctccgaggtgtgcgaggactccatcaccgtgggaatggtgcgtcatcagggcaagatcatgtacgtgggcgacgtgcggagcgtgacacagaagcatatccaggagtggggccctttcgacctggtgatcggcggcagcccttgcaatgacctgagcatcgtgaacccagcccggaagggcctgtacgagggaaccggcagactgttcttcgagttttacagactgctgcacgacgcccggcctaaggaaggcgacgaccggcccttcttttggctgttcgagaatgtggtggccatgggagtcagcgacaagcgggatattagccggttcctggagagcaaccccgtgatgatcgatgccaaggaagtgagcgccgcccaccgggccagatacttctggggcaatctgcctggcatgaacagacccctggccagcaccgtgaacgacaagctggagctgcaggagtgcctggagcacggccggatcgccaagttcagcaaggtgagaaccatcaccacccgaagcaacagcatcaaacaaggcaaggaccagcactttcctgtgttcatgaacgagaaggaggacatcctgtggtgtaccgagatggagagagtgttcgggttcccagtccactacacagatgtcagcaacatgtctagactggccagacagagactgctgggaagaagctggtccgtccctgtgatcagacacctgttcgcccctctgaaggagtacttcgcctgcgtgagcagcggcaacagcaacgccaacagccggggccccagcttctctagcggcctggtgccactgtccctgagagggagccacatgggccccatggagatctacaaaaccgtgagcgcctggaagcggcagcctgtgcgcgtgctgagcctgtttcggaatatcgataaagtcctgaaaagcctgggattcctggagagcggctctggctccggcggtggcaccctgaagtacgtggaggatgtgacaaacgtggtcagacgggatgtggagaagtggggccccttcgatctggtgtacggcagcacccaacccctgggcagctcttgtgaccggtgccctggctggtacatgtttcagttccaccggatcctgcagtacgccctgccgagacaggagtcccagcggccattcttttggattttcatggacaacttgctgctgaccgaggatgaccaggaaactaccactcggttcctgcagaccgaagccgtgaccctgcaggacgtgagaggccgggactaccagaacgccatgcgggtgtggtccaacatccctggactgaaaagcaagcacgcacctctgacccctaaagaagaggagtacctgcaggcccaggtgcggagcagaagcaagctggacgcccctaaggtggatctgctggtgaagaattgcctcctgcccctgagagagtacttcaagtatttcagccagaatagtctgcccctgggaggcagcggcggcggcgccctggtgacatttgaggacgtcgccgtgcggttcacccaggaggaatgggctctgctggatccttctcagaaaatcctgtaccgggacgtgatgagagagacataccggaatctgacctccgtgggcatcaactgggaatgttgggaccttgaagcctgcttcagaagcctgggaagaaacctgagagtgcaggtggtgaagagaaagtgcgagctgaccaacagcggcccctgcgccgagggcggcccaagcagcggcgcccctcctcccagcggcggcagcccagccggctccccaacctctaccgaggagggcacctctgagtccgccacccccgagagcggccctggcacctccaccgagcccagcgagggcagcgcacccggcagccctgccggcagccccacctccacagaggagggaaccagcaccgagcccagcgaaggcagcgccccaggcaccagcaccgagcctagtgagcaggagattaaacggatcaacaagatcagaagaagacttgtgaaagacagcaacaccaagaaggccggcaagacaggccccatgaaaaccctgctggttagagtgatgacacccgatctgagagagcggctggaaaacctgagaaagaagcctgaaaatatcccccagcccatcagcaatacatctagagccaacctgaataagctgctgaccgattacaccgaaatgaagaaggcgatcctgcatgtgtactgggaagagttccagaaggaccctgtgggcctgatgagccgggtggcccagcctgccagcaagaagatcgatcagaacaagctgaaacctgagatggacgagaagggcaacctgaccaccgccggctttgcctgctctcagtgtggccagcccctgttcgtgtacaagctggagcaggtgtctgagaagggcaaggcttacaccaactacttcggacggtgcaatgtggccgagcacgaaaagctgatcctgctggcccagctgaagcccgagaaggatagcgacgaagccgtgacatatagcctgggaaagtttgggcagagggccctggatttctacagcattcatgtgaccaaggagtccacccaccccgtgaagcccctggcccagatcgccggaaacagatacgcctccggacctgtgggaaaggccctgagcgacgcatgtatgggcacaatcgcctccttcctgtctaagtaccaggacatcatcatcgaacaccagaaggtggtgaagggcaaccagaagagactggagagcctgcgggagctggccggcaaggaaaacctggaataccctagcgtgaccctgccacctcagcctcacaccaaggagggcgttgatgcctacaacgaagtgatcgcccgggtgcgaatgtgggtgaacctgaacctgtggcagaagctgaagctaagcagagatgatgccaagcctctgctgagactgaagggattcccttcctttcctctggtcgagagacaggccaacgaagtggactggtgggacatggtgtgtaacgtgaagaagctgatcaacgagaaaaaggaggatggcaaggtgttttggcagaatctggctggctacaagagacaggaagccctgagaccatacctgagcagcgaggaagatcggaagaagggaaagaaattcgctcggtaccagctgggcgacctgctgctgcacctggaaaagaagcacggcgaggactggggaaaggtgtacgacgaggcctgggagcggattgacaagaaagtggaaggcctgagcaagcacatcaagctggaagaggaacggagaagcgaggacgcccagagcaaggccgccctgaccgactggctgcgggctaaggccagcttcgtgatcgagggcctgaaggaggccgacaaggacgagttctgcagatgcgagctgaagctgcagaagtggtacggggacctgcggggaaagcccttcgccatcgaagccgagaacagcatcctggacatcagcggcttcagcaagcagtacaactgtgccttcatctggcagaaggacggcgtgaagaagctgaacctgtacctgatcatcaactacttcaagggcggcaagctgcggttcaagaagatcaaacctgaagccttcgaagccaacagattctacaccgtgatcaacaaaaagagcggcgagatcgtgcccatggaggtgaacttcaacttcgacgaccccaacctgatcatcctgcctctggcctttggcaagagacagggcagagaattcatctggaacgacctgctgtccctggaaaccggcagcctgaagctggccaacggaagagtgatcgagaagacactgtacaacagaagaacccggcaggatgagcctgccctgttcgtggccctgaccttcgagcggcgggaggtcctggactcctccaatatcaaaccaatgaacctgatcggcgtggcaagaggcgaaaacatccccgccgtgatcgccctgaccgaccccgagggctgcccactgagccggtttaaggatagcctgggaaacccaacccacatcctgagaatcggcgagagctataaggagaagcagcggaccatccaggccaagaaggaggtggagcagcggagagccggcggctacagccggaagtacgccagcaaagccaagaatctggcagacgatatggtgagaaacaccgctagagatctgctgtactacgccgtgacccaggatgccatgctgatcttcgccaacctgagccggggcttcggccggcagggcaagcggaccttcatggccgagagacagtacacacggatggaggactggctgaccgccaagctggcctacgagggcctgagcaagacctacctgtccaagacactggcccagtacacctccaagacatgcagcaactgtgggtttaccatcaccagcgccgactacgacagggtgctggagaagctgaagaagacagcaacaggctggatgaccacaattaacggcaaggagctgaaggtggagggccagattacctactacaacagatacaagagacagaacgtagtcaaggacctgtccgtcgagctggatagactgagcgaagaatctgtgaacaacgacatctcctcctggacaaagggcagaagcggagaagctctgagcctcctgaagaaaagattctcccatagacccgtgcaggagaagttcgtgtgcctgaactgcggcttcgagacacacgcagccgagcaagccgccctgaacatcgccagatcctggctgttcctgcggagccaggagtacaagaaataccagacaaacaagacaaccggcaacaccgataagagagccttcgtcgagacctggcagtccttttaccggaagaagcttaaggaggtgtggaaacctgccgtgcggtctggcggatctggcggaggctccagccagggcagcgtgaccttcagggacgtggccgtggacttcagcagggaggagtgggagtggctgcagcccgcccagagggacctgtacaggcacgtgatgctggagaactacggccacctggtgagcctgggcctgaacatcagcaagccccacgtggtgagcctgctggagcagggcaaggagccctggctgggcaaggacgccagcaggggcctgttcagcgccagcgagagcaacggcggcggcccaagcagcggcgcccctcctcccagcggcggcagcccagccggctccccaacctctaccgaggagggcacctctgagtccgccacccccgagagcggccctggcacctccaccgagcccagcgagggcagcgcacccggcagccctgccggcagccccacctccacagaggagggaaccagcaccgagcccagcgaaggcagcgccccaggcaccagcaccgagcctagtgagcaggagattaaacggatcaacaagatcagaagaagacttgtgaaagacagcaacaccaagaaggccggcaagacaggccccatgaaaaccctgctggttagagtgatgacacccgatctgagagagcggctggaaaacctgagaaagaagcctgaaaatatcccccagcccatcagcaatacatctagagccaacctgaataagctgctgaccgattacaccgaaatgaagaaggcgatcctgcatgtgtactgggaagagttccagaaggaccctgtgggcctgatgagccgggtggcccagcctgccagcaagaagatcgatcagaacaagctgaaacctgagatggacgagaagggcaacctgaccaccgccggctttgcctgctctcagtgtggccagcccctgttcgtgtacaagctggagcaggtgtctgagaagggcaaggcttacaccaactacttcggacggtgcaatgtggccgagcacgaaaagctgatcctgctggcccagctgaagcccgagaaggatagcgacgaagccgtgacatatagcctgggaaagtttgggcagagggccctggatttctacagcattcatgtgaccaaggagtccacccaccccgtgaagcccctggcccagatcgccggaaacagatacgcctccggacctgtgggaaaggccctgagcgacgcatgtatgggcacaatcgcctccttcctgtctaagtaccaggacatcatcatcgaacaccagaaggtggtgaagggcaaccagaagagactggagagcctgcgggagctggccggcaaggaaaacctggaataccctagcgtgaccctgccacctcagcctcacaccaaggagggcgttgatgcctacaacgaagtgatcgcccgggtgcgaatgtgggtgaacctgaacctgtggcagaagctgaagctaagcagagatgatgccaagcctctgctgagactgaagggattcccttcctttcctctggtcgagagacaggccaacgaagtggactggtgggacatggtgtgtaacgtgaagaagctgatcaacgagaaaaaggaggatggcaaggtgttttggcagaatctggctggctacaagagacaggaagccctgagaccatacctgagcagcgaggaagatcggaagaagggaaagaaattcgctcggtaccagctgggcgacctgctgctgcacctggaaaagaagcacggcgaggactggggaaaggtgtacgacgaggcctgggagcggattgacaagaaagtggaaggcctgagcaagcacatcaagctggaagaggaacggagaagcgaggacgcccagagcaaggccgccctgaccgactggctgcgggctaaggccagcttcgtgatcgagggcctgaaggaggccgacaaggacgagttctgcagatgcgagctgaagctgcagaagtggtacggggacctgcggggaaagcccttcgccatcgaagccgagaacagcatcctggacatcagcggcttcagcaagcagtacaactgtgccttcatctggcagaaggacggcgtgaagaagctgaacctgtacctgatcatcaactacttcaagggcggcaagctgcggttcaagaagatcaaacctgaagccttcgaagccaacagattctacaccgtgatcaacaaaaagagcggcgagatcgtgcccatggaggtgaacttcaacttcgacgaccccaacctgatcatcctgcctctggcctttggcaagagacagggcagagaattcatctggaacgacctgctgtccctggaaaccggcagcctgaagctggccaacggaagagtgatcgagaagacactgtacaacagaagaacccggcaggatgagcctgccctgttcgtggccctgaccttcgagcggcgggaggtcctggactcctccaatatcaaaccaatgaacctgatcggcgtggcaagaggcgaaaacatccccgccgtgatcgccctgaccgaccccgagggctgcccactgagccggtttaaggatagcctgggaaacccaacccacatcctgagaatcggcgagagctataaggagaagcagcggaccatccaggccaagaaggaggtggagcagcggagagccggcggctacagccggaagtacgccagcaaagccaagaatctggcagacgatatggtgagaaacaccgctagagatctgctgtactacgccgtgacccaggatgccatgctgatcttcgccaacctgagccggggcttcggccggcagggcaagcggaccttcatggccgagagacagtacacacggatggaggactggctgaccgccaagctggcctacgagggcctgagcaagacctacctgtccaagacactggcccagtacacctccaagacatgcagcaactgtgggtttaccatcaccagcgccgactacgacagggtgctggagaagctgaagaagacagcaacaggctggatgaccacaattaacggcaaggagctgaaggtggagggccagattacctactacaacagatacaagagacagaacgtagtcaaggacctgtccgtcgagctggatagactgagcgaagaatctgtgaacaacgacatctcctcctggacaaagggcagaagcggagaagctctgagcctcctgaagaaaagattctcccatagacccgtgcaggagaagttcgtgtgcctgaactgcggcttcgagacacacgcagccgagcaagccgccctgaacatcgccagatcctggctgttcctgcggagccaggagtacaagaaataccagacaaacaagacaaccggcaacaccgataagagagccttcgtcgagacctggcagtccttttaccggaagaagcttaaggaggtgtggaaacctgccgtgcggtctggcggatctggcggaggctcctagccagggcagcgtgaccttcagggacgtggccgtggacttcagcagggaggagtgggagtggctgcagcccgcccagagggacctgtacaggcacgtgatgctggagaactacggccacctggtgagcctgggcctgaacatcagcaagccccacgtggtgagcctgctggagcagggcaaggagccctggctgggcaaggacgccagcaggggcctgttcagcgccagcgagagcaacggcggatctggctccggcagcggccccaagaaaaagagaaaagtctaagctgccttctgcggggcttgccttctggccatgcccttcttctctcccttgcacctgtacctcttggtctttgaataaagcctgagtaggaaggctagcaaaaaaaaaaaaaaaaaaaaaaaaaaaaaaaaaaaaaaaaaaaaaaaaaaaaaaaaaaaaaaaaaaaaaaaaaaaaaaaa

SEQ ID NO: 16495 - RNA, 9485 nt, synthetic construct
  source 1..9485: mol_type = other RNA
aggaaataagagagaaaagaagagtaagaagaaatataagagccaccatggcccctaagaagaagcgtaaagtgagccggatggaacgcctcgtctacgaggtgcggcagaagtgcagaaacatcgaggacatctgcatctcctgcggatctctgaacgtgaccctggagcacccactgttcatcggcggcatgtgccagaactgtaaaaactgttttctggagtgtgcctatcaatacgacgatgacggctaccagagctactgcaccatctgttgcggcggaagagaggtgctgatgtgtggaaataacaactgctgccggtgcttctgcgtggaatgcgtggacctgctggtgggccccggcgccgcccaggccgctattaaggaagatccttggaactgctacatgtgcggccacaagggcacatacggcctgctgagacggagagaggactggcctagcagactgcagatgttcttcgccaataaccacgaccaggagttcgacccccctaaggtgtaccctcccgtccccgccgagaagagaaagcccatccgggtcctgagcctgttcgatggcatcgccaccggtctgctggtgctgaaggacctgggcatccaggtggataggtacattgcctccgaggtgtgcgaggactccatcaccgtgggaatggtgcgtcatcagggcaagatcatgtacgtgggcgacgtgcggagcgtgacacagaagcatatccaggagtggggccctttcgacctggtgatcggcggcagcccttgcaatgacctgagcatcgtgaacccagcccggaagggcctgtacgagggaaccggcagactgttcttcgagttttacagactgctgcacgacgcccggcctaaggaaggcgacgaccggcccttcttttggctgttcgagaatgtggtggccatgggagtcagcgacaagcgggatattagccggttcctggagagcaaccccgtgatgatcgatgccaaggaagtgagcgccgcccaccgggccagatacttctggggcaatctgcctggcatgaacagacccctggccagcaccgtgaacgacaagctggagctgcaggagtgcctggagcacggccggatcgccaagttcagcaaggtgagaaccatcaccacccgaagcaacagcatcaaacaaggcaaggaccagcactttcctgtgttcatgaacgagaaggaggacatcctgtggtgtaccgagatggagagagtgttcgggttcccagtccactacacagatgtcagcaacatgtctagactggccagacagagactgctgggaagaagctggtccgtccctgtgatcagacacctgttcgcccctctgaaggagtacttcgcctgcgtgagcagcggcaacagcaacgccaacagccggggccccagcttctctagcggcctggtgccactgtccctgagagggagccacatgggccccatggagatctacaaaaccgtgagcgcctggaagcggcagcctgtgcgcgtgctgagcctgtttcggaatatcgataaagtcctgaaaagcctgggattcctggagagcggctctggctccggcggtggcaccctgaagtacgtggaggatgtgacaaacgtggtcagacgggatgtggagaagtggggccccttcgatctggtgtacggcagcacccaacccctgggcagctcttgtgaccggtgccctggctggtacatgtttcagttccaccggatcctgcagtacgccctgccgagacaggagtcccagcggccattcttttggattttcatggacaacttgctgctgaccgaggatgaccaggaaactaccactcggttcctgcagaccgaagccgtgaccctgcaggacgtgagaggccgggactaccagaacgccatgcgggtgtggtccaacatccctggactgaaaagcaagcacgcacctctgacccctaaagaagaggagtacctgcaggcccaggtgcggagcagaagcaagctggacgcccctaaggtggatctgctggtgaagaattgcctcctgcccctgagagagtacttcaagtatttcagccagaatagtctgcccctgggaggcagcggcggcggcgccctggtgacatttgaggacgtcgccgtgcggttcacccaggaggaatgggctctgctggatccttctcagaaaatcctgtaccgggacgtgatgagagagacataccggaatctgacctccgtgggcatcaactgggaatgttgggaccttgaagcctgcttcagaagcctgggaagaaacctgagagtgcaggtggtgaagagaaagtgcgagctgaccaacagcggcccctgcgccgagggcggcccaagcagcggcgcccctcctcccagcggcggcagcccagccggctccccaacctctaccgaggagggcacctctgagtccgccacccccgagagcggccctggcacctccaccgagcccagcgagggcagcgcacccggcagccctgccggcagccccacctccacagaggagggaaccagcaccgagcccagcgaaggcagcgccccaggcaccagcaccgagcctagtgagcaggagattaaacggatcaacaagatcagaagaagacttgtgaaagacagcaacaccaagaaggccggcaagacaggccccatgaaaaccctgctggttagagtgatgacacccgatctgagagagcggctggaaaacctgagaaagaagcctgaaaatatcccccagcccatcagcaatacatctagagccaacctgaataagctgctgaccgattacaccgaaatgaagaaggcgatcctgcatgtgtactgggaagagttccagaaggaccctgtgggcctgatgagccgggtggcccagcctgccagcaagaagatcgatcagaacaagctgaaacctgagatggacgagaagggcaacctgaccaccgccggctttgcctgctctcagtgtggccagcccctgttcgtgtacaagctggagcaggtgtctgagaagggcaaggcttacaccaactacttcggacggtgcaatgtggccgagcacgaaaagctgatcctgctggcccagctgaagcccgagaaggatagcgacgaagccgtgacatatagcctgggaaagtttgggcagagggccctggatttctacagcattcatgtgaccaaggagtccacccaccccgtgaagcccctggcccagatcgccggaaacagatacgcctccggacctgtgggaaaggccctgagcgacgcatgtatgggcacaatcgcctccttcctgtctaagtaccaggacatcatcatcgaacaccagaaggtggtgaagggcaaccagaagagactggagagcctgcgggagctggccggcaaggaaaacctggaataccctagcgtgaccctgccacctcagcctcacaccaaggagggcgttgatgcctacaacgaagtgatcgcccgggtgcgaatgtgggtgaacctgaacctgtggcagaagctgaagctaagcagagatgatgccaagcctctgctgagactgaagggattcccttcctttcctctggtcgagagacaggccaacgaagtggactggtgggacatggtgtgtaacgtgaagaagctgatcaacgagaaaaaggaggatggcaaggtgttttggcagaatctggctggctacaagagacaggaagccctgagaccatacctgagcagcgaggaagatcggaagaagggaaagaaattcgctcggtaccagctgggcgacctgctgctgcacctggaaaagaagcacggcgaggactggggaaaggtgtacgacgaggcctgggagcggattgacaagaaagtggaaggcctgagcaagcacatcaagctggaagaggaacggagaagcgaggacgcccagagcaaggccgccctgaccgactggctgcgggctaaggccagcttcgtgatcgagggcctgaaggaggccgacaaggacgagttctgcagatgcgagctgaagctgcagaagtggtacggggacctgcggggaaagcccttcgccatcgaagccgagaacagcatcctggacatcagcggcttcagcaagcagtacaactgtgccttcatctggcagaaggacggcgtgaagaagctgaacctgtacctgatcatcaactacttcaagggcggcaagctgcggttcaagaagatcaaacctgaagccttcgaagccaacagattctacaccgtgatcaacaaaaagagcggcgagatcgtgcccatggaggtgaacttcaacttcgacgaccccaacctgatcatcctgcctctggcctttggcaagagacagggcagagaattcatctggaacgacctgctgtccctggaaaccggcagcctgaagctggccaacggaagagtgatcgagaagacactgtacaacagaagaacccggcaggatgagcctgccctgttcgtggccctgaccttcgagcggcgggaggtcctggactcctccaatatcaaaccaatgaacctgatcggcgtggcaagaggcgaaaacatccccgccgtgatcgccctgaccgaccccgagggctgcccactgagccggtttaaggatagcctgggaaacccaacccacatcctgagaatcggcgagagctataaggagaagcagcggaccatccaggccaagaaggaggtggagcagcggagagccggcggctacagccggaagtacgccagcaaagccaagaatctggcagacgatatggtgagaaacaccgctagagatctgctgtactacgccgtgacccaggatgccatgctgatcttcgccaacctgagccggggcttcggccggcagggcaagcggaccttcatggccgagagacagtacacacggatggaggactggctgaccgccaagctggcctacgagggcctgagcaagacctacctgtccaagacactggcccagtacacctccaagacatgcagcaactgtgggtttaccatcaccagcgccgactacgacagggtgctggagaagctgaagaagacagcaacaggctggatgaccacaattaacggcaaggagctgaaggtggagggccagattacctactacaacagatacaagagacagaacgtagtcaaggacctgtccgtcgagctggatagactgagcgaagaatctgtgaacaacgacatctcctcctggacaaagggcagaagcggagaagctctgagcctcctgaagaaaagattctcccatagacccgtgcaggagaagttcgtgtgcctgaactgcggcttcgagacacacgcagccgagcaagccgccctgaacatcgccagatcctggctgttcctgcggagccaggagtacaagaaataccagacaaacaagacaaccggcaacaccgataagagagccttcgtcgagacctggcagtccttttaccggaagaagcttaaggaggtgtggaaacctgccgtgcggtctggcggatctggcggaggctccatggccgccggccagagggaggccaggccccaggtgagcctgaccttcgaggacgtggccgtgctgttcaccagggacgagtggaggaagctggcccccagccagaggaacctgtacagggacgtgatgctggagaactacaggaacctggtgagcctgggcctgcccttcaccaagcccaaggtgatcagcctgctgcagcagggcgaggacccctggaaggtggagaaggacagcagcggcggcggcccaagcagcggcgcccctcctcccagcggcggcagcccagccggctccccaacctctaccgaggagggcacctctgagtccgccacccccgagagcggccctggcacctccaccgagcccagcgagggcagcgcacccggcagccctgccggcagccccacctccacagaggagggaaccagcaccgagcccagcgaaggcagcgccccaggcaccagcaccgagcctagtgagcaggagattaaacggatcaacaagatcagaagaagacttgtgaaagacagcaacaccaagaaggccggcaagacaggccccatgaaaaccctgctggttagagtgatgacacccgatctgagagagcggctggaaaacctgagaaagaagcctgaaaatatcccccagcccatcagcaatacatctagagccaacctgaataagctgctgaccgattacaccgaaatgaagaaggcgatcctgcatgtgtactgggaagagttccagaaggaccctgtgggcctgatgagccgggtggcccagcctgccagcaagaagatcgatcagaacaagctgaaacctgagatggacgagaagggcaacctgaccaccgccggctttgcctgctctcagtgtggccagcccctgttcgtgtacaagctggagcaggtgtctgagaagggcaaggcttacaccaactacttcggacggtgcaatgtggccgagcacgaaaagctgatcctgctggcccagctgaagcccgagaaggatagcgacgaagccgtgacatatagcctgggaaagtttgggcagagggccctggatttctacagcattcatgtgaccaaggagtccacccaccccgtgaagcccctggcccagatcgccggaaacagatacgcctccggacctgtgggaaaggccctgagcgacgcatgtatgggcacaatcgcctccttcctgtctaagtaccaggacatcatcatcgaacaccagaaggtggtgaagggcaaccagaagagactggagagcctgcgggagctggccggcaaggaaaacctggaataccctagcgtgaccctgccacctcagcctcacaccaaggagggcgttgatgcctacaacgaagtgatcgcccgggtgcgaatgtgggtgaacctgaacctgtggcagaagctgaagctaagcagagatgatgccaagcctctgctgagactgaagggattcccttcctttcctctggtcgagagacaggccaacgaagtggactggtgggacatggtgtgtaacgtgaagaagctgatcaacgagaaaaaggaggatggcaaggtgttttggcagaatctggctggctacaagagacaggaagccctgagaccatacctgagcagcgaggaagatcggaagaagggaaagaaattcgctcggtaccagctgggcgacctgctgctgcacctggaaaagaagcacggcgaggactggggaaaggtgtacgacgaggcctgggagcggattgacaagaaagtggaaggcctgagcaagcacatcaagctggaagaggaacggagaagcgaggacgcccagagcaaggccgccctgaccgactggctgcgggctaaggccagcttcgtgatcgagggcctgaaggaggccgacaaggacgagttctgcagatgcgagctgaagctgcagaagtggtacggggacctgcggggaaagcccttcgccatcgaagccgagaacagcatcctggacatcagcggcttcagcaagcagtacaactgtgccttcatctggcagaaggacggcgtgaagaagctgaacctgtacctgatcatcaactacttcaagggcggcaagctgcggttcaagaagatcaaacctgaagccttcgaagccaacagattctacaccgtgatcaacaaaaagagcggcgagatcgtgcccatggaggtgaacttcaacttcgacgaccccaacctgatcatcctgcctctggcctttggcaagagacagggcagagaattcatctggaacgacctgctgtccctggaaaccggcagcctgaagctggccaacggaagagtgatcgagaagacactgtacaacagaagaacccggcaggatgagcctgccctgttcgtggccctgaccttcgagcggcgggaggtcctggactcctccaatatcaaaccaatgaacctgatcggcgtggcaagaggcgaaaacatccccgccgtgatcgccctgaccgaccccgagggctgcccactgagccggtttaaggatagcctgggaaacccaacccacatcctgagaatcggcgagagctataaggagaagcagcggaccatccaggccaagaaggaggtggagcagcggagagccggcggctacagccggaagtacgccagcaaagccaagaatctggcagacgatatggtgagaaacaccgctagagatctgctgtactacgccgtgacccaggatgccatgctgatcttcgccaacctgagccggggcttcggccggcagggcaagcggaccttcatggccgagagacagtacacacggatggaggactggctgaccgccaagctggcctacgagggcctgagcaagacctacctgtccaagacactggcccagtacacctccaagacatgcagcaactgtgggtttaccatcaccagcgccgactacgacagggtgctggagaagctgaagaagacagcaacaggctggatgaccacaattaacggcaaggagctgaaggtggagggccagattacctactacaacagatacaagagacagaacgtagtcaaggacctgtccgtcgagctggatagactgagcgaagaatctgtgaacaacgacatctcctcctggacaaagggcagaagcggagaagctctgagcctcctgaagaaaagattctcccatagacccgtgcaggagaagttcgtgtgcctgaactgcggcttcgagacacacgcagccgagcaagccgccctgaacatcgccagatcctggctgttcctgcggagccaggagtacaagaaataccagacaaacaagacaaccggcaacaccgataagagagccttcgtcgagacctggcagtccttttaccggaagaagcttaaggaggtgtggaaacctgccgtgcggtctggcggatctggcggaggctcctatggccgccggccagagggaggccaggccccaggtgagcctgaccttcgaggacgtggccgtgctgttcaccagggacgagtggaggaagctggcccccagccagaggaacctgtacagggacgtgatgctggagaactacaggaacctggtgagcctgggcctgcccttcaccaagcccaaggtgatcagcctgctgcagcagggcgaggacccctggaaggtggagaaggacagcagcggcggatctggctccggcagcggccccaagaaaaagagaaaagtctaagctgccttctgcggggcttgccttctggccatgcccttcttctctcccttgcacctgtacctcttggtctttgaataaagcctgagtaggaaggctagcaaaaaaaaaaaaaaaaaaaaaaaaaaaaaaaaaaaaaaaaaaaaaaaaaaaaaaaaaaaaaaaaaaaaaaaaaaaaaaaa

SEQ ID NO: 16496 - RNA, 9485 nt, synthetic construct
  source 1..9485: mol_type = other RNA
aggaaataagagagaaaagaagagtaagaagaaatataagagccaccatggcccctaagaagaagcgtaaagtgagccggatggaacgcctcgtctacgaggtgcggcagaagtgcagaaacatcgaggacatctgcatctcctgcggatctctgaacgtgaccctggagcacccactgttcatcggcggcatgtgccagaactgtaaaaactgttttctggagtgtgcctatcaatacgacgatgacggctaccagagctactgcaccatctgttgcggcggaagagaggtgctgatgtgtggaaataacaactgctgccggtgcttctgcgtggaatgcgtggacctgctggtgggccccggcgccgcccaggccgctattaaggaagatccttggaactgctacatgtgcggccacaagggcacatacggcctgctgagacggagagaggactggcctagcagactgcagatgttcttcgccaataaccacgaccaggagttcgacccccctaaggtgtaccctcccgtccccgccgagaagagaaagcccatccgggtcctgagcctgttcgatggcatcgccaccggtctgctggtgctgaaggacctgggcatccaggtggataggtacattgcctccgaggtgtgcgaggactccatcaccgtgggaatggtgcgtcatcagggcaagatcatgtacgtgggcgacgtgcggagcgtgacacagaagcatatccaggagtggggccctttcgacctggtgatcggcggcagcccttgcaatgacctgagcatcgtgaacccagcccggaagggcctgtacgagggaaccggcagactgttcttcgagttttacagactgctgcacgacgcccggcctaaggaaggcgacgaccggcccttcttttggctgttcgagaatgtggtggccatgggagtcagcgacaagcgggatattagccggttcctggagagcaaccccgtgatgatcgatgccaaggaagtgagcgccgcccaccgggccagatacttctggggcaatctgcctggcatgaacagacccctggccagcaccgtgaacgacaagctggagctgcaggagtgcctggagcacggccggatcgccaagttcagcaaggtgagaaccatcaccacccgaagcaacagcatcaaacaaggcaaggaccagcactttcctgtgttcatgaacgagaaggaggacatcctgtggtgtaccgagatggagagagtgttcgggttcccagtccactacacagatgtcagcaacatgtctagactggccagacagagactgctgggaagaagctggtccgtccctgtgatcagacacctgttcgcccctctgaaggagtacttcgcctgcgtgagcagcggcaacagcaacgccaacagccggggccccagcttctctagcggcctggtgccactgtccctgagagggagccacatgggccccatggagatctacaaaaccgtgagcgcctggaagcggcagcctgtgcgcgtgctgagcctgtttcggaatatcgataaagtcctgaaaagcctgggattcctggagagcggctctggctccggcggtggcaccctgaagtacgtggaggatgtgacaaacgtggtcagacgggatgtggagaagtggggccccttcgatctggtgtacggcagcacccaacccctgggcagctcttgtgaccggtgccctggctggtacatgtttcagttccaccggatcctgcagtacgccctgccgagacaggagtcccagcggccattcttttggattttcatggacaacttgctgctgaccgaggatgaccaggaaactaccactcggttcctgcagaccgaagccgtgaccctgcaggacgtgagaggccgggactaccagaacgccatgcgggtgtggtccaacatccctggactgaaaagcaagcacgcacctctgacccctaaagaagaggagtacctgcaggcccaggtgcggagcagaagcaagctggacgcccctaaggtggatctgctggtgaagaattgcctcctgcccctgagagagtacttcaagtatttcagccagaatagtctgcccctgggaggcagcggcggcggcgccctggtgacatttgaggacgtcgccgtgcggttcacccaggaggaatgggctctgctggatccttctcagaaaatcctgtaccgggacgtgatgagagagacataccggaatctgacctccgtgggcatcaactgggaatgttgggaccttgaagcctgcttcagaagcctgggaagaaacctgagagtgcaggtggtgaagagaaagtgcgagctgaccaacagcggcccctgcgccgagggcggcccaagcagcggcgcccctcctcccagcggcggcagcccagccggctccccaacctctaccgaggagggcacctctgagtccgccacccccgagagcggccctggcacctccaccgagcccagcgagggcagcgcacccggcagccctgccggcagccccacctccacagaggagggaaccagcaccgagcccagcgaaggcagcgccccaggcaccagcaccgagcctagtgagcaggagattaaacggatcaacaagatcagaagaagacttgtgaaagacagcaacaccaagaaggccggcaagacaggccccatgaaaaccctgctggttagagtgatgacacccgatctgagagagcggctggaaaacctgagaaagaagcctgaaaatatcccccagcccatcagcaatacatctagagccaacctgaataagctgctgaccgattacaccgaaatgaagaaggcgatcctgcatgtgtactgggaagagttccagaaggaccctgtgggcctgatgagccgggtggcccagcctgccagcaagaagatcgatcagaacaagctgaaacctgagatggacgagaagggcaacctgaccaccgccggctttgcctgctctcagtgtggccagcccctgttcgtgtacaagctggagcaggtgtctgagaagggcaaggcttacaccaactacttcggacggtgcaatgtggccgagcacgaaaagctgatcctgctggcccagctgaagcccgagaaggatagcgacgaagccgtgacatatagcctgggaaagtttgggcagagggccctggatttctacagcattcatgtgaccaaggagtccacccaccccgtgaagcccctggcccagatcgccggaaacagatacgcctccggacctgtgggaaaggccctgagcgacgcatgtatgggcacaatcgcctccttcctgtctaagtaccaggacatcatcatcgaacaccagaaggtggtgaagggcaaccagaagagactggagagcctgcgggagctggccggcaaggaaaacctggaataccctagcgtgaccctgccacctcagcctcacaccaaggagggcgttgatgcctacaacgaagtgatcgcccgggtgcgaatgtgggtgaacctgaacctgtggcagaagctgaagctaagcagagatgatgccaagcctctgctgagactgaagggattcccttcctttcctctggtcgagagacaggccaacgaagtggactggtgggacatggtgtgtaacgtgaagaagctgatcaacgagaaaaaggaggatggcaaggtgttttggcagaatctggctggctacaagagacaggaagccctgagaccatacctgagcagcgaggaagatcggaagaagggaaagaaattcgctcggtaccagctgggcgacctgctgctgcacctggaaaagaagcacggcgaggactggggaaaggtgtacgacgaggcctgggagcggattgacaagaaagtggaaggcctgagcaagcacatcaagctggaagaggaacggagaagcgaggacgcccagagcaaggccgccctgaccgactggctgcgggctaaggccagcttcgtgatcgagggcctgaaggaggccgacaaggacgagttctgcagatgcgagctgaagctgcagaagtggtacggggacctgcggggaaagcccttcgccatcgaagccgagaacagcatcctggacatcagcggcttcagcaagcagtacaactgtgccttcatctggcagaaggacggcgtgaagaagctgaacctgtacctgatcatcaactacttcaagggcggcaagctgcggttcaagaagatcaaacctgaagccttcgaagccaacagattctacaccgtgatcaacaaaaagagcggcgagatcgtgcccatggaggtgaacttcaacttcgacgaccccaacctgatcatcctgcctctggcctttggcaagagacagggcagagaattcatctggaacgacctgctgtccctggaaaccggcagcctgaagctggccaacggaagagtgatcgagaagacactgtacaacagaagaacccggcaggatgagcctgccctgttcgtggccctgaccttcgagcggcgggaggtcctggactcctccaatatcaaaccaatgaacctgatcggcgtggcaagaggcgaaaacatccccgccgtgatcgccctgaccgaccccgagggctgcccactgagccggtttaaggatagcctgggaaacccaacccacatcctgagaatcggcgagagctataaggagaagcagcggaccatccaggccaagaaggaggtggagcagcggagagccggcggctacagccggaagtacgccagcaaagccaagaatctggcagacgatatggtgagaaacaccgctagagatctgctgtactacgccgtgacccaggatgccatgctgatcttcgccaacctgagccggggcttcggccggcagggcaagcggaccttcatggccgagagacagtacacacggatggaggactggctgaccgccaagctggcctacgagggcctgagcaagacctacctgtccaagacactggcccagtacacctccaagacatgcagcaactgtgggtttaccatcaccagcgccgactacgacagggtgctggagaagctgaagaagacagcaacaggctggatgaccacaattaacggcaaggagctgaaggtggagggccagattacctactacaacagatacaagagacagaacgtagtcaaggacctgtccgtcgagctggatagactgagcgaagaatctgtgaacaacgacatctcctcctggacaaagggcagaagcggagaagctctgagcctcctgaagaaaagattctcccatagacccgtgcaggagaagttcgtgtgcctgaactgcggcttcgagacacacgcagccgagcaagccgccctgaacatcgccagatcctggctgttcctgcggagccaggagtacaagaaataccagacaaacaagacaaccggcaacaccgataagagagccttcgtcgagacctggcagtccttttaccggaagaagcttaaggaggtgtggaaacctgccgtgcggtctggcggatctggcggaggctccagcagccagaccctgctgaccttcagggacgtggccatcgagttcagccaggaggagtggggctgcctgaaccacagccagagggagctgtacagggacgtgatgctggagacctacggccacctgctgttcctgggcctggtgagcaagcccgacctggtgatcgtgctggagcagaagaaggagctgtggggcgtgaagaggaaggagaccgtggccagccaccccgccgtgagcagccagggcggcccaagcagcggcgcccctcctcccagcggcggcagcccagccggctccccaacctctaccgaggagggcacctctgagtccgccacccccgagagcggccctggcacctccaccgagcccagcgagggcagcgcacccggcagccctgccggcagccccacctccacagaggagggaaccagcaccgagcccagcgaaggcagcgccccaggcaccagcaccgagcctagtgagcaggagattaaacggatcaacaagatcagaagaagacttgtgaaagacagcaacaccaagaaggccggcaagacaggccccatgaaaaccctgctggttagagtgatgacacccgatctgagagagcggctggaaaacctgagaaagaagcctgaaaatatcccccagcccatcagcaatacatctagagccaacctgaataagctgctgaccgattacaccgaaatgaagaaggcgatcctgcatgtgtactgggaagagttccagaaggaccctgtgggcctgatgagccgggtggcccagcctgccagcaagaagatcgatcagaacaagctgaaacctgagatggacgagaagggcaacctgaccaccgccggctttgcctgctctcagtgtggccagcccctgttcgtgtacaagctggagcaggtgtctgagaagggcaaggcttacaccaactacttcggacggtgcaatgtggccgagcacgaaaagctgatcctgctggcccagctgaagcccgagaaggatagcgacgaagccgtgacatatagcctgggaaagtttgggcagagggccctggatttctacagcattcatgtgaccaaggagtccacccaccccgtgaagcccctggcccagatcgccggaaacagatacgcctccggacctgtgggaaaggccctgagcgacgcatgtatgggcacaatcgcctccttcctgtctaagtaccaggacatcatcatcgaacaccagaaggtggtgaagggcaaccagaagagactggagagcctgcgggagctggccggcaaggaaaacctggaataccctagcgtgaccctgccacctcagcctcacaccaaggagggcgttgatgcctacaacgaagtgatcgcccgggtgcgaatgtgggtgaacctgaacctgtggcagaagctgaagctaagcagagatgatgccaagcctctgctgagactgaagggattcccttcctttcctctggtcgagagacaggccaacgaagtggactggtgggacatggtgtgtaacgtgaagaagctgatcaacgagaaaaaggaggatggcaaggtgttttggcagaatctggctggctacaagagacaggaagccctgagaccatacctgagcagcgaggaagatcggaagaagggaaagaaattcgctcggtaccagctgggcgacctgctgctgcacctggaaaagaagcacggcgaggactggggaaaggtgtacgacgaggcctgggagcggattgacaagaaagtggaaggcctgagcaagcacatcaagctggaagaggaacggagaagcgaggacgcccagagcaaggccgccctgaccgactggctgcgggctaaggccagcttcgtgatcgagggcctgaaggaggccgacaaggacgagttctgcagatgcgagctgaagctgcagaagtggtacggggacctgcggggaaagcccttcgccatcgaagccgagaacagcatcctggacatcagcggcttcagcaagcagtacaactgtgccttcatctggcagaaggacggcgtgaagaagctgaacctgtacctgatcatcaactacttcaagggcggcaagctgcggttcaagaagatcaaacctgaagccttcgaagccaacagattctacaccgtgatcaacaaaaagagcggcgagatcgtgcccatggaggtgaacttcaacttcgacgaccccaacctgatcatcctgcctctggcctttggcaagagacagggcagagaattcatctggaacgacctgctgtccctggaaaccggcagcctgaagctggccaacggaagagtgatcgagaagacactgtacaacagaagaacccggcaggatgagcctgccctgttcgtggccctgaccttcgagcggcgggaggtcctggactcctccaatatcaaaccaatgaacctgatcggcgtggcaagaggcgaaaacatccccgccgtgatcgccctgaccgaccccgagggctgcccactgagccggtttaaggatagcctgggaaacccaacccacatcctgagaatcggcgagagctataaggagaagcagcggaccatccaggccaagaaggaggtggagcagcggagagccggcggctacagccggaagtacgccagcaaagccaagaatctggcagacgatatggtgagaaacaccgctagagatctgctgtactacgccgtgacccaggatgccatgctgatcttcgccaacctgagccggggcttcggccggcagggcaagcggaccttcatggccgagagacagtacacacggatggaggactggctgaccgccaagctggcctacgagggcctgagcaagacctacctgtccaagacactggcccagtacacctccaagacatgcagcaactgtgggtttaccatcaccagcgccgactacgacagggtgctggagaagctgaagaagacagcaacaggctggatgaccacaattaacggcaaggagctgaaggtggagggccagattacctactacaacagatacaagagacagaacgtagtcaaggacctgtccgtcgagctggatagactgagcgaagaatctgtgaacaacgacatctcctcctggacaaagggcagaagcggagaagctctgagcctcctgaagaaaagattctcccatagacccgtgcaggagaagttcgtgtgcctgaactgcggcttcgagacacacgcagccgagcaagccgccctgaacatcgccagatcctggctgttcctgcggagccaggagtacaagaaataccagacaaacaagacaaccggcaacaccgataagagagccttcgtcgagacctggcagtccttttaccggaagaagcttaaggaggtgtggaaacctgccgtgcggtctggcggatctggcggaggctcctagcagccagaccctgctgaccttcagggacgtggccatcgagttcagccaggaggagtggggctgcctgaaccacagccagagggagctgtacagggacgtgatgctggagacctacggccacctgctgttcctgggcctggtgagcaagcccgacctggtgatcgtgctggagcagaagaaggagctgtggggcgtgaagaggaaggagaccgtggccagccaccccgccgtgagcagccagggatctggctccggcagcggccccaagaaaaagagaaaagtctaagctgccttctgcggggcttgccttctggccatgcccttcttctctcccttgcacctgtacctcttggtctttgaataaagcctgagtaggaaggctagcaaaaaaaaaaaaaaaaaaaaaaaaaaaaaaaaaaaaaaaaaaaaaaaaaaaaaaaaaaaaaaaaaaaaaaaaaaaaaaaa

SEQ ID NO: 16497 - RNA, 9485 nt, synthetic construct
  source 1..9485: mol_type = other RNA
aggaaataagagagaaaagaagagtaagaagaaatataagagccaccatggcccctaagaagaagcgtaaagtgagccggatggaacgcctcgtctacgaggtgcggcagaagtgcagaaacatcgaggacatctgcatctcctgcggatctctgaacgtgaccctggagcacccactgttcatcggcggcatgtgccagaactgtaaaaactgttttctggagtgtgcctatcaatacgacgatgacggctaccagagctactgcaccatctgttgcggcggaagagaggtgctgatgtgtggaaataacaactgctgccggtgcttctgcgtggaatgcgtggacctgctggtgggccccggcgccgcccaggccgctattaaggaagatccttggaactgctacatgtgcggccacaagggcacatacggcctgctgagacggagagaggactggcctagcagactgcagatgttcttcgccaataaccacgaccaggagttcgacccccctaaggtgtaccctcccgtccccgccgagaagagaaagcccatccgggtcctgagcctgttcgatggcatcgccaccggtctgctggtgctgaaggacctgggcatccaggtggataggtacattgcctccgaggtgtgcgaggactccatcaccgtgggaatggtgcgtcatcagggcaagatcatgtacgtgggcgacgtgcggagcgtgacacagaagcatatccaggagtggggccctttcgacctggtgatcggcggcagcccttgcaatgacctgagcatcgtgaacccagcccggaagggcctgtacgagggaaccggcagactgttcttcgagttttacagactgctgcacgacgcccggcctaaggaaggcgacgaccggcccttcttttggctgttcgagaatgtggtggccatgggagtcagcgacaagcgggatattagccggttcctggagagcaaccccgtgatgatcgatgccaaggaagtgagcgccgcccaccgggccagatacttctggggcaatctgcctggcatgaacagacccctggccagcaccgtgaacgacaagctggagctgcaggagtgcctggagcacggccggatcgccaagttcagcaaggtgagaaccatcaccacccgaagcaacagcatcaaacaaggcaaggaccagcactttcctgtgttcatgaacgagaaggaggacatcctgtggtgtaccgagatggagagagtgttcgggttcccagtccactacacagatgtcagcaacatgtctagactggccagacagagactgctgggaagaagctggtccgtccctgtgatcagacacctgttcgcccctctgaaggagtacttcgcctgcgtgagcagcggcaacagcaacgccaacagccggggccccagcttctctagcggcctggtgccactgtccctgagagggagccacatgggccccatggagatctacaaaaccgtgagcgcctggaagcggcagcctgtgcgcgtgctgagcctgtttcggaatatcgataaagtcctgaaaagcctgggattcctggagagcggctctggctccggcggtggcaccctgaagtacgtggaggatgtgacaaacgtggtcagacgggatgtggagaagtggggccccttcgatctggtgtacggcagcacccaacccctgggcagctcttgtgaccggtgccctggctggtacatgtttcagttccaccggatcctgcagtacgccctgccgagacaggagtcccagcggccattcttttggattttcatggacaacttgctgctgaccgaggatgaccaggaaactaccactcggttcctgcagaccgaagccgtgaccctgcaggacgtgagaggccgggactaccagaacgccatgcgggtgtggtccaacatccctggactgaaaagcaagcacgcacctctgacccctaaagaagaggagtacctgcaggcccaggtgcggagcagaagcaagctggacgcccctaaggtggatctgctggtgaagaattgcctcctgcccctgagagagtacttcaagtatttcagccagaatagtctgcccctgggaggcagcggcggcggcgccctggtgacatttgaggacgtcgccgtgcggttcacccaggaggaatgggctctgctggatccttctcagaaaatcctgtaccgggacgtgatgagagagacataccggaatctgacctccgtgggcatcaactgggaatgttgggaccttgaagcctgcttcagaagcctgggaagaaacctgagagtgcaggtggtgaagagaaagtgcgagctgaccaacagcggcccctgcgccgagggcggcccaagcagcggcgcccctcctcccagcggcggcagcccagccggctccccaacctctaccgaggagggcacctctgagtccgccacccccgagagcggccctggcacctccaccgagcccagcgagggcagcgcacccggcagccctgccggcagccccacctccacagaggagggaaccagcaccgagcccagcgaaggcagcgccccaggcaccagcaccgagcctagtgagcaggagattaaacggatcaacaagatcagaagaagacttgtgaaagacagcaacaccaagaaggccggcaagacaggccccatgaaaaccctgctggttagagtgatgacacccgatctgagagagcggctggaaaacctgagaaagaagcctgaaaatatcccccagcccatcagcaatacatctagagccaacctgaataagctgctgaccgattacaccgaaatgaagaaggcgatcctgcatgtgtactgggaagagttccagaaggaccctgtgggcctgatgagccgggtggcccagcctgccagcaagaagatcgatcagaacaagctgaaacctgagatggacgagaagggcaacctgaccaccgccggctttgcctgctctcagtgtggccagcccctgttcgtgtacaagctggagcaggtgtctgagaagggcaaggcttacaccaactacttcggacggtgcaatgtggccgagcacgaaaagctgatcctgctggcccagctgaagcccgagaaggatagcgacgaagccgtgacatatagcctgggaaagtttgggcagagggccctggatttctacagcattcatgtgaccaaggagtccacccaccccgtgaagcccctggcccagatcgccggaaacagatacgcctccggacctgtgggaaaggccctgagcgacgcatgtatgggcacaatcgcctccttcctgtctaagtaccaggacatcatcatcgaacaccagaaggtggtgaagggcaaccagaagagactggagagcctgcgggagctggccggcaaggaaaacctggaataccctagcgtgaccctgccacctcagcctcacaccaaggagggcgttgatgcctacaacgaagtgatcgcccgggtgcgaatgtgggtgaacctgaacctgtggcagaagctgaagctaagcagagatgatgccaagcctctgctgagactgaagggattcccttcctttcctctggtcgagagacaggccaacgaagtggactggtgggacatggtgtgtaacgtgaagaagctgatcaacgagaaaaaggaggatggcaaggtgttttggcagaatctggctggctacaagagacaggaagccctgagaccatacctgagcagcgaggaagatcggaagaagggaaagaaattcgctcggtaccagctgggcgacctgctgctgcacctggaaaagaagcacggcgaggactggggaaaggtgtacgacgaggcctgggagcggattgacaagaaagtggaaggcctgagcaagcacatcaagctggaagaggaacggagaagcgaggacgcccagagcaaggccgccctgaccgactggctgcgggctaaggccagcttcgtgatcgagggcctgaaggaggccgacaaggacgagttctgcagatgcgagctgaagctgcagaagtggtacggggacctgcggggaaagcccttcgccatcgaagccgagaacagcatcctggacatcagcggcttcagcaagcagtacaactgtgccttcatctggcagaaggacggcgtgaagaagctgaacctgtacctgatcatcaactacttcaagggcggcaagctgcggttcaagaagatcaaacctgaagccttcgaagccaacagattctacaccgtgatcaacaaaaagagcggcgagatcgtgcccatggaggtgaacttcaacttcgacgaccccaacctgatcatcctgcctctggcctttggcaagagacagggcagagaattcatctggaacgacctgctgtccctggaaaccggcagcctgaagctggccaacggaagagtgatcgagaagacactgtacaacagaagaacccggcaggatgagcctgccctgttcgtggccctgaccttcgagcggcgggaggtcctggactcctccaatatcaaaccaatgaacctgatcggcgtggcaagaggcgaaaacatccccgccgtgatcgccctgaccgaccccgagggctgcccactgagccggtttaaggatagcctgggaaacccaacccacatcctgagaatcggcgagagctataaggagaagcagcggaccatccaggccaagaaggaggtggagcagcggagagccggcggctacagccggaagtacgccagcaaagccaagaatctggcagacgatatggtgagaaacaccgctagagatctgctgtactacgccgtgacccaggatgccatgctgatcttcgccaacctgagccggggcttcggccggcagggcaagcggaccttcatggccgagagacagtacacacggatggaggactggctgaccgccaagctggcctacgagggcctgagcaagacctacctgtccaagacactggcccagtacacctccaagacatgcagcaactgtgggtttaccatcaccagcgccgactacgacagggtgctggagaagctgaagaagacagcaacaggctggatgaccacaattaacggcaaggagctgaaggtggagggccagattacctactacaacagatacaagagacagaacgtagtcaaggacctgtccgtcgagctggatagactgagcgaagaatctgtgaacaacgacatctcctcctggacaaagggcagaagcggagaagctctgagcctcctgaagaaaagattctcccatagacccgtgcaggagaagttcgtgtgcctgaactgcggcttcgagacacacgcagccgagcaagccgccctgaacatcgccagatcctggctgttcctgcggagccaggagtacaagaaataccagacaaacaagacaaccggcaacaccgataagagagccttcgtcgagacctggcagtccttttaccggaagaagcttaaggaggtgtggaaacctgccgtgcggtctggcggatctggcggaggctcctggaaggaggagctgagcttcgaggacgtggccgtgaacttcaccagggaggagtggaacaagctggactggacccagagggacctgtacagggacgtgatgctggagaactacaggaacatgatcctgctgggcttccagttccccaagcccgaggtgatctgccagctggagcagtgggaggacccctggatcctggacctgcccagggccggcaccaggaaggccagcagcaacgcctgcggcggcccaagcagcggcgcccctcctcccagcggcggcagcccagccggctccccaacctctaccgaggagggcacctctgagtccgccacccccgagagcggccctggcacctccaccgagcccagcgagggcagcgcacccggcagccctgccggcagccccacctccacagaggagggaaccagcaccgagcccagcgaaggcagcgccccaggcaccagcaccgagcctagtgagcaggagattaaacggatcaacaagatcagaagaagacttgtgaaagacagcaacaccaagaaggccggcaagacaggccccatgaaaaccctgctggttagagtgatgacacccgatctgagagagcggctggaaaacctgagaaagaagcctgaaaatatcccccagcccatcagcaatacatctagagccaacctgaataagctgctgaccgattacaccgaaatgaagaaggcgatcctgcatgtgtactgggaagagttccagaaggaccctgtgggcctgatgagccgggtggcccagcctgccagcaagaagatcgatcagaacaagctgaaacctgagatggacgagaagggcaacctgaccaccgccggctttgcctgctctcagtgtggccagcccctgttcgtgtacaagctggagcaggtgtctgagaagggcaaggcttacaccaactacttcggacggtgcaatgtggccgagcacgaaaagctgatcctgctggcccagctgaagcccgagaaggatagcgacgaagccgtgacatatagcctgggaaagtttgggcagagggccctggatttctacagcattcatgtgaccaaggagtccacccaccccgtgaagcccctggcccagatcgccggaaacagatacgcctccggacctgtgggaaaggccctgagcgacgcatgtatgggcacaatcgcctccttcctgtctaagtaccaggacatcatcatcgaacaccagaaggtggtgaagggcaaccagaagagactggagagcctgcgggagctggccggcaaggaaaacctggaataccctagcgtgaccctgccacctcagcctcacaccaaggagggcgttgatgcctacaacgaagtgatcgcccgggtgcgaatgtgggtgaacctgaacctgtggcagaagctgaagctaagcagagatgatgccaagcctctgctgagactgaagggattcccttcctttcctctggtcgagagacaggccaacgaagtggactggtgggacatggtgtgtaacgtgaagaagctgatcaacgagaaaaaggaggatggcaaggtgttttggcagaatctggctggctacaagagacaggaagccctgagaccatacctgagcagcgaggaagatcggaagaagggaaagaaattcgctcggtaccagctgggcgacctgctgctgcacctggaaaagaagcacggcgaggactggggaaaggtgtacgacgaggcctgggagcggattgacaagaaagtggaaggcctgagcaagcacatcaagctggaagaggaacggagaagcgaggacgcccagagcaaggccgccctgaccgactggctgcgggctaaggccagcttcgtgatcgagggcctgaaggaggccgacaaggacgagttctgcagatgcgagctgaagctgcagaagtggtacggggacctgcggggaaagcccttcgccatcgaagccgagaacagcatcctggacatcagcggcttcagcaagcagtacaactgtgccttcatctggcagaaggacggcgtgaagaagctgaacctgtacctgatcatcaactacttcaagggcggcaagctgcggttcaagaagatcaaacctgaagccttcgaagccaacagattctacaccgtgatcaacaaaaagagcggcgagatcgtgcccatggaggtgaacttcaacttcgacgaccccaacctgatcatcctgcctctggcctttggcaagagacagggcagagaattcatctggaacgacctgctgtccctggaaaccggcagcctgaagctggccaacggaagagtgatcgagaagacactgtacaacagaagaacccggcaggatgagcctgccctgttcgtggccctgaccttcgagcggcgggaggtcctggactcctccaatatcaaaccaatgaacctgatcggcgtggcaagaggcgaaaacatccccgccgtgatcgccctgaccgaccccgagggctgcccactgagccggtttaaggatagcctgggaaacccaacccacatcctgagaatcggcgagagctataaggagaagcagcggaccatccaggccaagaaggaggtggagcagcggagagccggcggctacagccggaagtacgccagcaaagccaagaatctggcagacgatatggtgagaaacaccgctagagatctgctgtactacgccgtgacccaggatgccatgctgatcttcgccaacctgagccggggcttcggccggcagggcaagcggaccttcatggccgagagacagtacacacggatggaggactggctgaccgccaagctggcctacgagggcctgagcaagacctacctgtccaagacactggcccagtacacctccaagacatgcagcaactgtgggtttaccatcaccagcgccgactacgacagggtgctggagaagctgaagaagacagcaacaggctggatgaccacaattaacggcaaggagctgaaggtggagggccagattacctactacaacagatacaagagacagaacgtagtcaaggacctgtccgtcgagctggatagactgagcgaagaatctgtgaacaacgacatctcctcctggacaaagggcagaagcggagaagctctgagcctcctgaagaaaagattctcccatagacccgtgcaggagaagttcgtgtgcctgaactgcggcttcgagacacacgcagccgagcaagccgccctgaacatcgccagatcctggctgttcctgcggagccaggagtacaagaaataccagacaaacaagacaaccggcaacaccgataagagagccttcgtcgagacctggcagtccttttaccggaagaagcttaaggaggtgtggaaacctgccgtgcggtctggcggatctggcggaggctccttggaaggaggagctgagcttcgaggacgtggccgtgaacttcaccagggaggagtggaacaagctggactggacccagagggacctgtacagggacgtgatgctggagaactacaggaacatgatcctgctgggcttccagttccccaagcccgaggtgatctgccagctggagcagtgggaggacccctggatcctggacctgcccagggccggcaccaggaaggccagcagcaacgcctgcggatctggctccggcagcggccccaagaaaaagagaaaagtctaagctgccttctgcggggcttgccttctggccatgcccttcttctctcccttgcacctgtacctcttggtctttgaataaagcctgagtaggaaggctagcaaaaaaaaaaaaaaaaaaaaaaaaaaaaaaaaaaaaaaaaaaaaaaaaaaaaaaaaaaaaaaaaaaaaaaaaaaaaaaaa

SEQ ID NO: 16498 - RNA, 9485 nt, synthetic construct
  source 1..9485: mol_type = other RNA
aggaaataagagagaaaagaagagtaagaagaaatataagagccaccatggcccctaagaagaagcgtaaagtgagccggatggaacgcctcgtctacgaggtgcggcagaagtgcagaaacatcgaggacatctgcatctcctgcggatctctgaacgtgaccctggagcacccactgttcatcggcggcatgtgccagaactgtaaaaactgttttctggagtgtgcctatcaatacgacgatgacggctaccagagctactgcaccatctgttgcggcggaagagaggtgctgatgtgtggaaataacaactgctgccggtgcttctgcgtggaatgcgtggacctgctggtgggccccggcgccgcccaggccgctattaaggaagatccttggaactgctacatgtgcggccacaagggcacatacggcctgctgagacggagagaggactggcctagcagactgcagatgttcttcgccaataaccacgaccaggagttcgacccccctaaggtgtaccctcccgtccccgccgagaagagaaagcccatccgggtcctgagcctgttcgatggcatcgccaccggtctgctggtgctgaaggacctgggcatccaggtggataggtacattgcctccgaggtgtgcgaggactccatcaccgtgggaatggtgcgtcatcagggcaagatcatgtacgtgggcgacgtgcggagcgtgacacagaagcatatccaggagtggggccctttcgacctggtgatcggcggcagcccttgcaatgacctgagcatcgtgaacccagcccggaagggcctgtacgagggaaccggcagactgttcttcgagttttacagactgctgcacgacgcccggcctaaggaaggcgacgaccggcccttcttttggctgttcgagaatgtggtggccatgggagtcagcgacaagcgggatattagccggttcctggagagcaaccccgtgatgatcgatgccaaggaagtgagcgccgcccaccgggccagatacttctggggcaatctgcctggcatgaacagacccctggccagcaccgtgaacgacaagctggagctgcaggagtgcctggagcacggccggatcgccaagttcagcaaggtgagaaccatcaccacccgaagcaacagcatcaaacaaggcaaggaccagcactttcctgtgttcatgaacgagaaggaggacatcctgtggtgtaccgagatggagagagtgttcgggttcccagtccactacacagatgtcagcaacatgtctagactggccagacagagactgctgggaagaagctggtccgtccctgtgatcagacacctgttcgcccctctgaaggagtacttcgcctgcgtgagcagcggcaacagcaacgccaacagccggggccccagcttctctagcggcctggtgccactgtccctgagagggagccacatgggccccatggagatctacaaaaccgtgagcgcctggaagcggcagcctgtgcgcgtgctgagcctgtttcggaatatcgataaagtcctgaaaagcctgggattcctggagagcggctctggctccggcggtggcaccctgaagtacgtggaggatgtgacaaacgtggtcagacgggatgtggagaagtggggccccttcgatctggtgtacggcagcacccaacccctgggcagctcttgtgaccggtgccctggctggtacatgtttcagttccaccggatcctgcagtacgccctgccgagacaggagtcccagcggccattcttttggattttcatggacaacttgctgctgaccgaggatgaccaggaaactaccactcggttcctgcagaccgaagccgtgaccctgcaggacgtgagaggccgggactaccagaacgccatgcgggtgtggtccaacatccctggactgaaaagcaagcacgcacctctgacccctaaagaagaggagtacctgcaggcccaggtgcggagcagaagcaagctggacgcccctaaggtggatctgctggtgaagaattgcctcctgcccctgagagagtacttcaagtatttcagccagaatagtctgcccctgggaggcagcggcggcggcgccctggtgacatttgaggacgtcgccgtgcggttcacccaggaggaatgggctctgctggatccttctcagaaaatcctgtaccgggacgtgatgagagagacataccggaatctgacctccgtgggcatcaactgggaatgttgggaccttgaagcctgcttcagaagcctgggaagaaacctgagagtgcaggtggtgaagagaaagtgcgagctgaccaacagcggcccctgcgccgagggcggcccaagcagcggcgcccctcctcccagcggcggcagcccagccggctccccaacctctaccgaggagggcacctctgagtccgccacccccgagagcggccctggcacctccaccgagcccagcgagggcagcgcacccggcagccctgccggcagccccacctccacagaggagggaaccagcaccgagcccagcgaaggcagcgccccaggcaccagcaccgagcctagtgagcaggagattaaacggatcaacaagatcagaagaagacttgtgaaagacagcaacaccaagaaggccggcaagacaggccccatgaaaaccctgctggttagagtgatgacacccgatctgagagagcggctggaaaacctgagaaagaagcctgaaaatatcccccagcccatcagcaatacatctagagccaacctgaataagctgctgaccgattacaccgaaatgaagaaggcgatcctgcatgtgtactgggaagagttccagaaggaccctgtgggcctgatgagccgggtggcccagcctgccagcaagaagatcgatcagaacaagctgaaacctgagatggacgagaagggcaacctgaccaccgccggctttgcctgctctcagtgtggccagcccctgttcgtgtacaagctggagcaggtgtctgagaagggcaaggcttacaccaactacttcggacggtgcaatgtggccgagcacgaaaagctgatcctgctggcccagctgaagcccgagaaggatagcgacgaagccgtgacatatagcctgggaaagtttgggcagagggccctggatttctacagcattcatgtgaccaaggagtccacccaccccgtgaagcccctggcccagatcgccggaaacagatacgcctccggacctgtgggaaaggccctgagcgacgcatgtatgggcacaatcgcctccttcctgtctaagtaccaggacatcatcatcgaacaccagaaggtggtgaagggcaaccagaagagactggagagcctgcgggagctggccggcaaggaaaacctggaataccctagcgtgaccctgccacctcagcctcacaccaaggagggcgttgatgcctacaacgaagtgatcgcccgggtgcgaatgtgggtgaacctgaacctgtggcagaagctgaagctaagcagagatgatgccaagcctctgctgagactgaagggattcccttcctttcctctggtcgagagacaggccaacgaagtggactggtgggacatggtgtgtaacgtgaagaagctgatcaacgagaaaaaggaggatggcaaggtgttttggcagaatctggctggctacaagagacaggaagccctgagaccatacctgagcagcgaggaagatcggaagaagggaaagaaattcgctcggtaccagctgggcgacctgctgctgcacctggaaaagaagcacggcgaggactggggaaaggtgtacgacgaggcctgggagcggattgacaagaaagtggaaggcctgagcaagcacatcaagctggaagaggaacggagaagcgaggacgcccagagcaaggccgccctgaccgactggctgcgggctaaggccagcttcgtgatcgagggcctgaaggaggccgacaaggacgagttctgcagatgcgagctgaagctgcagaagtggtacggggacctgcggggaaagcccttcgccatcgaagccgagaacagcatcctggacatcagcggcttcagcaagcagtacaactgtgccttcatctggcagaaggacggcgtgaagaagctgaacctgtacctgatcatcaactacttcaagggcggcaagctgcggttcaagaagatcaaacctgaagccttcgaagccaacagattctacaccgtgatcaacaaaaagagcggcgagatcgtgcccatggaggtgaacttcaacttcgacgaccccaacctgatcatcctgcctctggcctttggcaagagacagggcagagaattcatctggaacgacctgctgtccctggaaaccggcagcctgaagctggccaacggaagagtgatcgagaagacactgtacaacagaagaacccggcaggatgagcctgccctgttcgtggccctgaccttcgagcggcgggaggtcctggactcctccaatatcaaaccaatgaacctgatcggcgtggcaagaggcgaaaacatccccgccgtgatcgccctgaccgaccccgagggctgcccactgagccggtttaaggatagcctgggaaacccaacccacatcctgagaatcggcgagagctataaggagaagcagcggaccatccaggccaagaaggaggtggagcagcggagagccggcggctacagccggaagtacgccagcaaagccaagaatctggcagacgatatggtgagaaacaccgctagagatctgctgtactacgccgtgacccaggatgccatgctgatcttcgccaacctgagccggggcttcggccggcagggcaagcggaccttcatggccgagagacagtacacacggatggaggactggctgaccgccaagctggcctacgagggcctgagcaagacctacctgtccaagacactggcccagtacacctccaagacatgcagcaactgtgggtttaccatcaccagcgccgactacgacagggtgctggagaagctgaagaagacagcaacaggctggatgaccacaattaacggcaaggagctgaaggtggagggccagattacctactacaacagatacaagagacagaacgtagtcaaggacctgtccgtcgagctggatagactgagcgaagaatctgtgaacaacgacatctcctcctggacaaagggcagaagcggagaagctctgagcctcctgaagaaaagattctcccatagacccgtgcaggagaagttcgtgtgcctgaactgcggcttcgagacacacgcagccgagcaagccgccctgaacatcgccagatcctggctgttcctgcggagccaggagtacaagaaataccagacaaacaagacaaccggcaacaccgataagagagccttcgtcgagacctggcagtccttttaccggaagaagcttaaggaggtgtggaaacctgccgtgcggtctggcggatctggcggaggctccgtgcccgtgaccttcgaggacgtggccgtgaggttcagcgccgaggagtgggagatcctggagggctggcagaaggagctgcacaaggaggtgatggaggagaactaccagctgctgatcagcctgggccagcccgtgcccaccctggccctgctggccctgaccgccgagagggaggccgccggcggccagatcaggagcgtgagcggcgagagggagctggccagcaagggcggcagcagcggcggcccaagcagcggcgcccctcctcccagcggcggcagcccagccggctccccaacctctaccgaggagggcacctctgagtccgccacccccgagagcggccctggcacctccaccgagcccagcgagggcagcgcacccggcagccctgccggcagccccacctccacagaggagggaaccagcaccgagcccagcgaaggcagcgccccaggcaccagcaccgagcctagtgagcaggagattaaacggatcaacaagatcagaagaagacttgtgaaagacagcaacaccaagaaggccggcaagacaggccccatgaaaaccctgctggttagagtgatgacacccgatctgagagagcggctggaaaacctgagaaagaagcctgaaaatatcccccagcccatcagcaatacatctagagccaacctgaataagctgctgaccgattacaccgaaatgaagaaggcgatcctgcatgtgtactgggaagagttccagaaggaccctgtgggcctgatgagccgggtggcccagcctgccagcaagaagatcgatcagaacaagctgaaacctgagatggacgagaagggcaacctgaccaccgccggctttgcctgctctcagtgtggccagcccctgttcgtgtacaagctggagcaggtgtctgagaagggcaaggcttacaccaactacttcggacggtgcaatgtggccgagcacgaaaagctgatcctgctggcccagctgaagcccgagaaggatagcgacgaagccgtgacatatagcctgggaaagtttgggcagagggccctggatttctacagcattcatgtgaccaaggagtccacccaccccgtgaagcccctggcccagatcgccggaaacagatacgcctccggacctgtgggaaaggccctgagcgacgcatgtatgggcacaatcgcctccttcctgtctaagtaccaggacatcatcatcgaacaccagaaggtggtgaagggcaaccagaagagactggagagcctgcgggagctggccggcaaggaaaacctggaataccctagcgtgaccctgccacctcagcctcacaccaaggagggcgttgatgcctacaacgaagtgatcgcccgggtgcgaatgtgggtgaacctgaacctgtggcagaagctgaagctaagcagagatgatgccaagcctctgctgagactgaagggattcccttcctttcctctggtcgagagacaggccaacgaagtggactggtgggacatggtgtgtaacgtgaagaagctgatcaacgagaaaaaggaggatggcaaggtgttttggcagaatctggctggctacaagagacaggaagccctgagaccatacctgagcagcgaggaagatcggaagaagggaaagaaattcgctcggtaccagctgggcgacctgctgctgcacctggaaaagaagcacggcgaggactggggaaaggtgtacgacgaggcctgggagcggattgacaagaaagtggaaggcctgagcaagcacatcaagctggaagaggaacggagaagcgaggacgcccagagcaaggccgccctgaccgactggctgcgggctaaggccagcttcgtgatcgagggcctgaaggaggccgacaaggacgagttctgcagatgcgagctgaagctgcagaagtggtacggggacctgcggggaaagcccttcgccatcgaagccgagaacagcatcctggacatcagcggcttcagcaagcagtacaactgtgccttcatctggcagaaggacggcgtgaagaagctgaacctgtacctgatcatcaactacttcaagggcggcaagctgcggttcaagaagatcaaacctgaagccttcgaagccaacagattctacaccgtgatcaacaaaaagagcggcgagatcgtgcccatggaggtgaacttcaacttcgacgaccccaacctgatcatcctgcctctggcctttggcaagagacagggcagagaattcatctggaacgacctgctgtccctggaaaccggcagcctgaagctggccaacggaagagtgatcgagaagacactgtacaacagaagaacccggcaggatgagcctgccctgttcgtggccctgaccttcgagcggcgggaggtcctggactcctccaatatcaaaccaatgaacctgatcggcgtggcaagaggcgaaaacatccccgccgtgatcgccctgaccgaccccgagggctgcccactgagccggtttaaggatagcctgggaaacccaacccacatcctgagaatcggcgagagctataaggagaagcagcggaccatccaggccaagaaggaggtggagcagcggagagccggcggctacagccggaagtacgccagcaaagccaagaatctggcagacgatatggtgagaaacaccgctagagatctgctgtactacgccgtgacccaggatgccatgctgatcttcgccaacctgagccggggcttcggccggcagggcaagcggaccttcatggccgagagacagtacacacggatggaggactggctgaccgccaagctggcctacgagggcctgagcaagacctacctgtccaagacactggcccagtacacctccaagacatgcagcaactgtgggtttaccatcaccagcgccgactacgacagggtgctggagaagctgaagaagacagcaacaggctggatgaccacaattaacggcaaggagctgaaggtggagggccagattacctactacaacagatacaagagacagaacgtagtcaaggacctgtccgtcgagctggatagactgagcgaagaatctgtgaacaacgacatctcctcctggacaaagggcagaagcggagaagctctgagcctcctgaagaaaagattctcccatagacccgtgcaggagaagttcgtgtgcctgaactgcggcttcgagacacacgcagccgagcaagccgccctgaacatcgccagatcctggctgttcctgcggagccaggagtacaagaaataccagacaaacaagacaaccggcaacaccgataagagagccttcgtcgagacctggcagtccttttaccggaagaagcttaaggaggtgtggaaacctgccgtgcggtctggcggatctggcggaggctcctgtgcccgtgaccttcgaggacgtggccgtgaggttcagcgccgaggagtgggagatcctggagggctggcagaaggagctgcacaaggaggtgatggaggagaactaccagctgctgatcagcctgggccagcccgtgcccaccctggccctgctggccctgaccgccgagagggaggccgccggcggccagatcaggagcgtgagcggcgagagggagctggccagcaagggcggcagcagcggatctggctccggcagcggccccaagaaaaagagaaaagtctaagctgccttctgcggggcttgccttctggccatgcccttcttctctcccttgcacctgtacctcttggtctttgaataaagcctgagtaggaaggctagcaaaaaaaaaaaaaaaaaaaaaaaaaaaaaaaaaaaaaaaaaaaaaaaaaaaaaaaaaaaaaaaaaaaaaaaaaaaaaaaa

SEQ ID NO: 16499 - RNA, 9485 nt, synthetic construct
  source 1..9485: mol_type = other RNA
aggaaataagagagaaaagaagagtaagaagaaatataagagccaccatggcccctaagaagaagcgtaaagtgagccggatggaacgcctcgtctacgaggtgcggcagaagtgcagaaacatcgaggacatctgcatctcctgcggatctctgaacgtgaccctggagcacccactgttcatcggcggcatgtgccagaactgtaaaaactgttttctggagtgtgcctatcaatacgacgatgacggctaccagagctactgcaccatctgttgcggcggaagagaggtgctgatgtgtggaaataacaactgctgccggtgcttctgcgtggaatgcgtggacctgctggtgggccccggcgccgcccaggccgctattaaggaagatccttggaactgctacatgtgcggccacaagggcacatacggcctgctgagacggagagaggactggcctagcagactgcagatgttcttcgccaataaccacgaccaggagttcgacccccctaaggtgtaccctcccgtccccgccgagaagagaaagcccatccgggtcctgagcctgttcgatggcatcgccaccggtctgctggtgctgaaggacctgggcatccaggtggataggtacattgcctccgaggtgtgcgaggactccatcaccgtgggaatggtgcgtcatcagggcaagatcatgtacgtgggcgacgtgcggagcgtgacacagaagcatatccaggagtggggccctttcgacctggtgatcggcggcagcccttgcaatgacctgagcatcgtgaacccagcccggaagggcctgtacgagggaaccggcagactgttcttcgagttttacagactgctgcacgacgcccggcctaaggaaggcgacgaccggcccttcttttggctgttcgagaatgtggtggccatgggagtcagcgacaagcgggatattagccggttcctggagagcaaccccgtgatgatcgatgccaaggaagtgagcgccgcccaccgggccagatacttctggggcaatctgcctggcatgaacagacccctggccagcaccgtgaacgacaagctggagctgcaggagtgcctggagcacggccggatcgccaagttcagcaaggtgagaaccatcaccacccgaagcaacagcatcaaacaaggcaaggaccagcactttcctgtgttcatgaacgagaaggaggacatcctgtggtgtaccgagatggagagagtgttcgggttcccagtccactacacagatgtcagcaacatgtctagactggccagacagagactgctgggaagaagctggtccgtccctgtgatcagacacctgttcgcccctctgaaggagtacttcgcctgcgtgagcagcggcaacagcaacgccaacagccggggccccagcttctctagcggcctggtgccactgtccctgagagggagccacatgggccccatggagatctacaaaaccgtgagcgcctggaagcggcagcctgtgcgcgtgctgagcctgtttcggaatatcgataaagtcctgaaaagcctgggattcctggagagcggctctggctccggcggtggcaccctgaagtacgtggaggatgtgacaaacgtggtcagacgggatgtggagaagtggggccccttcgatctggtgtacggcagcacccaacccctgggcagctcttgtgaccggtgccctggctggtacatgtttcagttccaccggatcctgcagtacgccctgccgagacaggagtcccagcggccattcttttggattttcatggacaacttgctgctgaccgaggatgaccaggaaactaccactcggttcctgcagaccgaagccgtgaccctgcaggacgtgagaggccgggactaccagaacgccatgcgggtgtggtccaacatccctggactgaaaagcaagcacgcacctctgacccctaaagaagaggagtacctgcaggcccaggtgcggagcagaagcaagctggacgcccctaaggtggatctgctggtgaagaattgcctcctgcccctgagagagtacttcaagtatttcagccagaatagtctgcccctgggaggcagcggcggcggcgccctggtgacatttgaggacgtcgccgtgcggttcacccaggaggaatgggctctgctggatccttctcagaaaatcctgtaccgggacgtgatgagagagacataccggaatctgacctccgtgggcatcaactgggaatgttgggaccttgaagcctgcttcagaagcctgggaagaaacctgagagtgcaggtggtgaagagaaagtgcgagctgaccaacagcggcccctgcgccgagggcggcccaagcagcggcgcccctcctcccagcggcggcagcccagccggctccccaacctctaccgaggagggcacctctgagtccgccacccccgagagcggccctggcacctccaccgagcccagcgagggcagcgcacccggcagccctgccggcagccccacctccacagaggagggaaccagcaccgagcccagcgaaggcagcgccccaggcaccagcaccgagcctagtgagcaggagattaaacggatcaacaagatcagaagaagacttgtgaaagacagcaacaccaagaaggccggcaagacaggccccatgaaaaccctgctggttagagtgatgacacccgatctgagagagcggctggaaaacctgagaaagaagcctgaaaatatcccccagcccatcagcaatacatctagagccaacctgaataagctgctgaccgattacaccgaaatgaagaaggcgatcctgcatgtgtactgggaagagttccagaaggaccctgtgggcctgatgagccgggtggcccagcctgccagcaagaagatcgatcagaacaagctgaaacctgagatggacgagaagggcaacctgaccaccgccggctttgcctgctctcagtgtggccagcccctgttcgtgtacaagctggagcaggtgtctgagaagggcaaggcttacaccaactacttcggacggtgcaatgtggccgagcacgaaaagctgatcctgctggcccagctgaagcccgagaaggatagcgacgaagccgtgacatatagcctgggaaagtttgggcagagggccctggatttctacagcattcatgtgaccaaggagtccacccaccccgtgaagcccctggcccagatcgccggaaacagatacgcctccggacctgtgggaaaggccctgagcgacgcatgtatgggcacaatcgcctccttcctgtctaagtaccaggacatcatcatcgaacaccagaaggtggtgaagggcaaccagaagagactggagagcctgcgggagctggccggcaaggaaaacctggaataccctagcgtgaccctgccacctcagcctcacaccaaggagggcgttgatgcctacaacgaagtgatcgcccgggtgcgaatgtgggtgaacctgaacctgtggcagaagctgaagctaagcagagatgatgccaagcctctgctgagactgaagggattcccttcctttcctctggtcgagagacaggccaacgaagtggactggtgggacatggtgtgtaacgtgaagaagctgatcaacgagaaaaaggaggatggcaaggtgttttggcagaatctggctggctacaagagacaggaagccctgagaccatacctgagcagcgaggaagatcggaagaagggaaagaaattcgctcggtaccagctgggcgacctgctgctgcacctggaaaagaagcacggcgaggactggggaaaggtgtacgacgaggcctgggagcggattgacaagaaagtggaaggcctgagcaagcacatcaagctggaagaggaacggagaagcgaggacgcccagagcaaggccgccctgaccgactggctgcgggctaaggccagcttcgtgatcgagggcctgaaggaggccgacaaggacgagttctgcagatgcgagctgaagctgcagaagtggtacggggacctgcggggaaagcccttcgccatcgaagccgagaacagcatcctggacatcagcggcttcagcaagcagtacaactgtgccttcatctggcagaaggacggcgtgaagaagctgaacctgtacctgatcatcaactacttcaagggcggcaagctgcggttcaagaagatcaaacctgaagccttcgaagccaacagattctacaccgtgatcaacaaaaagagcggcgagatcgtgcccatggaggtgaacttcaacttcgacgaccccaacctgatcatcctgcctctggcctttggcaagagacagggcagagaattcatctggaacgacctgctgtccctggaaaccggcagcctgaagctggccaacggaagagtgatcgagaagacactgtacaacagaagaacccggcaggatgagcctgccctgttcgtggccctgaccttcgagcggcgggaggtcctggactcctccaatatcaaaccaatgaacctgatcggcgtggcaagaggcgaaaacatccccgccgtgatcgccctgaccgaccccgagggctgcccactgagccggtttaaggatagcctgggaaacccaacccacatcctgagaatcggcgagagctataaggagaagcagcggaccatccaggccaagaaggaggtggagcagcggagagccggcggctacagccggaagtacgccagcaaagccaagaatctggcagacgatatggtgagaaacaccgctagagatctgctgtactacgccgtgacccaggatgccatgctgatcttcgccaacctgagccggggcttcggccggcagggcaagcggaccttcatggccgagagacagtacacacggatggaggactggctgaccgccaagctggcctacgagggcctgagcaagacctacctgtccaagacactggcccagtacacctccaagacatgcagcaactgtgggtttaccatcaccagcgccgactacgacagggtgctggagaagctgaagaagacagcaacaggctggatgaccacaattaacggcaaggagctgaaggtggagggccagattacctactacaacagatacaagagacagaacgtagtcaaggacctgtccgtcgagctggatagactgagcgaagaatctgtgaacaacgacatctcctcctggacaaagggcagaagcggagaagctctgagcctcctgaagaaaagattctcccatagacccgtgcaggagaagttcgtgtgcctgaactgcggcttcgagacacacgcagccgagcaagccgccctgaacatcgccagatcctggctgttcctgcggagccaggagtacaagaaataccagacaaacaagacaaccggcaacaccgataagagagccttcgtcgagacctggcagtccttttaccggaagaagcttaaggaggtgtggaaacctgccgtgcggtctggcggatctggcggaggctccatggccttcaaggacgtggccgtggccttcacccagaaggagtggaagctgctgagccccgcccagaggaccctgtacagggacgtgatgctggagaactacagccacatggtgagcctgggcatcgccttccccaagcccaagctgatcatccagctggagcagggcgacgagccctggagggaggagagcgagagcctgctggacctgtgccccgagcccaggaccgagttccagccccacggcggcccaagcagcggcgcccctcctcccagcggcggcagcccagccggctccccaacctctaccgaggagggcacctctgagtccgccacccccgagagcggccctggcacctccaccgagcccagcgagggcagcgcacccggcagccctgccggcagccccacctccacagaggagggaaccagcaccgagcccagcgaaggcagcgccccaggcaccagcaccgagcctagtgagcaggagattaaacggatcaacaagatcagaagaagacttgtgaaagacagcaacaccaagaaggccggcaagacaggccccatgaaaaccctgctggttagagtgatgacacccgatctgagagagcggctggaaaacctgagaaagaagcctgaaaatatcccccagcccatcagcaatacatctagagccaacctgaataagctgctgaccgattacaccgaaatgaagaaggcgatcctgcatgtgtactgggaagagttccagaaggaccctgtgggcctgatgagccgggtggcccagcctgccagcaagaagatcgatcagaacaagctgaaacctgagatggacgagaagggcaacctgaccaccgccggctttgcctgctctcagtgtggccagcccctgttcgtgtacaagctggagcaggtgtctgagaagggcaaggcttacaccaactacttcggacggtgcaatgtggccgagcacgaaaagctgatcctgctggcccagctgaagcccgagaaggatagcgacgaagccgtgacatatagcctgggaaagtttgggcagagggccctggatttctacagcattcatgtgaccaaggagtccacccaccccgtgaagcccctggcccagatcgccggaaacagatacgcctccggacctgtgggaaaggccctgagcgacgcatgtatgggcacaatcgcctccttcctgtctaagtaccaggacatcatcatcgaacaccagaaggtggtgaagggcaaccagaagagactggagagcctgcgggagctggccggcaaggaaaacctggaataccctagcgtgaccctgccacctcagcctcacaccaaggagggcgttgatgcctacaacgaagtgatcgcccgggtgcgaatgtgggtgaacctgaacctgtggcagaagctgaagctaagcagagatgatgccaagcctctgctgagactgaagggattcccttcctttcctctggtcgagagacaggccaacgaagtggactggtgggacatggtgtgtaacgtgaagaagctgatcaacgagaaaaaggaggatggcaaggtgttttggcagaatctggctggctacaagagacaggaagccctgagaccatacctgagcagcgaggaagatcggaagaagggaaagaaattcgctcggtaccagctgggcgacctgctgctgcacctggaaaagaagcacggcgaggactggggaaaggtgtacgacgaggcctgggagcggattgacaagaaagtggaaggcctgagcaagcacatcaagctggaagaggaacggagaagcgaggacgcccagagcaaggccgccctgaccgactggctgcgggctaaggccagcttcgtgatcgagggcctgaaggaggccgacaaggacgagttctgcagatgcgagctgaagctgcagaagtggtacggggacctgcggggaaagcccttcgccatcgaagccgagaacagcatcctggacatcagcggcttcagcaagcagtacaactgtgccttcatctggcagaaggacggcgtgaagaagctgaacctgtacctgatcatcaactacttcaagggcggcaagctgcggttcaagaagatcaaacctgaagccttcgaagccaacagattctacaccgtgatcaacaaaaagagcggcgagatcgtgcccatggaggtgaacttcaacttcgacgaccccaacctgatcatcctgcctctggcctttggcaagagacagggcagagaattcatctggaacgacctgctgtccctggaaaccggcagcctgaagctggccaacggaagagtgatcgagaagacactgtacaacagaagaacccggcaggatgagcctgccctgttcgtggccctgaccttcgagcggcgggaggtcctggactcctccaatatcaaaccaatgaacctgatcggcgtggcaagaggcgaaaacatccccgccgtgatcgccctgaccgaccccgagggctgcccactgagccggtttaaggatagcctgggaaacccaacccacatcctgagaatcggcgagagctataaggagaagcagcggaccatccaggccaagaaggaggtggagcagcggagagccggcggctacagccggaagtacgccagcaaagccaagaatctggcagacgatatggtgagaaacaccgctagagatctgctgtactacgccgtgacccaggatgccatgctgatcttcgccaacctgagccggggcttcggccggcagggcaagcggaccttcatggccgagagacagtacacacggatggaggactggctgaccgccaagctggcctacgagggcctgagcaagacctacctgtccaagacactggcccagtacacctccaagacatgcagcaactgtgggtttaccatcaccagcgccgactacgacagggtgctggagaagctgaagaagacagcaacaggctggatgaccacaattaacggcaaggagctgaaggtggagggccagattacctactacaacagatacaagagacagaacgtagtcaaggacctgtccgtcgagctggatagactgagcgaagaatctgtgaacaacgacatctcctcctggacaaagggcagaagcggagaagctctgagcctcctgaagaaaagattctcccatagacccgtgcaggagaagttcgtgtgcctgaactgcggcttcgagacacacgcagccgagcaagccgccctgaacatcgccagatcctggctgttcctgcggagccaggagtacaagaaataccagacaaacaagacaaccggcaacaccgataagagagccttcgtcgagacctggcagtccttttaccggaagaagcttaaggaggtgtggaaacctgccgtgcggtctggcggatctggcggaggctcctatggccttcaaggacgtggccgtggccttcacccagaaggagtggaagctgctgagccccgcccagaggaccctgtacagggacgtgatgctggagaactacagccacatggtgagcctgggcatcgccttccccaagcccaagctgatcatccagctggagcagggcgacgagccctggagggaggagagcgagagcctgctggacctgtgccccgagcccaggaccgagttccagccccacggatctggctccggcagcggccccaagaaaaagagaaaagtctaagctgccttctgcggggcttgccttctggccatgcccttcttctctcccttgcacctgtacctcttggtctttgaataaagcctgagtaggaaggctagcaaaaaaaaaaaaaaaaaaaaaaaaaaaaaaaaaaaaaaaaaaaaaaaaaaaaaaaaaaaaaaaaaaaaaaaaaaaaaaaa

SEQ ID NO: 16500 - RNA, 9485 nt, synthetic construct
  source 1..9485: mol_type = other RNA
aggaaataagagagaaaagaagagtaagaagaaatataagagccaccatggcccctaagaagaagcgtaaagtgagccggatggaacgcctcgtctacgaggtgcggcagaagtgcagaaacatcgaggacatctgcatctcctgcggatctctgaacgtgaccctggagcacccactgttcatcggcggcatgtgccagaactgtaaaaactgttttctggagtgtgcctatcaatacgacgatgacggctaccagagctactgcaccatctgttgcggcggaagagaggtgctgatgtgtggaaataacaactgctgccggtgcttctgcgtggaatgcgtggacctgctggtgggccccggcgccgcccaggccgctattaaggaagatccttggaactgctacatgtgcggccacaagggcacatacggcctgctgagacggagagaggactggcctagcagactgcagatgttcttcgccaataaccacgaccaggagttcgacccccctaaggtgtaccctcccgtccccgccgagaagagaaagcccatccgggtcctgagcctgttcgatggcatcgccaccggtctgctggtgctgaaggacctgggcatccaggtggataggtacattgcctccgaggtgtgcgaggactccatcaccgtgggaatggtgcgtcatcagggcaagatcatgtacgtgggcgacgtgcggagcgtgacacagaagcatatccaggagtggggccctttcgacctggtgatcggcggcagcccttgcaatgacctgagcatcgtgaacccagcccggaagggcctgtacgagggaaccggcagactgttcttcgagttttacagactgctgcacgacgcccggcctaaggaaggcgacgaccggcccttcttttggctgttcgagaatgtggtggccatgggagtcagcgacaagcgggatattagccggttcctggagagcaaccccgtgatgatcgatgccaaggaagtgagcgccgcccaccgggccagatacttctggggcaatctgcctggcatgaacagacccctggccagcaccgtgaacgacaagctggagctgcaggagtgcctggagcacggccggatcgccaagttcagcaaggtgagaaccatcaccacccgaagcaacagcatcaaacaaggcaaggaccagcactttcctgtgttcatgaacgagaaggaggacatcctgtggtgtaccgagatggagagagtgttcgggttcccagtccactacacagatgtcagcaacatgtctagactggccagacagagactgctgggaagaagctggtccgtccctgtgatcagacacctgttcgcccctctgaaggagtacttcgcctgcgtgagcagcggcaacagcaacgccaacagccggggccccagcttctctagcggcctggtgccactgtccctgagagggagccacatgggccccatggagatctacaaaaccgtgagcgcctggaagcggcagcctgtgcgcgtgctgagcctgtttcggaatatcgataaagtcctgaaaagcctgggattcctggagagcggctctggctccggcggtggcaccctgaagtacgtggaggatgtgacaaacgtggtcagacgggatgtggagaagtggggccccttcgatctggtgtacggcagcacccaacccctgggcagctcttgtgaccggtgccctggctggtacatgtttcagttccaccggatcctgcagtacgccctgccgagacaggagtcccagcggccattcttttggattttcatggacaacttgctgctgaccgaggatgaccaggaaactaccactcggttcctgcagaccgaagccgtgaccctgcaggacgtgagaggccgggactaccagaacgccatgcgggtgtggtccaacatccctggactgaaaagcaagcacgcacctctgacccctaaagaagaggagtacctgcaggcccaggtgcggagcagaagcaagctggacgcccctaaggtggatctgctggtgaagaattgcctcctgcccctgagagagtacttcaagtatttcagccagaatagtctgcccctgggaggcagcggcggcggcgccctggtgacatttgaggacgtcgccgtgcggttcacccaggaggaatgggctctgctggatccttctcagaaaatcctgtaccgggacgtgatgagagagacataccggaatctgacctccgtgggcatcaactgggaatgttgggaccttgaagcctgcttcagaagcctgggaagaaacctgagagtgcaggtggtgaagagaaagtgcgagctgaccaacagcggcccctgcgccgagggcggcccaagcagcggcgcccctcctcccagcggcggcagcccagccggctccccaacctctaccgaggagggcacctctgagtccgccacccccgagagcggccctggcacctccaccgagcccagcgagggcagcgcacccggcagccctgccggcagccccacctccacagaggagggaaccagcaccgagcccagcgaaggcagcgccccaggcaccagcaccgagcctagtgagcaggagattaaacggatcaacaagatcagaagaagacttgtgaaagacagcaacaccaagaaggccggcaagacaggccccatgaaaaccctgctggttagagtgatgacacccgatctgagagagcggctggaaaacctgagaaagaagcctgaaaatatcccccagcccatcagcaatacatctagagccaacctgaataagctgctgaccgattacaccgaaatgaagaaggcgatcctgcatgtgtactgggaagagttccagaaggaccctgtgggcctgatgagccgggtggcccagcctgccagcaagaagatcgatcagaacaagctgaaacctgagatggacgagaagggcaacctgaccaccgccggctttgcctgctctcagtgtggccagcccctgttcgtgtacaagctggagcaggtgtctgagaagggcaaggcttacaccaactacttcggacggtgcaatgtggccgagcacgaaaagctgatcctgctggcccagctgaagcccgagaaggatagcgacgaagccgtgacatatagcctgggaaagtttgggcagagggccctggatttctacagcattcatgtgaccaaggagtccacccaccccgtgaagcccctggcccagatcgccggaaacagatacgcctccggacctgtgggaaaggccctgagcgacgcatgtatgggcacaatcgcctccttcctgtctaagtaccaggacatcatcatcgaacaccagaaggtggtgaagggcaaccagaagagactggagagcctgcgggagctggccggcaaggaaaacctggaataccctagcgtgaccctgccacctcagcctcacaccaaggagggcgttgatgcctacaacgaagtgatcgcccgggtgcgaatgtgggtgaacctgaacctgtggcagaagctgaagctaagcagagatgatgccaagcctctgctgagactgaagggattcccttcctttcctctggtcgagagacaggccaacgaagtggactggtgggacatggtgtgtaacgtgaagaagctgatcaacgagaaaaaggaggatggcaaggtgttttggcagaatctggctggctacaagagacaggaagccctgagaccatacctgagcagcgaggaagatcggaagaagggaaagaaattcgctcggtaccagctgggcgacctgctgctgcacctggaaaagaagcacggcgaggactggggaaaggtgtacgacgaggcctgggagcggattgacaagaaagtggaaggcctgagcaagcacatcaagctggaagaggaacggagaagcgaggacgcccagagcaaggccgccctgaccgactggctgcgggctaaggccagcttcgtgatcgagggcctgaaggaggccgacaaggacgagttctgcagatgcgagctgaagctgcagaagtggtacggggacctgcggggaaagcccttcgccatcgaagccgagaacagcatcctggacatcagcggcttcagcaagcagtacaactgtgccttcatctggcagaaggacggcgtgaagaagctgaacctgtacctgatcatcaactacttcaagggcggcaagctgcggttcaagaagatcaaacctgaagccttcgaagccaacagattctacaccgtgatcaacaaaaagagcggcgagatcgtgcccatggaggtgaacttcaacttcgacgaccccaacctgatcatcctgcctctggcctttggcaagagacagggcagagaattcatctggaacgacctgctgtccctggaaaccggcagcctgaagctggccaacggaagagtgatcgagaagacactgtacaacagaagaacccggcaggatgagcctgccctgttcgtggccctgaccttcgagcggcgggaggtcctggactcctccaatatcaaaccaatgaacctgatcggcgtggcaagaggcgaaaacatccccgccgtgatcgccctgaccgaccccgagggctgcccactgagccggtttaaggatagcctgggaaacccaacccacatcctgagaatcggcgagagctataaggagaagcagcggaccatccaggccaagaaggaggtggagcagcggagagccggcggctacagccggaagtacgccagcaaagccaagaatctggcagacgatatggtgagaaacaccgctagagatctgctgtactacgccgtgacccaggatgccatgctgatcttcgccaacctgagccggggcttcggccggcagggcaagcggaccttcatggccgagagacagtacacacggatggaggactggctgaccgccaagctggcctacgagggcctgagcaagacctacctgtccaagacactggcccagtacacctccaagacatgcagcaactgtgggtttaccatcaccagcgccgactacgacagggtgctggagaagctgaagaagacagcaacaggctggatgaccacaattaacggcaaggagctgaaggtggagggccagattacctactacaacagatacaagagacagaacgtagtcaaggacctgtccgtcgagctggatagactgagcgaagaatctgtgaacaacgacatctcctcctggacaaagggcagaagcggagaagctctgagcctcctgaagaaaagattctcccatagacccgtgcaggagaagttcgtgtgcctgaactgcggcttcgagacacacgcagccgagcaagccgccctgaacatcgccagatcctggctgttcctgcggagccaggagtacaagaaataccagacaaacaagacaaccggcaacaccgataagagagccttcgtcgagacctggcagtccttttaccggaagaagcttaaggaggtgtggaaacctgccgtgcggtctggcggatctggcggaggctccagccaggagagcgtgagcttcgaggacgtggccgtgtacttcacccagaaccagtgggccagcctggacagcgcccagaggaccctgtacaggaaggtgatgctggagaactacgccaacgtgaccagcctggccgccttccccttccccaagcccgacctgatcctgcagctggagcagggcgaggcccccggcggcctggacccctggacccccatcaggagggaggtgaggggcgtgtgcggcggcccaagcagcggcgcccctcctcccagcggcggcagcccagccggctccccaacctctaccgaggagggcacctctgagtccgccacccccgagagcggccctggcacctccaccgagcccagcgagggcagcgcacccggcagccctgccggcagccccacctccacagaggagggaaccagcaccgagcccagcgaaggcagcgccccaggcaccagcaccgagcctagtgagcaggagattaaacggatcaacaagatcagaagaagacttgtgaaagacagcaacaccaagaaggccggcaagacaggccccatgaaaaccctgctggttagagtgatgacacccgatctgagagagcggctggaaaacctgagaaagaagcctgaaaatatcccccagcccatcagcaatacatctagagccaacctgaataagctgctgaccgattacaccgaaatgaagaaggcgatcctgcatgtgtactgggaagagttccagaaggaccctgtgggcctgatgagccgggtggcccagcctgccagcaagaagatcgatcagaacaagctgaaacctgagatggacgagaagggcaacctgaccaccgccggctttgcctgctctcagtgtggccagcccctgttcgtgtacaagctggagcaggtgtctgagaagggcaaggcttacaccaactacttcggacggtgcaatgtggccgagcacgaaaagctgatcctgctggcccagctgaagcccgagaaggatagcgacgaagccgtgacatatagcctgggaaagtttgggcagagggccctggatttctacagcattcatgtgaccaaggagtccacccaccccgtgaagcccctggcccagatcgccggaaacagatacgcctccggacctgtgggaaaggccctgagcgacgcatgtatgggcacaatcgcctccttcctgtctaagtaccaggacatcatcatcgaacaccagaaggtggtgaagggcaaccagaagagactggagagcctgcgggagctggccggcaaggaaaacctggaataccctagcgtgaccctgccacctcagcctcacaccaaggagggcgttgatgcctacaacgaagtgatcgcccgggtgcgaatgtgggtgaacctgaacctgtggcagaagctgaagctaagcagagatgatgccaagcctctgctgagactgaagggattcccttcctttcctctggtcgagagacaggccaacgaagtggactggtgggacatggtgtgtaacgtgaagaagctgatcaacgagaaaaaggaggatggcaaggtgttttggcagaatctggctggctacaagagacaggaagccctgagaccatacctgagcagcgaggaagatcggaagaagggaaagaaattcgctcggtaccagctgggcgacctgctgctgcacctggaaaagaagcacggcgaggactggggaaaggtgtacgacgaggcctgggagcggattgacaagaaagtggaaggcctgagcaagcacatcaagctggaagaggaacggagaagcgaggacgcccagagcaaggccgccctgaccgactggctgcgggctaaggccagcttcgtgatcgagggcctgaaggaggccgacaaggacgagttctgcagatgcgagctgaagctgcagaagtggtacggggacctgcggggaaagcccttcgccatcgaagccgagaacagcatcctggacatcagcggcttcagcaagcagtacaactgtgccttcatctggcagaaggacggcgtgaagaagctgaacctgtacctgatcatcaactacttcaagggcggcaagctgcggttcaagaagatcaaacctgaagccttcgaagccaacagattctacaccgtgatcaacaaaaagagcggcgagatcgtgcccatggaggtgaacttcaacttcgacgaccccaacctgatcatcctgcctctggcctttggcaagagacagggcagagaattcatctggaacgacctgctgtccctggaaaccggcagcctgaagctggccaacggaagagtgatcgagaagacactgtacaacagaagaacccggcaggatgagcctgccctgttcgtggccctgaccttcgagcggcgggaggtcctggactcctccaatatcaaaccaatgaacctgatcggcgtggcaagaggcgaaaacatccccgccgtgatcgccctgaccgaccccgagggctgcccactgagccggtttaaggatagcctgggaaacccaacccacatcctgagaatcggcgagagctataaggagaagcagcggaccatccaggccaagaaggaggtggagcagcggagagccggcggctacagccggaagtacgccagcaaagccaagaatctggcagacgatatggtgagaaacaccgctagagatctgctgtactacgccgtgacccaggatgccatgctgatcttcgccaacctgagccggggcttcggccggcagggcaagcggaccttcatggccgagagacagtacacacggatggaggactggctgaccgccaagctggcctacgagggcctgagcaagacctacctgtccaagacactggcccagtacacctccaagacatgcagcaactgtgggtttaccatcaccagcgccgactacgacagggtgctggagaagctgaagaagacagcaacaggctggatgaccacaattaacggcaaggagctgaaggtggagggccagattacctactacaacagatacaagagacagaacgtagtcaaggacctgtccgtcgagctggatagactgagcgaagaatctgtgaacaacgacatctcctcctggacaaagggcagaagcggagaagctctgagcctcctgaagaaaagattctcccatagacccgtgcaggagaagttcgtgtgcctgaactgcggcttcgagacacacgcagccgagcaagccgccctgaacatcgccagatcctggctgttcctgcggagccaggagtacaagaaataccagacaaacaagacaaccggcaacaccgataagagagccttcgtcgagacctggcagtccttttaccggaagaagcttaaggaggtgtggaaacctgccgtgcggtctggcggatctggcggaggctcctagccaggagagcgtgagcttcgaggacgtggccgtgtacttcacccagaaccagtgggccagcctggacagcgcccagaggaccctgtacaggaaggtgatgctggagaactacgccaacgtgaccagcctggccgccttccccttccccaagcccgacctgatcctgcagctggagcagggcgaggcccccggcggcctggacccctggacccccatcaggagggaggtgaggggcgtgtgcggatctggctccggcagcggccccaagaaaaagagaaaagtctaagctgccttctgcggggcttgccttctggccatgcccttcttctctcccttgcacctgtacctcttggtctttgaataaagcctgagtaggaaggctagcaaaaaaaaaaaaaaaaaaaaaaaaaaaaaaaaaaaaaaaaaaaaaaaaaaaaaaaaaaaaaaaaaaaaaaaaaaaaaaaa

SEQ ID NO: 16501 - RNA, 9485 nt, synthetic construct
  source 1..9485: mol_type = other RNA
aggaaataagagagaaaagaagagtaagaagaaatataagagccaccatggcccctaagaagaagcgtaaagtgagccggatggaacgcctcgtctacgaggtgcggcagaagtgcagaaacatcgaggacatctgcatctcctgcggatctctgaacgtgaccctggagcacccactgttcatcggcggcatgtgccagaactgtaaaaactgttttctggagtgtgcctatcaatacgacgatgacggctaccagagctactgcaccatctgttgcggcggaagagaggtgctgatgtgtggaaataacaactgctgccggtgcttctgcgtggaatgcgtggacctgctggtgggccccggcgccgcccaggccgctattaaggaagatccttggaactgctacatgtgcggccacaagggcacatacggcctgctgagacggagagaggactggcctagcagactgcagatgttcttcgccaataaccacgaccaggagttcgacccccctaaggtgtaccctcccgtccccgccgagaagagaaagcccatccgggtcctgagcctgttcgatggcatcgccaccggtctgctggtgctgaaggacctgggcatccaggtggataggtacattgcctccgaggtgtgcgaggactccatcaccgtgggaatggtgcgtcatcagggcaagatcatgtacgtgggcgacgtgcggagcgtgacacagaagcatatccaggagtggggccctttcgacctggtgatcggcggcagcccttgcaatgacctgagcatcgtgaacccagcccggaagggcctgtacgagggaaccggcagactgttcttcgagttttacagactgctgcacgacgcccggcctaaggaaggcgacgaccggcccttcttttggctgttcgagaatgtggtggccatgggagtcagcgacaagcgggatattagccggttcctggagagcaaccccgtgatgatcgatgccaaggaagtgagcgccgcccaccgggccagatacttctggggcaatctgcctggcatgaacagacccctggccagcaccgtgaacgacaagctggagctgcaggagtgcctggagcacggccggatcgccaagttcagcaaggtgagaaccatcaccacccgaagcaacagcatcaaacaaggcaaggaccagcactttcctgtgttcatgaacgagaaggaggacatcctgtggtgtaccgagatggagagagtgttcgggttcccagtccactacacagatgtcagcaacatgtctagactggccagacagagactgctgggaagaagctggtccgtccctgtgatcagacacctgttcgcccctctgaaggagtacttcgcctgcgtgagcagcggcaacagcaacgccaacagccggggccccagcttctctagcggcctggtgccactgtccctgagagggagccacatgggccccatggagatctacaaaaccgtgagcgcctggaagcggcagcctgtgcgcgtgctgagcctgtttcggaatatcgataaagtcctgaaaagcctgggattcctggagagcggctctggctccggcggtggcaccctgaagtacgtggaggatgtgacaaacgtggtcagacgggatgtggagaagtggggccccttcgatctggtgtacggcagcacccaacccctgggcagctcttgtgaccggtgccctggctggtacatgtttcagttccaccggatcctgcagtacgccctgccgagacaggagtcccagcggccattcttttggattttcatggacaacttgctgctgaccgaggatgaccaggaaactaccactcggttcctgcagaccgaagccgtgaccctgcaggacgtgagaggccgggactaccagaacgccatgcgggtgtggtccaacatccctggactgaaaagcaagcacgcacctctgacccctaaagaagaggagtacctgcaggcccaggtgcggagcagaagcaagctggacgcccctaaggtggatctgctggtgaagaattgcctcctgcccctgagagagtacttcaagtatttcagccagaatagtctgcccctgggaggcagcggcggcggcgccctggtgacatttgaggacgtcgccgtgcggttcacccaggaggaatgggctctgctggatccttctcagaaaatcctgtaccgggacgtgatgagagagacataccggaatctgacctccgtgggcatcaactgggaatgttgggaccttgaagcctgcttcagaagcctgggaagaaacctgagagtgcaggtggtgaagagaaagtgcgagctgaccaacagcggcccctgcgccgagggcggcccaagcagcggcgcccctcctcccagcggcggcagcccagccggctccccaacctctaccgaggagggcacctctgagtccgccacccccgagagcggccctggcacctccaccgagcccagcgagggcagcgcacccggcagccctgccggcagccccacctccacagaggagggaaccagcaccgagcccagcgaaggcagcgccccaggcaccagcaccgagcctagtgagcaggagattaaacggatcaacaagatcagaagaagacttgtgaaagacagcaacaccaagaaggccggcaagacaggccccatgaaaaccctgctggttagagtgatgacacccgatctgagagagcggctggaaaacctgagaaagaagcctgaaaatatcccccagcccatcagcaatacatctagagccaacctgaataagctgctgaccgattacaccgaaatgaagaaggcgatcctgcatgtgtactgggaagagttccagaaggaccctgtgggcctgatgagccgggtggcccagcctgccagcaagaagatcgatcagaacaagctgaaacctgagatggacgagaagggcaacctgaccaccgccggctttgcctgctctcagtgtggccagcccctgttcgtgtacaagctggagcaggtgtctgagaagggcaaggcttacaccaactacttcggacggtgcaatgtggccgagcacgaaaagctgatcctgctggcccagctgaagcccgagaaggatagcgacgaagccgtgacatatagcctgggaaagtttgggcagagggccctggatttctacagcattcatgtgaccaaggagtccacccaccccgtgaagcccctggcccagatcgccggaaacagatacgcctccggacctgtgggaaaggccctgagcgacgcatgtatgggcacaatcgcctccttcctgtctaagtaccaggacatcatcatcgaacaccagaaggtggtgaagggcaaccagaagagactggagagcctgcgggagctggccggcaaggaaaacctggaataccctagcgtgaccctgccacctcagcctcacaccaaggagggcgttgatgcctacaacgaagtgatcgcccgggtgcgaatgtgggtgaacctgaacctgtggcagaagctgaagctaagcagagatgatgccaagcctctgctgagactgaagggattcccttcctttcctctggtcgagagacaggccaacgaagtggactggtgggacatggtgtgtaacgtgaagaagctgatcaacgagaaaaaggaggatggcaaggtgttttggcagaatctggctggctacaagagacaggaagccctgagaccatacctgagcagcgaggaagatcggaagaagggaaagaaattcgctcggtaccagctgggcgacctgctgctgcacctggaaaagaagcacggcgaggactggggaaaggtgtacgacgaggcctgggagcggattgacaagaaagtggaaggcctgagcaagcacatcaagctggaagaggaacggagaagcgaggacgcccagagcaaggccgccctgaccgactggctgcgggctaaggccagcttcgtgatcgagggcctgaaggaggccgacaaggacgagttctgcagatgcgagctgaagctgcagaagtggtacggggacctgcggggaaagcccttcgccatcgaagccgagaacagcatcctggacatcagcggcttcagcaagcagtacaactgtgccttcatctggcagaaggacggcgtgaagaagctgaacctgtacctgatcatcaactacttcaagggcggcaagctgcggttcaagaagatcaaacctgaagccttcgaagccaacagattctacaccgtgatcaacaaaaagagcggcgagatcgtgcccatggaggtgaacttcaacttcgacgaccccaacctgatcatcctgcctctggcctttggcaagagacagggcagagaattcatctggaacgacctgctgtccctggaaaccggcagcctgaagctggccaacggaagagtgatcgagaagacactgtacaacagaagaacccggcaggatgagcctgccctgttcgtggccctgaccttcgagcggcgggaggtcctggactcctccaatatcaaaccaatgaacctgatcggcgtggcaagaggcgaaaacatccccgccgtgatcgccctgaccgaccccgagggctgcccactgagccggtttaaggatagcctgggaaacccaacccacatcctgagaatcggcgagagctataaggagaagcagcggaccatccaggccaagaaggaggtggagcagcggagagccggcggctacagccggaagtacgccagcaaagccaagaatctggcagacgatatggtgagaaacaccgctagagatctgctgtactacgccgtgacccaggatgccatgctgatcttcgccaacctgagccggggcttcggccggcagggcaagcggaccttcatggccgagagacagtacacacggatggaggactggctgaccgccaagctggcctacgagggcctgagcaagacctacctgtccaagacactggcccagtacacctccaagacatgcagcaactgtgggtttaccatcaccagcgccgactacgacagggtgctggagaagctgaagaagacagcaacaggctggatgaccacaattaacggcaaggagctgaaggtggagggccagattacctactacaacagatacaagagacagaacgtagtcaaggacctgtccgtcgagctggatagactgagcgaagaatctgtgaacaacgacatctcctcctggacaaagggcagaagcggagaagctctgagcctcctgaagaaaagattctcccatagacccgtgcaggagaagttcgtgtgcctgaactgcggcttcgagacacacgcagccgagcaagccgccctgaacatcgccagatcctggctgttcctgcggagccaggagtacaagaaataccagacaaacaagacaaccggcaacaccgataagagagccttcgtcgagacctggcagtccttttaccggaagaagcttaaggaggtgtggaaacctgccgtgcggtctggcggatctggcggaggctccgtgcaggagagcgtgaccttcagggacctggccgtggacttcgacatggaggagtggggctacctgtgccccagccagaaggagctgtacagggaggtgatgctggagaactacaggcacctggtgagcctgggcctgctggaggccaagcccgacctgatcagcaggctggagcaggaggagccccaggtgtgggaggtgcaggagggcgccagcggcagcgtgtgcgcctgcaccggcggcggcggcccaagcagcggcgcccctcctcccagcggcggcagcccagccggctccccaacctctaccgaggagggcacctctgagtccgccacccccgagagcggccctggcacctccaccgagcccagcgagggcagcgcacccggcagccctgccggcagccccacctccacagaggagggaaccagcaccgagcccagcgaaggcagcgccccaggcaccagcaccgagcctagtgagcaggagattaaacggatcaacaagatcagaagaagacttgtgaaagacagcaacaccaagaaggccggcaagacaggccccatgaaaaccctgctggttagagtgatgacacccgatctgagagagcggctggaaaacctgagaaagaagcctgaaaatatcccccagcccatcagcaatacatctagagccaacctgaataagctgctgaccgattacaccgaaatgaagaaggcgatcctgcatgtgtactgggaagagttccagaaggaccctgtgggcctgatgagccgggtggcccagcctgccagcaagaagatcgatcagaacaagctgaaacctgagatggacgagaagggcaacctgaccaccgccggctttgcctgctctcagtgtggccagcccctgttcgtgtacaagctggagcaggtgtctgagaagggcaaggcttacaccaactacttcggacggtgcaatgtggccgagcacgaaaagctgatcctgctggcccagctgaagcccgagaaggatagcgacgaagccgtgacatatagcctgggaaagtttgggcagagggccctggatttctacagcattcatgtgaccaaggagtccacccaccccgtgaagcccctggcccagatcgccggaaacagatacgcctccggacctgtgggaaaggccctgagcgacgcatgtatgggcacaatcgcctccttcctgtctaagtaccaggacatcatcatcgaacaccagaaggtggtgaagggcaaccagaagagactggagagcctgcgggagctggccggcaaggaaaacctggaataccctagcgtgaccctgccacctcagcctcacaccaaggagggcgttgatgcctacaacgaagtgatcgcccgggtgcgaatgtgggtgaacctgaacctgtggcagaagctgaagctaagcagagatgatgccaagcctctgctgagactgaagggattcccttcctttcctctggtcgagagacaggccaacgaagtggactggtgggacatggtgtgtaacgtgaagaagctgatcaacgagaaaaaggaggatggcaaggtgttttggcagaatctggctggctacaagagacaggaagccctgagaccatacctgagcagcgaggaagatcggaagaagggaaagaaattcgctcggtaccagctgggcgacctgctgctgcacctggaaaagaagcacggcgaggactggggaaaggtgtacgacgaggcctgggagcggattgacaagaaagtggaaggcctgagcaagcacatcaagctggaagaggaacggagaagcgaggacgcccagagcaaggccgccctgaccgactggctgcgggctaaggccagcttcgtgatcgagggcctgaaggaggccgacaaggacgagttctgcagatgcgagctgaagctgcagaagtggtacggggacctgcggggaaagcccttcgccatcgaagccgagaacagcatcctggacatcagcggcttcagcaagcagtacaactgtgccttcatctggcagaaggacggcgtgaagaagctgaacctgtacctgatcatcaactacttcaagggcggcaagctgcggttcaagaagatcaaacctgaagccttcgaagccaacagattctacaccgtgatcaacaaaaagagcggcgagatcgtgcccatggaggtgaacttcaacttcgacgaccccaacctgatcatcctgcctctggcctttggcaagagacagggcagagaattcatctggaacgacctgctgtccctggaaaccggcagcctgaagctggccaacggaagagtgatcgagaagacactgtacaacagaagaacccggcaggatgagcctgccctgttcgtggccctgaccttcgagcggcgggaggtcctggactcctccaatatcaaaccaatgaacctgatcggcgtggcaagaggcgaaaacatccccgccgtgatcgccctgaccgaccccgagggctgcccactgagccggtttaaggatagcctgggaaacccaacccacatcctgagaatcggcgagagctataaggagaagcagcggaccatccaggccaagaaggaggtggagcagcggagagccggcggctacagccggaagtacgccagcaaagccaagaatctggcagacgatatggtgagaaacaccgctagagatctgctgtactacgccgtgacccaggatgccatgctgatcttcgccaacctgagccggggcttcggccggcagggcaagcggaccttcatggccgagagacagtacacacggatggaggactggctgaccgccaagctggcctacgagggcctgagcaagacctacctgtccaagacactggcccagtacacctccaagacatgcagcaactgtgggtttaccatcaccagcgccgactacgacagggtgctggagaagctgaagaagacagcaacaggctggatgaccacaattaacggcaaggagctgaaggtggagggccagattacctactacaacagatacaagagacagaacgtagtcaaggacctgtccgtcgagctggatagactgagcgaagaatctgtgaacaacgacatctcctcctggacaaagggcagaagcggagaagctctgagcctcctgaagaaaagattctcccatagacccgtgcaggagaagttcgtgtgcctgaactgcggcttcgagacacacgcagccgagcaagccgccctgaacatcgccagatcctggctgttcctgcggagccaggagtacaagaaataccagacaaacaagacaaccggcaacaccgataagagagccttcgtcgagacctggcagtccttttaccggaagaagcttaaggaggtgtggaaacctgccgtgcggtctggcggatctggcggaggctcctgtgcaggagagcgtgaccttcagggacctggccgtggacttcgacatggaggagtggggctacctgtgccccagccagaaggagctgtacagggaggtgatgctggagaactacaggcacctggtgagcctgggcctgctggaggccaagcccgacctgatcagcaggctggagcaggaggagccccaggtgtgggaggtgcaggagggcgccagcggcagcgtgtgcgcctgcaccggcggcggatctggctccggcagcggccccaagaaaaagagaaaagtctaagctgccttctgcggggcttgccttctggccatgcccttcttctctcccttgcacctgtacctcttggtctttgaataaagcctgagtaggaaggctagcaaaaaaaaaaaaaaaaaaaaaaaaaaaaaaaaaaaaaaaaaaaaaaaaaaaaaaaaaaaaaaaaaaaaaaaaaaaaaaaa

SEQ ID NO: 16502 - RNA, 9485 nt, synthetic construct
  source 1..9485: mol_type = other RNA
aggaaataagagagaaaagaagagtaagaagaaatataagagccaccatggcccctaagaagaagcgtaaagtgagccggatggaacgcctcgtctacgaggtgcggcagaagtgcagaaacatcgaggacatctgcatctcctgcggatctctgaacgtgaccctggagcacccactgttcatcggcggcatgtgccagaactgtaaaaactgttttctggagtgtgcctatcaatacgacgatgacggctaccagagctactgcaccatctgttgcggcggaagagaggtgctgatgtgtggaaataacaactgctgccggtgcttctgcgtggaatgcgtggacctgctggtgggccccggcgccgcccaggccgctattaaggaagatccttggaactgctacatgtgcggccacaagggcacatacggcctgctgagacggagagaggactggcctagcagactgcagatgttcttcgccaataaccacgaccaggagttcgacccccctaaggtgtaccctcccgtccccgccgagaagagaaagcccatccgggtcctgagcctgttcgatggcatcgccaccggtctgctggtgctgaaggacctgggcatccaggtggataggtacattgcctccgaggtgtgcgaggactccatcaccgtgggaatggtgcgtcatcagggcaagatcatgtacgtgggcgacgtgcggagcgtgacacagaagcatatccaggagtggggccctttcgacctggtgatcggcggcagcccttgcaatgacctgagcatcgtgaacccagcccggaagggcctgtacgagggaaccggcagactgttcttcgagttttacagactgctgcacgacgcccggcctaaggaaggcgacgaccggcccttcttttggctgttcgagaatgtggtggccatgggagtcagcgacaagcgggatattagccggttcctggagagcaaccccgtgatgatcgatgccaaggaagtgagcgccgcccaccgggccagatacttctggggcaatctgcctggcatgaacagacccctggccagcaccgtgaacgacaagctggagctgcaggagtgcctggagcacggccggatcgccaagttcagcaaggtgagaaccatcaccacccgaagcaacagcatcaaacaaggcaaggaccagcactttcctgtgttcatgaacgagaaggaggacatcctgtggtgtaccgagatggagagagtgttcgggttcccagtccactacacagatgtcagcaacatgtctagactggccagacagagactgctgggaagaagctggtccgtccctgtgatcagacacctgttcgcccctctgaaggagtacttcgcctgcgtgagcagcggcaacagcaacgccaacagccggggccccagcttctctagcggcctggtgccactgtccctgagagggagccacatgggccccatggagatctacaaaaccgtgagcgcctggaagcggcagcctgtgcgcgtgctgagcctgtttcggaatatcgataaagtcctgaaaagcctgggattcctggagagcggctctggctccggcggtggcaccctgaagtacgtggaggatgtgacaaacgtggtcagacgggatgtggagaagtggggccccttcgatctggtgtacggcagcacccaacccctgggcagctcttgtgaccggtgccctggctggtacatgtttcagttccaccggatcctgcagtacgccctgccgagacaggagtcccagcggccattcttttggattttcatggacaacttgctgctgaccgaggatgaccaggaaactaccactcggttcctgcagaccgaagccgtgaccctgcaggacgtgagaggccgggactaccagaacgccatgcgggtgtggtccaacatccctggactgaaaagcaagcacgcacctctgacccctaaagaagaggagtacctgcaggcccaggtgcggagcagaagcaagctggacgcccctaaggtggatctgctggtgaagaattgcctcctgcccctgagagagtacttcaagtatttcagccagaatagtctgcccctgggaggcagcggcggcggcgccctggtgacatttgaggacgtcgccgtgcggttcacccaggaggaatgggctctgctggatccttctcagaaaatcctgtaccgggacgtgatgagagagacataccggaatctgacctccgtgggcatcaactgggaatgttgggaccttgaagcctgcttcagaagcctgggaagaaacctgagagtgcaggtggtgaagagaaagtgcgagctgaccaacagcggcccctgcgccgagggcggcccaagcagcggcgcccctcctcccagcggcggcagcccagccggctccccaacctctaccgaggagggcacctctgagtccgccacccccgagagcggccctggcacctccaccgagcccagcgagggcagcgcacccggcagccctgccggcagccccacctccacagaggagggaaccagcaccgagcccagcgaaggcagcgccccaggcaccagcaccgagcctagtgagcaggagattaaacggatcaacaagatcagaagaagacttgtgaaagacagcaacaccaagaaggccggcaagacaggccccatgaaaaccctgctggttagagtgatgacacccgatctgagagagcggctggaaaacctgagaaagaagcctgaaaatatcccccagcccatcagcaatacatctagagccaacctgaataagctgctgaccgattacaccgaaatgaagaaggcgatcctgcatgtgtactgggaagagttccagaaggaccctgtgggcctgatgagccgggtggcccagcctgccagcaagaagatcgatcagaacaagctgaaacctgagatggacgagaagggcaacctgaccaccgccggctttgcctgctctcagtgtggccagcccctgttcgtgtacaagctggagcaggtgtctgagaagggcaaggcttacaccaactacttcggacggtgcaatgtggccgagcacgaaaagctgatcctgctggcccagctgaagcccgagaaggatagcgacgaagccgtgacatatagcctgggaaagtttgggcagagggccctggatttctacagcattcatgtgaccaaggagtccacccaccccgtgaagcccctggcccagatcgccggaaacagatacgcctccggacctgtgggaaaggccctgagcgacgcatgtatgggcacaatcgcctccttcctgtctaagtaccaggacatcatcatcgaacaccagaaggtggtgaagggcaaccagaagagactggagagcctgcgggagctggccggcaaggaaaacctggaataccctagcgtgaccctgccacctcagcctcacaccaaggagggcgttgatgcctacaacgaagtgatcgcccgggtgcgaatgtgggtgaacctgaacctgtggcagaagctgaagctaagcagagatgatgccaagcctctgctgagactgaagggattcccttcctttcctctggtcgagagacaggccaacgaagtggactggtgggacatggtgtgtaacgtgaagaagctgatcaacgagaaaaaggaggatggcaaggtgttttggcagaatctggctggctacaagagacaggaagccctgagaccatacctgagcagcgaggaagatcggaagaagggaaagaaattcgctcggtaccagctgggcgacctgctgctgcacctggaaaagaagcacggcgaggactggggaaaggtgtacgacgaggcctgggagcggattgacaagaaagtggaaggcctgagcaagcacatcaagctggaagaggaacggagaagcgaggacgcccagagcaaggccgccctgaccgactggctgcgggctaaggccagcttcgtgatcgagggcctgaaggaggccgacaaggacgagttctgcagatgcgagctgaagctgcagaagtggtacggggacctgcggggaaagcccttcgccatcgaagccgagaacagcatcctggacatcagcggcttcagcaagcagtacaactgtgccttcatctggcagaaggacggcgtgaagaagctgaacctgtacctgatcatcaactacttcaagggcggcaagctgcggttcaagaagatcaaacctgaagccttcgaagccaacagattctacaccgtgatcaacaaaaagagcggcgagatcgtgcccatggaggtgaacttcaacttcgacgaccccaacctgatcatcctgcctctggcctttggcaagagacagggcagagaattcatctggaacgacctgctgtccctggaaaccggcagcctgaagctggccaacggaagagtgatcgagaagacactgtacaacagaagaacccggcaggatgagcctgccctgttcgtggccctgaccttcgagcggcgggaggtcctggactcctccaatatcaaaccaatgaacctgatcggcgtggcaagaggcgaaaacatccccgccgtgatcgccctgaccgaccccgagggctgcccactgagccggtttaaggatagcctgggaaacccaacccacatcctgagaatcggcgagagctataaggagaagcagcggaccatccaggccaagaaggaggtggagcagcggagagccggcggctacagccggaagtacgccagcaaagccaagaatctggcagacgatatggtgagaaacaccgctagagatctgctgtactacgccgtgacccaggatgccatgctgatcttcgccaacctgagccggggcttcggccggcagggcaagcggaccttcatggccgagagacagtacacacggatggaggactggctgaccgccaagctggcctacgagggcctgagcaagacctacctgtccaagacactggcccagtacacctccaagacatgcagcaactgtgggtttaccatcaccagcgccgactacgacagggtgctggagaagctgaagaagacagcaacaggctggatgaccacaattaacggcaaggagctgaaggtggagggccagattacctactacaacagatacaagagacagaacgtagtcaaggacctgtccgtcgagctggatagactgagcgaagaatctgtgaacaacgacatctcctcctggacaaagggcagaagcggagaagctctgagcctcctgaagaaaagattctcccatagacccgtgcaggagaagttcgtgtgcctgaactgcggcttcgagacacacgcagccgagcaagccgccctgaacatcgccagatcctggctgttcctgcggagccaggagtacaagaaataccagacaaacaagacaaccggcaacaccgataagagagccttcgtcgagacctggcagtccttttaccggaagaagcttaaggaggtgtggaaacctgccgtgcggtctggcggatctggcggaggctccagccaggagctgctgaccttcaaggacgtgagcgtggacttcacccaggaggagtggggccagctgagcctggcccacaggaacctgtacagggaggtgatgctggagaactacggcaacctggtgagcgtggccggctaccagctgagcaagcccagcgtgatcagccagctggagaagggccaggagccctggatgaccgagaagaagggccccggcgaccccagccccgacctgaagaacggcggcccaagcagcggcgcccctcctcccagcggcggcagcccagccggctccccaacctctaccgaggagggcacctctgagtccgccacccccgagagcggccctggcacctccaccgagcccagcgagggcagcgcacccggcagccctgccggcagccccacctccacagaggagggaaccagcaccgagcccagcgaaggcagcgccccaggcaccagcaccgagcctagtgagcaggagattaaacggatcaacaagatcagaagaagacttgtgaaagacagcaacaccaagaaggccggcaagacaggccccatgaaaaccctgctggttagagtgatgacacccgatctgagagagcggctggaaaacctgagaaagaagcctgaaaatatcccccagcccatcagcaatacatctagagccaacctgaataagctgctgaccgattacaccgaaatgaagaaggcgatcctgcatgtgtactgggaagagttccagaaggaccctgtgggcctgatgagccgggtggcccagcctgccagcaagaagatcgatcagaacaagctgaaacctgagatggacgagaagggcaacctgaccaccgccggctttgcctgctctcagtgtggccagcccctgttcgtgtacaagctggagcaggtgtctgagaagggcaaggcttacaccaactacttcggacggtgcaatgtggccgagcacgaaaagctgatcctgctggcccagctgaagcccgagaaggatagcgacgaagccgtgacatatagcctgggaaagtttgggcagagggccctggatttctacagcattcatgtgaccaaggagtccacccaccccgtgaagcccctggcccagatcgccggaaacagatacgcctccggacctgtgggaaaggccctgagcgacgcatgtatgggcacaatcgcctccttcctgtctaagtaccaggacatcatcatcgaacaccagaaggtggtgaagggcaaccagaagagactggagagcctgcgggagctggccggcaaggaaaacctggaataccctagcgtgaccctgccacctcagcctcacaccaaggagggcgttgatgcctacaacgaagtgatcgcccgggtgcgaatgtgggtgaacctgaacctgtggcagaagctgaagctaagcagagatgatgccaagcctctgctgagactgaagggattcccttcctttcctctggtcgagagacaggccaacgaagtggactggtgggacatggtgtgtaacgtgaagaagctgatcaacgagaaaaaggaggatggcaaggtgttttggcagaatctggctggctacaagagacaggaagccctgagaccatacctgagcagcgaggaagatcggaagaagggaaagaaattcgctcggtaccagctgggcgacctgctgctgcacctggaaaagaagcacggcgaggactggggaaaggtgtacgacgaggcctgggagcggattgacaagaaagtggaaggcctgagcaagcacatcaagctggaagaggaacggagaagcgaggacgcccagagcaaggccgccctgaccgactggctgcgggctaaggccagcttcgtgatcgagggcctgaaggaggccgacaaggacgagttctgcagatgcgagctgaagctgcagaagtggtacggggacctgcggggaaagcccttcgccatcgaagccgagaacagcatcctggacatcagcggcttcagcaagcagtacaactgtgccttcatctggcagaaggacggcgtgaagaagctgaacctgtacctgatcatcaactacttcaagggcggcaagctgcggttcaagaagatcaaacctgaagccttcgaagccaacagattctacaccgtgatcaacaaaaagagcggcgagatcgtgcccatggaggtgaacttcaacttcgacgaccccaacctgatcatcctgcctctggcctttggcaagagacagggcagagaattcatctggaacgacctgctgtccctggaaaccggcagcctgaagctggccaacggaagagtgatcgagaagacactgtacaacagaagaacccggcaggatgagcctgccctgttcgtggccctgaccttcgagcggcgggaggtcctggactcctccaatatcaaaccaatgaacctgatcggcgtggcaagaggcgaaaacatccccgccgtgatcgccctgaccgaccccgagggctgcccactgagccggtttaaggatagcctgggaaacccaacccacatcctgagaatcggcgagagctataaggagaagcagcggaccatccaggccaagaaggaggtggagcagcggagagccggcggctacagccggaagtacgccagcaaagccaagaatctggcagacgatatggtgagaaacaccgctagagatctgctgtactacgccgtgacccaggatgccatgctgatcttcgccaacctgagccggggcttcggccggcagggcaagcggaccttcatggccgagagacagtacacacggatggaggactggctgaccgccaagctggcctacgagggcctgagcaagacctacctgtccaagacactggcccagtacacctccaagacatgcagcaactgtgggtttaccatcaccagcgccgactacgacagggtgctggagaagctgaagaagacagcaacaggctggatgaccacaattaacggcaaggagctgaaggtggagggccagattacctactacaacagatacaagagacagaacgtagtcaaggacctgtccgtcgagctggatagactgagcgaagaatctgtgaacaacgacatctcctcctggacaaagggcagaagcggagaagctctgagcctcctgaagaaaagattctcccatagacccgtgcaggagaagttcgtgtgcctgaactgcggcttcgagacacacgcagccgagcaagccgccctgaacatcgccagatcctggctgttcctgcggagccaggagtacaagaaataccagacaaacaagacaaccggcaacaccgataagagagccttcgtcgagacctggcagtccttttaccggaagaagcttaaggaggtgtggaaacctgccgtgcggtctggcggatctggcggaggctcctagccaggagctgctgaccttcaaggacgtgagcgtggacttcacccaggaggagtggggccagctgagcctggcccacaggaacctgtacagggaggtgatgctggagaactacggcaacctggtgagcgtggccggctaccagctgagcaagcccagcgtgatcagccagctggagaagggccaggagccctggatgaccgagaagaagggccccggcgaccccagccccgacctgaagaacggatctggctccggcagcggccccaagaaaaagagaaaagtctaagctgccttctgcggggcttgccttctggccatgcccttcttctctcccttgcacctgtacctcttggtctttgaataaagcctgagtaggaaggctagcaaaaaaaaaaaaaaaaaaaaaaaaaaaaaaaaaaaaaaaaaaaaaaaaaaaaaaaaaaaaaaaaaaaaaaaaaaaaaaaa

SEQ ID NO: 16503 - RNA, 9485 nt, synthetic construct
  source 1..9485: mol_type = other RNA
aggaaataagagagaaaagaagagtaagaagaaatataagagccaccatggcccctaagaagaagcgtaaagtgagccggatggaacgcctcgtctacgaggtgcggcagaagtgcagaaacatcgaggacatctgcatctcctgcggatctctgaacgtgaccctggagcacccactgttcatcggcggcatgtgccagaactgtaaaaactgttttctggagtgtgcctatcaatacgacgatgacggctaccagagctactgcaccatctgttgcggcggaagagaggtgctgatgtgtggaaataacaactgctgccggtgcttctgcgtggaatgcgtggacctgctggtgggccccggcgccgcccaggccgctattaaggaagatccttggaactgctacatgtgcggccacaagggcacatacggcctgctgagacggagagaggactggcctagcagactgcagatgttcttcgccaataaccacgaccaggagttcgacccccctaaggtgtaccctcccgtccccgccgagaagagaaagcccatccgggtcctgagcctgttcgatggcatcgccaccggtctgctggtgctgaaggacctgggcatccaggtggataggtacattgcctccgaggtgtgcgaggactccatcaccgtgggaatggtgcgtcatcagggcaagatcatgtacgtgggcgacgtgcggagcgtgacacagaagcatatccaggagtggggccctttcgacctggtgatcggcggcagcccttgcaatgacctgagcatcgtgaacccagcccggaagggcctgtacgagggaaccggcagactgttcttcgagttttacagactgctgcacgacgcccggcctaaggaaggcgacgaccggcccttcttttggctgttcgagaatgtggtggccatgggagtcagcgacaagcgggatattagccggttcctggagagcaaccccgtgatgatcgatgccaaggaagtgagcgccgcccaccgggccagatacttctggggcaatctgcctggcatgaacagacccctggccagcaccgtgaacgacaagctggagctgcaggagtgcctggagcacggccggatcgccaagttcagcaaggtgagaaccatcaccacccgaagcaacagcatcaaacaaggcaaggaccagcactttcctgtgttcatgaacgagaaggaggacatcctgtggtgtaccgagatggagagagtgttcgggttcccagtccactacacagatgtcagcaacatgtctagactggccagacagagactgctgggaagaagctggtccgtccctgtgatcagacacctgttcgcccctctgaaggagtacttcgcctgcgtgagcagcggcaacagcaacgccaacagccggggccccagcttctctagcggcctggtgccactgtccctgagagggagccacatgggccccatggagatctacaaaaccgtgagcgcctggaagcggcagcctgtgcgcgtgctgagcctgtttcggaatatcgataaagtcctgaaaagcctgggattcctggagagcggctctggctccggcggtggcaccctgaagtacgtggaggatgtgacaaacgtggtcagacgggatgtggagaagtggggccccttcgatctggtgtacggcagcacccaacccctgggcagctcttgtgaccggtgccctggctggtacatgtttcagttccaccggatcctgcagtacgccctgccgagacaggagtcccagcggccattcttttggattttcatggacaacttgctgctgaccgaggatgaccaggaaactaccactcggttcctgcagaccgaagccgtgaccctgcaggacgtgagaggccgggactaccagaacgccatgcgggtgtggtccaacatccctggactgaaaagcaagcacgcacctctgacccctaaagaagaggagtacctgcaggcccaggtgcggagcagaagcaagctggacgcccctaaggtggatctgctggtgaagaattgcctcctgcccctgagagagtacttcaagtatttcagccagaatagtctgcccctgggaggcagcggcggcggcgccctggtgacatttgaggacgtcgccgtgcggttcacccaggaggaatgggctctgctggatccttctcagaaaatcctgtaccgggacgtgatgagagagacataccggaatctgacctccgtgggcatcaactgggaatgttgggaccttgaagcctgcttcagaagcctgggaagaaacctgagagtgcaggtggtgaagagaaagtgcgagctgaccaacagcggcccctgcgccgagggcggcccaagcagcggcgcccctcctcccagcggcggcagcccagccggctccccaacctctaccgaggagggcacctctgagtccgccacccccgagagcggccctggcacctccaccgagcccagcgagggcagcgcacccggcagccctgccggcagccccacctccacagaggagggaaccagcaccgagcccagcgaaggcagcgccccaggcaccagcaccgagcctagtgagcaggagattaaacggatcaacaagatcagaagaagacttgtgaaagacagcaacaccaagaaggccggcaagacaggccccatgaaaaccctgctggttagagtgatgacacccgatctgagagagcggctggaaaacctgagaaagaagcctgaaaatatcccccagcccatcagcaatacatctagagccaacctgaataagctgctgaccgattacaccgaaatgaagaaggcgatcctgcatgtgtactgggaagagttccagaaggaccctgtgggcctgatgagccgggtggcccagcctgccagcaagaagatcgatcagaacaagctgaaacctgagatggacgagaagggcaacctgaccaccgccggctttgcctgctctcagtgtggccagcccctgttcgtgtacaagctggagcaggtgtctgagaagggcaaggcttacaccaactacttcggacggtgcaatgtggccgagcacgaaaagctgatcctgctggcccagctgaagcccgagaaggatagcgacgaagccgtgacatatagcctgggaaagtttgggcagagggccctggatttctacagcattcatgtgaccaaggagtccacccaccccgtgaagcccctggcccagatcgccggaaacagatacgcctccggacctgtgggaaaggccctgagcgacgcatgtatgggcacaatcgcctccttcctgtctaagtaccaggacatcatcatcgaacaccagaaggtggtgaagggcaaccagaagagactggagagcctgcgggagctggccggcaaggaaaacctggaataccctagcgtgaccctgccacctcagcctcacaccaaggagggcgttgatgcctacaacgaagtgatcgcccgggtgcgaatgtgggtgaacctgaacctgtggcagaagctgaagctaagcagagatgatgccaagcctctgctgagactgaagggattcccttcctttcctctggtcgagagacaggccaacgaagtggactggtgggacatggtgtgtaacgtgaagaagctgatcaacgagaaaaaggaggatggcaaggtgttttggcagaatctggctggctacaagagacaggaagccctgagaccatacctgagcagcgaggaagatcggaagaagggaaagaaattcgctcggtaccagctgggcgacctgctgctgcacctggaaaagaagcacggcgaggactggggaaaggtgtacgacgaggcctgggagcggattgacaagaaagtggaaggcctgagcaagcacatcaagctggaagaggaacggagaagcgaggacgcccagagcaaggccgccctgaccgactggctgcgggctaaggccagcttcgtgatcgagggcctgaaggaggccgacaaggacgagttctgcagatgcgagctgaagctgcagaagtggtacggggacctgcggggaaagcccttcgccatcgaagccgagaacagcatcctggacatcagcggcttcagcaagcagtacaactgtgccttcatctggcagaaggacggcgtgaagaagctgaacctgtacctgatcatcaactacttcaagggcggcaagctgcggttcaagaagatcaaacctgaagccttcgaagccaacagattctacaccgtgatcaacaaaaagagcggcgagatcgtgcccatggaggtgaacttcaacttcgacgaccccaacctgatcatcctgcctctggcctttggcaagagacagggcagagaattcatctggaacgacctgctgtccctggaaaccggcagcctgaagctggccaacggaagagtgatcgagaagacactgtacaacagaagaacccggcaggatgagcctgccctgttcgtggccctgaccttcgagcggcgggaggtcctggactcctccaatatcaaaccaatgaacctgatcggcgtggcaagaggcgaaaacatccccgccgtgatcgccctgaccgaccccgagggctgcccactgagccggtttaaggatagcctgggaaacccaacccacatcctgagaatcggcgagagctataaggagaagcagcggaccatccaggccaagaaggaggtggagcagcggagagccggcggctacagccggaagtacgccagcaaagccaagaatctggcagacgatatggtgagaaacaccgctagagatctgctgtactacgccgtgacccaggatgccatgctgatcttcgccaacctgagccggggcttcggccggcagggcaagcggaccttcatggccgagagacagtacacacggatggaggactggctgaccgccaagctggcctacgagggcctgagcaagacctacctgtccaagacactggcccagtacacctccaagacatgcagcaactgtgggtttaccatcaccagcgccgactacgacagggtgctggagaagctgaagaagacagcaacaggctggatgaccacaattaacggcaaggagctgaaggtggagggccagattacctactacaacagatacaagagacagaacgtagtcaaggacctgtccgtcgagctggatagactgagcgaagaatctgtgaacaacgacatctcctcctggacaaagggcagaagcggagaagctctgagcctcctgaagaaaagattctcccatagacccgtgcaggagaagttcgtgtgcctgaactgcggcttcgagacacacgcagccgagcaagccgccctgaacatcgccagatcctggctgttcctgcggagccaggagtacaagaaataccagacaaacaagacaaccggcaacaccgataagagagccttcgtcgagacctggcagtccttttaccggaagaagcttaaggaggtgtggaaacctgccgtgcggtctggcggatctggcggaggctccgaggtgcaggagaccctgaccttcgacgacgtggccgtggccttcacctgggaggagtggcagctgctggcccccgcccagaaggccctgtacagggacgtgatgctggagaaccacagcaacctggtgagcgtgggcttccaggccagcacccccgaggtgctgagcaagctggaccagggcgagccctggaccatggacgacgaggtgcactgcaggaccaggagcgaggtgtggaagttcggcggcccaagcagcggcgcccctcctcccagcggcggcagcccagccggctccccaacctctaccgaggagggcacctctgagtccgccacccccgagagcggccctggcacctccaccgagcccagcgagggcagcgcacccggcagccctgccggcagccccacctccacagaggagggaaccagcaccgagcccagcgaaggcagcgccccaggcaccagcaccgagcctagtgagcaggagattaaacggatcaacaagatcagaagaagacttgtgaaagacagcaacaccaagaaggccggcaagacaggccccatgaaaaccctgctggttagagtgatgacacccgatctgagagagcggctggaaaacctgagaaagaagcctgaaaatatcccccagcccatcagcaatacatctagagccaacctgaataagctgctgaccgattacaccgaaatgaagaaggcgatcctgcatgtgtactgggaagagttccagaaggaccctgtgggcctgatgagccgggtggcccagcctgccagcaagaagatcgatcagaacaagctgaaacctgagatggacgagaagggcaacctgaccaccgccggctttgcctgctctcagtgtggccagcccctgttcgtgtacaagctggagcaggtgtctgagaagggcaaggcttacaccaactacttcggacggtgcaatgtggccgagcacgaaaagctgatcctgctggcccagctgaagcccgagaaggatagcgacgaagccgtgacatatagcctgggaaagtttgggcagagggccctggatttctacagcattcatgtgaccaaggagtccacccaccccgtgaagcccctggcccagatcgccggaaacagatacgcctccggacctgtgggaaaggccctgagcgacgcatgtatgggcacaatcgcctccttcctgtctaagtaccaggacatcatcatcgaacaccagaaggtggtgaagggcaaccagaagagactggagagcctgcgggagctggccggcaaggaaaacctggaataccctagcgtgaccctgccacctcagcctcacaccaaggagggcgttgatgcctacaacgaagtgatcgcccgggtgcgaatgtgggtgaacctgaacctgtggcagaagctgaagctaagcagagatgatgccaagcctctgctgagactgaagggattcccttcctttcctctggtcgagagacaggccaacgaagtggactggtgggacatggtgtgtaacgtgaagaagctgatcaacgagaaaaaggaggatggcaaggtgttttggcagaatctggctggctacaagagacaggaagccctgagaccatacctgagcagcgaggaagatcggaagaagggaaagaaattcgctcggtaccagctgggcgacctgctgctgcacctggaaaagaagcacggcgaggactggggaaaggtgtacgacgaggcctgggagcggattgacaagaaagtggaaggcctgagcaagcacatcaagctggaagaggaacggagaagcgaggacgcccagagcaaggccgccctgaccgactggctgcgggctaaggccagcttcgtgatcgagggcctgaaggaggccgacaaggacgagttctgcagatgcgagctgaagctgcagaagtggtacggggacctgcggggaaagcccttcgccatcgaagccgagaacagcatcctggacatcagcggcttcagcaagcagtacaactgtgccttcatctggcagaaggacggcgtgaagaagctgaacctgtacctgatcatcaactacttcaagggcggcaagctgcggttcaagaagatcaaacctgaagccttcgaagccaacagattctacaccgtgatcaacaaaaagagcggcgagatcgtgcccatggaggtgaacttcaacttcgacgaccccaacctgatcatcctgcctctggcctttggcaagagacagggcagagaattcatctggaacgacctgctgtccctggaaaccggcagcctgaagctggccaacggaagagtgatcgagaagacactgtacaacagaagaacccggcaggatgagcctgccctgttcgtggccctgaccttcgagcggcgggaggtcctggactcctccaatatcaaaccaatgaacctgatcggcgtggcaagaggcgaaaacatccccgccgtgatcgccctgaccgaccccgagggctgcccactgagccggtttaaggatagcctgggaaacccaacccacatcctgagaatcggcgagagctataaggagaagcagcggaccatccaggccaagaaggaggtggagcagcggagagccggcggctacagccggaagtacgccagcaaagccaagaatctggcagacgatatggtgagaaacaccgctagagatctgctgtactacgccgtgacccaggatgccatgctgatcttcgccaacctgagccggggcttcggccggcagggcaagcggaccttcatggccgagagacagtacacacggatggaggactggctgaccgccaagctggcctacgagggcctgagcaagacctacctgtccaagacactggcccagtacacctccaagacatgcagcaactgtgggtttaccatcaccagcgccgactacgacagggtgctggagaagctgaagaagacagcaacaggctggatgaccacaattaacggcaaggagctgaaggtggagggccagattacctactacaacagatacaagagacagaacgtagtcaaggacctgtccgtcgagctggatagactgagcgaagaatctgtgaacaacgacatctcctcctggacaaagggcagaagcggagaagctctgagcctcctgaagaaaagattctcccatagacccgtgcaggagaagttcgtgtgcctgaactgcggcttcgagacacacgcagccgagcaagccgccctgaacatcgccagatcctggctgttcctgcggagccaggagtacaagaaataccagacaaacaagacaaccggcaacaccgataagagagccttcgtcgagacctggcagtccttttaccggaagaagcttaaggaggtgtggaaacctgccgtgcggtctggcggatctggcggaggctcctgaggtgcaggagaccctgaccttcgacgacgtggccgtggccttcacctgggaggagtggcagctgctggcccccgcccagaaggccctgtacagggacgtgatgctggagaaccacagcaacctggtgagcgtgggcttccaggccagcacccccgaggtgctgagcaagctggaccagggcgagccctggaccatggacgacgaggtgcactgcaggaccaggagcgaggtgtggaagttcggatctggctccggcagcggccccaagaaaaagagaaaagtctaagctgccttctgcggggcttgccttctggccatgcccttcttctctcccttgcacctgtacctcttggtctttgaataaagcctgagtaggaaggctagcaaaaaaaaaaaaaaaaaaaaaaaaaaaaaaaaaaaaaaaaaaaaaaaaaaaaaaaaaaaaaaaaaaaaaaaaaaaaaaaa

SEQ ID NO: 16504 - RNA, 9485 nt, synthetic construct
  source 1..9485: mol_type = other RNA
aggaaataagagagaaaagaagagtaagaagaaatataagagccaccatggcccctaagaagaagcgtaaagtgagccggatggaacgcctcgtctacgaggtgcggcagaagtgcagaaacatcgaggacatctgcatctcctgcggatctctgaacgtgaccctggagcacccactgttcatcggcggcatgtgccagaactgtaaaaactgttttctggagtgtgcctatcaatacgacgatgacggctaccagagctactgcaccatctgttgcggcggaagagaggtgctgatgtgtggaaataacaactgctgccggtgcttctgcgtggaatgcgtggacctgctggtgggccccggcgccgcccaggccgctattaaggaagatccttggaactgctacatgtgcggccacaagggcacatacggcctgctgagacggagagaggactggcctagcagactgcagatgttcttcgccaataaccacgaccaggagttcgacccccctaaggtgtaccctcccgtccccgccgagaagagaaagcccatccgggtcctgagcctgttcgatggcatcgccaccggtctgctggtgctgaaggacctgggcatccaggtggataggtacattgcctccgaggtgtgcgaggactccatcaccgtgggaatggtgcgtcatcagggcaagatcatgtacgtgggcgacgtgcggagcgtgacacagaagcatatccaggagtggggccctttcgacctggtgatcggcggcagcccttgcaatgacctgagcatcgtgaacccagcccggaagggcctgtacgagggaaccggcagactgttcttcgagttttacagactgctgcacgacgcccggcctaaggaaggcgacgaccggcccttcttttggctgttcgagaatgtggtggccatgggagtcagcgacaagcgggatattagccggttcctggagagcaaccccgtgatgatcgatgccaaggaagtgagcgccgcccaccgggccagatacttctggggcaatctgcctggcatgaacagacccctggccagcaccgtgaacgacaagctggagctgcaggagtgcctggagcacggccggatcgccaagttcagcaaggtgagaaccatcaccacccgaagcaacagcatcaaacaaggcaaggaccagcactttcctgtgttcatgaacgagaaggaggacatcctgtggtgtaccgagatggagagagtgttcgggttcccagtccactacacagatgtcagcaacatgtctagactggccagacagagactgctgggaagaagctggtccgtccctgtgatcagacacctgttcgcccctctgaaggagtacttcgcctgcgtgagcagcggcaacagcaacgccaacagccggggccccagcttctctagcggcctggtgccactgtccctgagagggagccacatgggccccatggagatctacaaaaccgtgagcgcctggaagcggcagcctgtgcgcgtgctgagcctgtttcggaatatcgataaagtcctgaaaagcctgggattcctggagagcggctctggctccggcggtggcaccctgaagtacgtggaggatgtgacaaacgtggtcagacgggatgtggagaagtggggccccttcgatctggtgtacggcagcacccaacccctgggcagctcttgtgaccggtgccctggctggtacatgtttcagttccaccggatcctgcagtacgccctgccgagacaggagtcccagcggccattcttttggattttcatggacaacttgctgctgaccgaggatgaccaggaaactaccactcggttcctgcagaccgaagccgtgaccctgcaggacgtgagaggccgggactaccagaacgccatgcgggtgtggtccaacatccctggactgaaaagcaagcacgcacctctgacccctaaagaagaggagtacctgcaggcccaggtgcggagcagaagcaagctggacgcccctaaggtggatctgctggtgaagaattgcctcctgcccctgagagagtacttcaagtatttcagccagaatagtctgcccctgggaggcagcggcggcggcgccctggtgacatttgaggacgtcgccgtgcggttcacccaggaggaatgggctctgctggatccttctcagaaaatcctgtaccgggacgtgatgagagagacataccggaatctgacctccgtgggcatcaactgggaatgttgggaccttgaagcctgcttcagaagcctgggaagaaacctgagagtgcaggtggtgaagagaaagtgcgagctgaccaacagcggcccctgcgccgagggcggcccaagcagcggcgcccctcctcccagcggcggcagcccagccggctccccaacctctaccgaggagggcacctctgagtccgccacccccgagagcggccctggcacctccaccgagcccagcgagggcagcgcacccggcagccctgccggcagccccacctccacagaggagggaaccagcaccgagcccagcgaaggcagcgccccaggcaccagcaccgagcctagtgagcaggagattaaacggatcaacaagatcagaagaagacttgtgaaagacagcaacaccaagaaggccggcaagacaggccccatgaaaaccctgctggttagagtgatgacacccgatctgagagagcggctggaaaacctgagaaagaagcctgaaaatatcccccagcccatcagcaatacatctagagccaacctgaataagctgctgaccgattacaccgaaatgaagaaggcgatcctgcatgtgtactgggaagagttccagaaggaccctgtgggcctgatgagccgggtggcccagcctgccagcaagaagatcgatcagaacaagctgaaacctgagatggacgagaagggcaacctgaccaccgccggctttgcctgctctcagtgtggccagcccctgttcgtgtacaagctggagcaggtgtctgagaagggcaaggcttacaccaactacttcggacggtgcaatgtggccgagcacgaaaagctgatcctgctggcccagctgaagcccgagaaggatagcgacgaagccgtgacatatagcctgggaaagtttgggcagagggccctggatttctacagcattcatgtgaccaaggagtccacccaccccgtgaagcccctggcccagatcgccggaaacagatacgcctccggacctgtgggaaaggccctgagcgacgcatgtatgggcacaatcgcctccttcctgtctaagtaccaggacatcatcatcgaacaccagaaggtggtgaagggcaaccagaagagactggagagcctgcgggagctggccggcaaggaaaacctggaataccctagcgtgaccctgccacctcagcctcacaccaaggagggcgttgatgcctacaacgaagtgatcgcccgggtgcgaatgtgggtgaacctgaacctgtggcagaagctgaagctaagcagagatgatgccaagcctctgctgagactgaagggattcccttcctttcctctggtcgagagacaggccaacgaagtggactggtgggacatggtgtgtaacgtgaagaagctgatcaacgagaaaaaggaggatggcaaggtgttttggcagaatctggctggctacaagagacaggaagccctgagaccatacctgagcagcgaggaagatcggaagaagggaaagaaattcgctcggtaccagctgggcgacctgctgctgcacctggaaaagaagcacggcgaggactggggaaaggtgtacgacgaggcctgggagcggattgacaagaaagtggaaggcctgagcaagcacatcaagctggaagaggaacggagaagcgaggacgcccagagcaaggccgccctgaccgactggctgcgggctaaggccagcttcgtgatcgagggcctgaaggaggccgacaaggacgagttctgcagatgcgagctgaagctgcagaagtggtacggggacctgcggggaaagcccttcgccatcgaagccgagaacagcatcctggacatcagcggcttcagcaagcagtacaactgtgccttcatctggcagaaggacggcgtgaagaagctgaacctgtacctgatcatcaactacttcaagggcggcaagctgcggttcaagaagatcaaacctgaagccttcgaagccaacagattctacaccgtgatcaacaaaaagagcggcgagatcgtgcccatggaggtgaacttcaacttcgacgaccccaacctgatcatcctgcctctggcctttggcaagagacagggcagagaattcatctggaacgacctgctgtccctggaaaccggcagcctgaagctggccaacggaagagtgatcgagaagacactgtacaacagaagaacccggcaggatgagcctgccctgttcgtggccctgaccttcgagcggcgggaggtcctggactcctccaatatcaaaccaatgaacctgatcggcgtggcaagaggcgaaaacatccccgccgtgatcgccctgaccgaccccgagggctgcccactgagccggtttaaggatagcctgggaaacccaacccacatcctgagaatcggcgagagctataaggagaagcagcggaccatccaggccaagaaggaggtggagcagcggagagccggcggctacagccggaagtacgccagcaaagccaagaatctggcagacgatatggtgagaaacaccgctagagatctgctgtactacgccgtgacccaggatgccatgctgatcttcgccaacctgagccggggcttcggccggcagggcaagcggaccttcatggccgagagacagtacacacggatggaggactggctgaccgccaagctggcctacgagggcctgagcaagacctacctgtccaagacactggcccagtacacctccaagacatgcagcaactgtgggtttaccatcaccagcgccgactacgacagggtgctggagaagctgaagaagacagcaacaggctggatgaccacaattaacggcaaggagctgaaggtggagggccagattacctactacaacagatacaagagacagaacgtagtcaaggacctgtccgtcgagctggatagactgagcgaagaatctgtgaacaacgacatctcctcctggacaaagggcagaagcggagaagctctgagcctcctgaagaaaagattctcccatagacccgtgcaggagaagttcgtgtgcctgaactgcggcttcgagacacacgcagccgagcaagccgccctgaacatcgccagatcctggctgttcctgcggagccaggagtacaagaaataccagacaaacaagacaaccggcaacaccgataagagagccttcgtcgagacctggcagtccttttaccggaagaagcttaaggaggtgtggaaacctgccgtgcggtctggcggatctggcggaggctccagccagggcctggtgaccttcgaggacgtggccgtgtacttcagcctggaggagtggcagaggctggacgccgcccagagggacctgtacaaggaggtgatgcaggagaactacggcatcctggtgagcctgggctaccccatccccaagcccgacctgatcttcaggctggagcagggcgaggagccctgggtgcccgacagccccagccccgaggagggcgacatcgtgaccggcgtgtacggcggcccaagcagcggcgcccctcctcccagcggcggcagcccagccggctccccaacctctaccgaggagggcacctctgagtccgccacccccgagagcggccctggcacctccaccgagcccagcgagggcagcgcacccggcagccctgccggcagccccacctccacagaggagggaaccagcaccgagcccagcgaaggcagcgccccaggcaccagcaccgagcctagtgagcaggagattaaacggatcaacaagatcagaagaagacttgtgaaagacagcaacaccaagaaggccggcaagacaggccccatgaaaaccctgctggttagagtgatgacacccgatctgagagagcggctggaaaacctgagaaagaagcctgaaaatatcccccagcccatcagcaatacatctagagccaacctgaataagctgctgaccgattacaccgaaatgaagaaggcgatcctgcatgtgtactgggaagagttccagaaggaccctgtgggcctgatgagccgggtggcccagcctgccagcaagaagatcgatcagaacaagctgaaacctgagatggacgagaagggcaacctgaccaccgccggctttgcctgctctcagtgtggccagcccctgttcgtgtacaagctggagcaggtgtctgagaagggcaaggcttacaccaactacttcggacggtgcaatgtggccgagcacgaaaagctgatcctgctggcccagctgaagcccgagaaggatagcgacgaagccgtgacatatagcctgggaaagtttgggcagagggccctggatttctacagcattcatgtgaccaaggagtccacccaccccgtgaagcccctggcccagatcgccggaaacagatacgcctccggacctgtgggaaaggccctgagcgacgcatgtatgggcacaatcgcctccttcctgtctaagtaccaggacatcatcatcgaacaccagaaggtggtgaagggcaaccagaagagactggagagcctgcgggagctggccggcaaggaaaacctggaataccctagcgtgaccctgccacctcagcctcacaccaaggagggcgttgatgcctacaacgaagtgatcgcccgggtgcgaatgtgggtgaacctgaacctgtggcagaagctgaagctaagcagagatgatgccaagcctctgctgagactgaagggattcccttcctttcctctggtcgagagacaggccaacgaagtggactggtgggacatggtgtgtaacgtgaagaagctgatcaacgagaaaaaggaggatggcaaggtgttttggcagaatctggctggctacaagagacaggaagccctgagaccatacctgagcagcgaggaagatcggaagaagggaaagaaattcgctcggtaccagctgggcgacctgctgctgcacctggaaaagaagcacggcgaggactggggaaaggtgtacgacgaggcctgggagcggattgacaagaaagtggaaggcctgagcaagcacatcaagctggaagaggaacggagaagcgaggacgcccagagcaaggccgccctgaccgactggctgcgggctaaggccagcttcgtgatcgagggcctgaaggaggccgacaaggacgagttctgcagatgcgagctgaagctgcagaagtggtacggggacctgcggggaaagcccttcgccatcgaagccgagaacagcatcctggacatcagcggcttcagcaagcagtacaactgtgccttcatctggcagaaggacggcgtgaagaagctgaacctgtacctgatcatcaactacttcaagggcggcaagctgcggttcaagaagatcaaacctgaagccttcgaagccaacagattctacaccgtgatcaacaaaaagagcggcgagatcgtgcccatggaggtgaacttcaacttcgacgaccccaacctgatcatcctgcctctggcctttggcaagagacagggcagagaattcatctggaacgacctgctgtccctggaaaccggcagcctgaagctggccaacggaagagtgatcgagaagacactgtacaacagaagaacccggcaggatgagcctgccctgttcgtggccctgaccttcgagcggcgggaggtcctggactcctccaatatcaaaccaatgaacctgatcggcgtggcaagaggcgaaaacatccccgccgtgatcgccctgaccgaccccgagggctgcccactgagccggtttaaggatagcctgggaaacccaacccacatcctgagaatcggcgagagctataaggagaagcagcggaccatccaggccaagaaggaggtggagcagcggagagccggcggctacagccggaagtacgccagcaaagccaagaatctggcagacgatatggtgagaaacaccgctagagatctgctgtactacgccgtgacccaggatgccatgctgatcttcgccaacctgagccggggcttcggccggcagggcaagcggaccttcatggccgagagacagtacacacggatggaggactggctgaccgccaagctggcctacgagggcctgagcaagacctacctgtccaagacactggcccagtacacctccaagacatgcagcaactgtgggtttaccatcaccagcgccgactacgacagggtgctggagaagctgaagaagacagcaacaggctggatgaccacaattaacggcaaggagctgaaggtggagggccagattacctactacaacagatacaagagacagaacgtagtcaaggacctgtccgtcgagctggatagactgagcgaagaatctgtgaacaacgacatctcctcctggacaaagggcagaagcggagaagctctgagcctcctgaagaaaagattctcccatagacccgtgcaggagaagttcgtgtgcctgaactgcggcttcgagacacacgcagccgagcaagccgccctgaacatcgccagatcctggctgttcctgcggagccaggagtacaagaaataccagacaaacaagacaaccggcaacaccgataagagagccttcgtcgagacctggcagtccttttaccggaagaagcttaaggaggtgtggaaacctgccgtgcggtctggcggatctggcggaggctcctagccagggcctggtgaccttcgaggacgtggccgtgtacttcagcctggaggagtggcagaggctggacgccgcccagagggacctgtacaaggaggtgatgcaggagaactacggcatcctggtgagcctgggctaccccatccccaagcccgacctgatcttcaggctggagcagggcgaggagccctgggtgcccgacagccccagccccgaggagggcgacatcgtgaccggcgtgtacggatctggctccggcagcggccccaagaaaaagagaaaagtctaagctgccttctgcggggcttgccttctggccatgcccttcttctctcccttgcacctgtacctcttggtctttgaataaagcctgagtaggaaggctagcaaaaaaaaaaaaaaaaaaaaaaaaaaaaaaaaaaaaaaaaaaaaaaaaaaaaaaaaaaaaaaaaaaaaaaaaaaaaaaaa

SEQ ID NO: 16505 - RNA, 9485 nt, synthetic construct
  source 1..9485: mol_type = other RNA
aggaaataagagagaaaagaagagtaagaagaaatataagagccaccatggcccctaagaagaagcgtaaagtgagccggatggaacgcctcgtctacgaggtgcggcagaagtgcagaaacatcgaggacatctgcatctcctgcggatctctgaacgtgaccctggagcacccactgttcatcggcggcatgtgccagaactgtaaaaactgttttctggagtgtgcctatcaatacgacgatgacggctaccagagctactgcaccatctgttgcggcggaagagaggtgctgatgtgtggaaataacaactgctgccggtgcttctgcgtggaatgcgtggacctgctggtgggccccggcgccgcccaggccgctattaaggaagatccttggaactgctacatgtgcggccacaagggcacatacggcctgctgagacggagagaggactggcctagcagactgcagatgttcttcgccaataaccacgaccaggagttcgacccccctaaggtgtaccctcccgtccccgccgagaagagaaagcccatccgggtcctgagcctgttcgatggcatcgccaccggtctgctggtgctgaaggacctgggcatccaggtggataggtacattgcctccgaggtgtgcgaggactccatcaccgtgggaatggtgcgtcatcagggcaagatcatgtacgtgggcgacgtgcggagcgtgacacagaagcatatccaggagtggggccctttcgacctggtgatcggcggcagcccttgcaatgacctgagcatcgtgaacccagcccggaagggcctgtacgagggaaccggcagactgttcttcgagttttacagactgctgcacgacgcccggcctaaggaaggcgacgaccggcccttcttttggctgttcgagaatgtggtggccatgggagtcagcgacaagcgggatattagccggttcctggagagcaaccccgtgatgatcgatgccaaggaagtgagcgccgcccaccgggccagatacttctggggcaatctgcctggcatgaacagacccctggccagcaccgtgaacgacaagctggagctgcaggagtgcctggagcacggccggatcgccaagttcagcaaggtgagaaccatcaccacccgaagcaacagcatcaaacaaggcaaggaccagcactttcctgtgttcatgaacgagaaggaggacatcctgtggtgtaccgagatggagagagtgttcgggttcccagtccactacacagatgtcagcaacatgtctagactggccagacagagactgctgggaagaagctggtccgtccctgtgatcagacacctgttcgcccctctgaaggagtacttcgcctgcgtgagcagcggcaacagcaacgccaacagccggggccccagcttctctagcggcctggtgccactgtccctgagagggagccacatgggccccatggagatctacaaaaccgtgagcgcctggaagcggcagcctgtgcgcgtgctgagcctgtttcggaatatcgataaagtcctgaaaagcctgggattcctggagagcggctctggctccggcggtggcaccctgaagtacgtggaggatgtgacaaacgtggtcagacgggatgtggagaagtggggccccttcgatctggtgtacggcagcacccaacccctgggcagctcttgtgaccggtgccctggctggtacatgtttcagttccaccggatcctgcagtacgccctgccgagacaggagtcccagcggccattcttttggattttcatggacaacttgctgctgaccgaggatgaccaggaaactaccactcggttcctgcagaccgaagccgtgaccctgcaggacgtgagaggccgggactaccagaacgccatgcgggtgtggtccaacatccctggactgaaaagcaagcacgcacctctgacccctaaagaagaggagtacctgcaggcccaggtgcggagcagaagcaagctggacgcccctaaggtggatctgctggtgaagaattgcctcctgcccctgagagagtacttcaagtatttcagccagaatagtctgcccctgggaggcagcggcggcggcgccctggtgacatttgaggacgtcgccgtgcggttcacccaggaggaatgggctctgctggatccttctcagaaaatcctgtaccgggacgtgatgagagagacataccggaatctgacctccgtgggcatcaactgggaatgttgggaccttgaagcctgcttcagaagcctgggaagaaacctgagagtgcaggtggtgaagagaaagtgcgagctgaccaacagcggcccctgcgccgagggcggcccaagcagcggcgcccctcctcccagcggcggcagcccagccggctccccaacctctaccgaggagggcacctctgagtccgccacccccgagagcggccctggcacctccaccgagcccagcgagggcagcgcacccggcagccctgccggcagccccacctccacagaggagggaaccagcaccgagcccagcgaaggcagcgccccaggcaccagcaccgagcctagtgagcaggagattaaacggatcaacaagatcagaagaagacttgtgaaagacagcaacaccaagaaggccggcaagacaggccccatgaaaaccctgctggttagagtgatgacacccgatctgagagagcggctggaaaacctgagaaagaagcctgaaaatatcccccagcccatcagcaatacatctagagccaacctgaataagctgctgaccgattacaccgaaatgaagaaggcgatcctgcatgtgtactgggaagagttccagaaggaccctgtgggcctgatgagccgggtggcccagcctgccagcaagaagatcgatcagaacaagctgaaacctgagatggacgagaagggcaacctgaccaccgccggctttgcctgctctcagtgtggccagcccctgttcgtgtacaagctggagcaggtgtctgagaagggcaaggcttacaccaactacttcggacggtgcaatgtggccgagcacgaaaagctgatcctgctggcccagctgaagcccgagaaggatagcgacgaagccgtgacatatagcctgggaaagtttgggcagagggccctggatttctacagcattcatgtgaccaaggagtccacccaccccgtgaagcccctggcccagatcgccggaaacagatacgcctccggacctgtgggaaaggccctgagcgacgcatgtatgggcacaatcgcctccttcctgtctaagtaccaggacatcatcatcgaacaccagaaggtggtgaagggcaaccagaagagactggagagcctgcgggagctggccggcaaggaaaacctggaataccctagcgtgaccctgccacctcagcctcacaccaaggagggcgttgatgcctacaacgaagtgatcgcccgggtgcgaatgtgggtgaacctgaacctgtggcagaagctgaagctaagcagagatgatgccaagcctctgctgagactgaagggattcccttcctttcctctggtcgagagacaggccaacgaagtggactggtgggacatggtgtgtaacgtgaagaagctgatcaacgagaaaaaggaggatggcaaggtgttttggcagaatctggctggctacaagagacaggaagccctgagaccatacctgagcagcgaggaagatcggaagaagggaaagaaattcgctcggtaccagctgggcgacctgctgctgcacctggaaaagaagcacggcgaggactggggaaaggtgtacgacgaggcctgggagcggattgacaagaaagtggaaggcctgagcaagcacatcaagctggaagaggaacggagaagcgaggacgcccagagcaaggccgccctgaccgactggctgcgggctaaggccagcttcgtgatcgagggcctgaaggaggccgacaaggacgagttctgcagatgcgagctgaagctgcagaagtggtacggggacctgcggggaaagcccttcgccatcgaagccgagaacagcatcctggacatcagcggcttcagcaagcagtacaactgtgccttcatctggcagaaggacggcgtgaagaagctgaacctgtacctgatcatcaactacttcaagggcggcaagctgcggttcaagaagatcaaacctgaagccttcgaagccaacagattctacaccgtgatcaacaaaaagagcggcgagatcgtgcccatggaggtgaacttcaacttcgacgaccccaacctgatcatcctgcctctggcctttggcaagagacagggcagagaattcatctggaacgacctgctgtccctggaaaccggcagcctgaagctggccaacggaagagtgatcgagaagacactgtacaacagaagaacccggcaggatgagcctgccctgttcgtggccctgaccttcgagcggcgggaggtcctggactcctccaatatcaaaccaatgaacctgatcggcgtggcaagaggcgaaaacatccccgccgtgatcgccctgaccgaccccgagggctgcccactgagccggtttaaggatagcctgggaaacccaacccacatcctgagaatcggcgagagctataaggagaagcagcggaccatccaggccaagaaggaggtggagcagcggagagccggcggctacagccggaagtacgccagcaaagccaagaatctggcagacgatatggtgagaaacaccgctagagatctgctgtactacgccgtgacccaggatgccatgctgatcttcgccaacctgagccggggcttcggccggcagggcaagcggaccttcatggccgagagacagtacacacggatggaggactggctgaccgccaagctggcctacgagggcctgagcaagacctacctgtccaagacactggcccagtacacctccaagacatgcagcaactgtgggtttaccatcaccagcgccgactacgacagggtgctggagaagctgaagaagacagcaacaggctggatgaccacaattaacggcaaggagctgaaggtggagggccagattacctactacaacagatacaagagacagaacgtagtcaaggacctgtccgtcgagctggatagactgagcgaagaatctgtgaacaacgacatctcctcctggacaaagggcagaagcggagaagctctgagcctcctgaagaaaagattctcccatagacccgtgcaggagaagttcgtgtgcctgaactgcggcttcgagacacacgcagccgagcaagccgccctgaacatcgccagatcctggctgttcctgcggagccaggagtacaagaaataccagacaaacaagacaaccggcaacaccgataagagagccttcgtcgagacctggcagtccttttaccggaagaagcttaaggaggtgtggaaacctgccgtgcggtctggcggatctggcggaggctccagcctggagagcgtgaccttccaggacgtggccgtgaacttcacccaggaggagtggggccacctggagcccgcccagaaggacctgtacagggaggtgatgctggagaactaccagaacttcgtgagcctgggcctgcccttcagcaagccccacgtgatcagccagctggagaggggcgaggccccctggatcaccgagagggacgtgcccagggtgagctgccaggacttcttcatccagggcggcccaagcagcggcgcccctcctcccagcggcggcagcccagccggctccccaacctctaccgaggagggcacctctgagtccgccacccccgagagcggccctggcacctccaccgagcccagcgagggcagcgcacccggcagccctgccggcagccccacctccacagaggagggaaccagcaccgagcccagcgaaggcagcgccccaggcaccagcaccgagcctagtgagcaggagattaaacggatcaacaagatcagaagaagacttgtgaaagacagcaacaccaagaaggccggcaagacaggccccatgaaaaccctgctggttagagtgatgacacccgatctgagagagcggctggaaaacctgagaaagaagcctgaaaatatcccccagcccatcagcaatacatctagagccaacctgaataagctgctgaccgattacaccgaaatgaagaaggcgatcctgcatgtgtactgggaagagttccagaaggaccctgtgggcctgatgagccgggtggcccagcctgccagcaagaagatcgatcagaacaagctgaaacctgagatggacgagaagggcaacctgaccaccgccggctttgcctgctctcagtgtggccagcccctgttcgtgtacaagctggagcaggtgtctgagaagggcaaggcttacaccaactacttcggacggtgcaatgtggccgagcacgaaaagctgatcctgctggcccagctgaagcccgagaaggatagcgacgaagccgtgacatatagcctgggaaagtttgggcagagggccctggatttctacagcattcatgtgaccaaggagtccacccaccccgtgaagcccctggcccagatcgccggaaacagatacgcctccggacctgtgggaaaggccctgagcgacgcatgtatgggcacaatcgcctccttcctgtctaagtaccaggacatcatcatcgaacaccagaaggtggtgaagggcaaccagaagagactggagagcctgcgggagctggccggcaaggaaaacctggaataccctagcgtgaccctgccacctcagcctcacaccaaggagggcgttgatgcctacaacgaagtgatcgcccgggtgcgaatgtgggtgaacctgaacctgtggcagaagctgaagctaagcagagatgatgccaagcctctgctgagactgaagggattcccttcctttcctctggtcgagagacaggccaacgaagtggactggtgggacatggtgtgtaacgtgaagaagctgatcaacgagaaaaaggaggatggcaaggtgttttggcagaatctggctggctacaagagacaggaagccctgagaccatacctgagcagcgaggaagatcggaagaagggaaagaaattcgctcggtaccagctgggcgacctgctgctgcacctggaaaagaagcacggcgaggactggggaaaggtgtacgacgaggcctgggagcggattgacaagaaagtggaaggcctgagcaagcacatcaagctggaagaggaacggagaagcgaggacgcccagagcaaggccgccctgaccgactggctgcgggctaaggccagcttcgtgatcgagggcctgaaggaggccgacaaggacgagttctgcagatgcgagctgaagctgcagaagtggtacggggacctgcggggaaagcccttcgccatcgaagccgagaacagcatcctggacatcagcggcttcagcaagcagtacaactgtgccttcatctggcagaaggacggcgtgaagaagctgaacctgtacctgatcatcaactacttcaagggcggcaagctgcggttcaagaagatcaaacctgaagccttcgaagccaacagattctacaccgtgatcaacaaaaagagcggcgagatcgtgcccatggaggtgaacttcaacttcgacgaccccaacctgatcatcctgcctctggcctttggcaagagacagggcagagaattcatctggaacgacctgctgtccctggaaaccggcagcctgaagctggccaacggaagagtgatcgagaagacactgtacaacagaagaacccggcaggatgagcctgccctgttcgtggccctgaccttcgagcggcgggaggtcctggactcctccaatatcaaaccaatgaacctgatcggcgtggcaagaggcgaaaacatccccgccgtgatcgccctgaccgaccccgagggctgcccactgagccggtttaaggatagcctgggaaacccaacccacatcctgagaatcggcgagagctataaggagaagcagcggaccatccaggccaagaaggaggtggagcagcggagagccggcggctacagccggaagtacgccagcaaagccaagaatctggcagacgatatggtgagaaacaccgctagagatctgctgtactacgccgtgacccaggatgccatgctgatcttcgccaacctgagccggggcttcggccggcagggcaagcggaccttcatggccgagagacagtacacacggatggaggactggctgaccgccaagctggcctacgagggcctgagcaagacctacctgtccaagacactggcccagtacacctccaagacatgcagcaactgtgggtttaccatcaccagcgccgactacgacagggtgctggagaagctgaagaagacagcaacaggctggatgaccacaattaacggcaaggagctgaaggtggagggccagattacctactacaacagatacaagagacagaacgtagtcaaggacctgtccgtcgagctggatagactgagcgaagaatctgtgaacaacgacatctcctcctggacaaagggcagaagcggagaagctctgagcctcctgaagaaaagattctcccatagacccgtgcaggagaagttcgtgtgcctgaactgcggcttcgagacacacgcagccgagcaagccgccctgaacatcgccagatcctggctgttcctgcggagccaggagtacaagaaataccagacaaacaagacaaccggcaacaccgataagagagccttcgtcgagacctggcagtccttttaccggaagaagcttaaggaggtgtggaaacctgccgtgcggtctggcggatctggcggaggctcctagcctggagagcgtgaccttccaggacgtggccgtgaacttcacccaggaggagtggggccacctggagcccgcccagaaggacctgtacagggaggtgatgctggagaactaccagaacttcgtgagcctgggcctgcccttcagcaagccccacgtgatcagccagctggagaggggcgaggccccctggatcaccgagagggacgtgcccagggtgagctgccaggacttcttcatccagggatctggctccggcagcggccccaagaaaaagagaaaagtctaagctgccttctgcggggcttgccttctggccatgcccttcttctctcccttgcacctgtacctcttggtctttgaataaagcctgagtaggaaggctagcaaaaaaaaaaaaaaaaaaaaaaaaaaaaaaaaaaaaaaaaaaaaaaaaaaaaaaaaaaaaaaaaaaaaaaaaaaaaaaaa

SEQ ID NO: 16506 - RNA, 9485 nt, synthetic construct
  source 1..9485: mol_type = other RNA
aggaaataagagagaaaagaagagtaagaagaaatataagagccaccatggcccctaagaagaagcgtaaagtgagccggatggaacgcctcgtctacgaggtgcggcagaagtgcagaaacatcgaggacatctgcatctcctgcggatctctgaacgtgaccctggagcacccactgttcatcggcggcatgtgccagaactgtaaaaactgttttctggagtgtgcctatcaatacgacgatgacggctaccagagctactgcaccatctgttgcggcggaagagaggtgctgatgtgtggaaataacaactgctgccggtgcttctgcgtggaatgcgtggacctgctggtgggccccggcgccgcccaggccgctattaaggaagatccttggaactgctacatgtgcggccacaagggcacatacggcctgctgagacggagagaggactggcctagcagactgcagatgttcttcgccaataaccacgaccaggagttcgacccccctaaggtgtaccctcccgtccccgccgagaagagaaagcccatccgggtcctgagcctgttcgatggcatcgccaccggtctgctggtgctgaaggacctgggcatccaggtggataggtacattgcctccgaggtgtgcgaggactccatcaccgtgggaatggtgcgtcatcagggcaagatcatgtacgtgggcgacgtgcggagcgtgacacagaagcatatccaggagtggggccctttcgacctggtgatcggcggcagcccttgcaatgacctgagcatcgtgaacccagcccggaagggcctgtacgagggaaccggcagactgttcttcgagttttacagactgctgcacgacgcccggcctaaggaaggcgacgaccggcccttcttttggctgttcgagaatgtggtggccatgggagtcagcgacaagcgggatattagccggttcctggagagcaaccccgtgatgatcgatgccaaggaagtgagcgccgcccaccgggccagatacttctggggcaatctgcctggcatgaacagacccctggccagcaccgtgaacgacaagctggagctgcaggagtgcctggagcacggccggatcgccaagttcagcaaggtgagaaccatcaccacccgaagcaacagcatcaaacaaggcaaggaccagcactttcctgtgttcatgaacgagaaggaggacatcctgtggtgtaccgagatggagagagtgttcgggttcccagtccactacacagatgtcagcaacatgtctagactggccagacagagactgctgggaagaagctggtccgtccctgtgatcagacacctgttcgcccctctgaaggagtacttcgcctgcgtgagcagcggcaacagcaacgccaacagccggggccccagcttctctagcggcctggtgccactgtccctgagagggagccacatgggccccatggagatctacaaaaccgtgagcgcctggaagcggcagcctgtgcgcgtgctgagcctgtttcggaatatcgataaagtcctgaaaagcctgggattcctggagagcggctctggctccggcggtggcaccctgaagtacgtggaggatgtgacaaacgtggtcagacgggatgtggagaagtggggccccttcgatctggtgtacggcagcacccaacccctgggcagctcttgtgaccggtgccctggctggtacatgtttcagttccaccggatcctgcagtacgccctgccgagacaggagtcccagcggccattcttttggattttcatggacaacttgctgctgaccgaggatgaccaggaaactaccactcggttcctgcagaccgaagccgtgaccctgcaggacgtgagaggccgggactaccagaacgccatgcgggtgtggtccaacatccctggactgaaaagcaagcacgcacctctgacccctaaagaagaggagtacctgcaggcccaggtgcggagcagaagcaagctggacgcccctaaggtggatctgctggtgaagaattgcctcctgcccctgagagagtacttcaagtatttcagccagaatagtctgcccctgggaggcagcggcggcggcgccctggtgacatttgaggacgtcgccgtgcggttcacccaggaggaatgggctctgctggatccttctcagaaaatcctgtaccgggacgtgatgagagagacataccggaatctgacctccgtgggcatcaactgggaatgttgggaccttgaagcctgcttcagaagcctgggaagaaacctgagagtgcaggtggtgaagagaaagtgcgagctgaccaacagcggcccctgcgccgagggcggcccaagcagcggcgcccctcctcccagcggcggcagcccagccggctccccaacctctaccgaggagggcacctctgagtccgccacccccgagagcggccctggcacctccaccgagcccagcgagggcagcgcacccggcagccctgccggcagccccacctccacagaggagggaaccagcaccgagcccagcgaaggcagcgccccaggcaccagcaccgagcctagtgagcaggagattaaacggatcaacaagatcagaagaagacttgtgaaagacagcaacaccaagaaggccggcaagacaggccccatgaaaaccctgctggttagagtgatgacacccgatctgagagagcggctggaaaacctgagaaagaagcctgaaaatatcccccagcccatcagcaatacatctagagccaacctgaataagctgctgaccgattacaccgaaatgaagaaggcgatcctgcatgtgtactgggaagagttccagaaggaccctgtgggcctgatgagccgggtggcccagcctgccagcaagaagatcgatcagaacaagctgaaacctgagatggacgagaagggcaacctgaccaccgccggctttgcctgctctcagtgtggccagcccctgttcgtgtacaagctggagcaggtgtctgagaagggcaaggcttacaccaactacttcggacggtgcaatgtggccgagcacgaaaagctgatcctgctggcccagctgaagcccgagaaggatagcgacgaagccgtgacatatagcctgggaaagtttgggcagagggccctggatttctacagcattcatgtgaccaaggagtccacccaccccgtgaagcccctggcccagatcgccggaaacagatacgcctccggacctgtgggaaaggccctgagcgacgcatgtatgggcacaatcgcctccttcctgtctaagtaccaggacatcatcatcgaacaccagaaggtggtgaagggcaaccagaagagactggagagcctgcgggagctggccggcaaggaaaacctggaataccctagcgtgaccctgccacctcagcctcacaccaaggagggcgttgatgcctacaacgaagtgatcgcccgggtgcgaatgtgggtgaacctgaacctgtggcagaagctgaagctaagcagagatgatgccaagcctctgctgagactgaagggattcccttcctttcctctggtcgagagacaggccaacgaagtggactggtgggacatggtgtgtaacgtgaagaagctgatcaacgagaaaaaggaggatggcaaggtgttttggcagaatctggctggctacaagagacaggaagccctgagaccatacctgagcagcgaggaagatcggaagaagggaaagaaattcgctcggtaccagctgggcgacctgctgctgcacctggaaaagaagcacggcgaggactggggaaaggtgtacgacgaggcctgggagcggattgacaagaaagtggaaggcctgagcaagcacatcaagctggaagaggaacggagaagcgaggacgcccagagcaaggccgccctgaccgactggctgcgggctaaggccagcttcgtgatcgagggcctgaaggaggccgacaaggacgagttctgcagatgcgagctgaagctgcagaagtggtacggggacctgcggggaaagcccttcgccatcgaagccgagaacagcatcctggacatcagcggcttcagcaagcagtacaactgtgccttcatctggcagaaggacggcgtgaagaagctgaacctgtacctgatcatcaactacttcaagggcggcaagctgcggttcaagaagatcaaacctgaagccttcgaagccaacagattctacaccgtgatcaacaaaaagagcggcgagatcgtgcccatggaggtgaacttcaacttcgacgaccccaacctgatcatcctgcctctggcctttggcaagagacagggcagagaattcatctggaacgacctgctgtccctggaaaccggcagcctgaagctggccaacggaagagtgatcgagaagacactgtacaacagaagaacccggcaggatgagcctgccctgttcgtggccctgaccttcgagcggcgggaggtcctggactcctccaatatcaaaccaatgaacctgatcggcgtggcaagaggcgaaaacatccccgccgtgatcgccctgaccgaccccgagggctgcccactgagccggtttaaggatagcctgggaaacccaacccacatcctgagaatcggcgagagctataaggagaagcagcggaccatccaggccaagaaggaggtggagcagcggagagccggcggctacagccggaagtacgccagcaaagccaagaatctggcagacgatatggtgagaaacaccgctagagatctgctgtactacgccgtgacccaggatgccatgctgatcttcgccaacctgagccggggcttcggccggcagggcaagcggaccttcatggccgagagacagtacacacggatggaggactggctgaccgccaagctggcctacgagggcctgagcaagacctacctgtccaagacactggcccagtacacctccaagacatgcagcaactgtgggtttaccatcaccagcgccgactacgacagggtgctggagaagctgaagaagacagcaacaggctggatgaccacaattaacggcaaggagctgaaggtggagggccagattacctactacaacagatacaagagacagaacgtagtcaaggacctgtccgtcgagctggatagactgagcgaagaatctgtgaacaacgacatctcctcctggacaaagggcagaagcggagaagctctgagcctcctgaagaaaagattctcccatagacccgtgcaggagaagttcgtgtgcctgaactgcggcttcgagacacacgcagccgagcaagccgccctgaacatcgccagatcctggctgttcctgcggagccaggagtacaagaaataccagacaaacaagacaaccggcaacaccgataagagagccttcgtcgagacctggcagtccttttaccggaagaagcttaaggaggtgtggaaacctgccgtgcggtctggcggatctggcggaggctccaagagcaagagcaaggcccccgtgaccttcggcgacctggccatctacttcagccaggaggagtgggagtggctgagccccatccagaaggacctgtacgaggacgtgatgctggagaactaccagaacctggtgagcctgggcctgagcttcaggaggcccaacgtgatcaccctgctggagaagggcaaggccccctggatggtggagcccgtgaagaggaggaggggcctgggccccctgggcggcccaagcagcggcgcccctcctcccagcggcggcagcccagccggctccccaacctctaccgaggagggcacctctgagtccgccacccccgagagcggccctggcacctccaccgagcccagcgagggcagcgcacccggcagccctgccggcagccccacctccacagaggagggaaccagcaccgagcccagcgaaggcagcgccccaggcaccagcaccgagcctagtgagcaggagattaaacggatcaacaagatcagaagaagacttgtgaaagacagcaacaccaagaaggccggcaagacaggccccatgaaaaccctgctggttagagtgatgacacccgatctgagagagcggctggaaaacctgagaaagaagcctgaaaatatcccccagcccatcagcaatacatctagagccaacctgaataagctgctgaccgattacaccgaaatgaagaaggcgatcctgcatgtgtactgggaagagttccagaaggaccctgtgggcctgatgagccgggtggcccagcctgccagcaagaagatcgatcagaacaagctgaaacctgagatggacgagaagggcaacctgaccaccgccggctttgcctgctctcagtgtggccagcccctgttcgtgtacaagctggagcaggtgtctgagaagggcaaggcttacaccaactacttcggacggtgcaatgtggccgagcacgaaaagctgatcctgctggcccagctgaagcccgagaaggatagcgacgaagccgtgacatatagcctgggaaagtttgggcagagggccctggatttctacagcattcatgtgaccaaggagtccacccaccccgtgaagcccctggcccagatcgccggaaacagatacgcctccggacctgtgggaaaggccctgagcgacgcatgtatgggcacaatcgcctccttcctgtctaagtaccaggacatcatcatcgaacaccagaaggtggtgaagggcaaccagaagagactggagagcctgcgggagctggccggcaaggaaaacctggaataccctagcgtgaccctgccacctcagcctcacaccaaggagggcgttgatgcctacaacgaagtgatcgcccgggtgcgaatgtgggtgaacctgaacctgtggcagaagctgaagctaagcagagatgatgccaagcctctgctgagactgaagggattcccttcctttcctctggtcgagagacaggccaacgaagtggactggtgggacatggtgtgtaacgtgaagaagctgatcaacgagaaaaaggaggatggcaaggtgttttggcagaatctggctggctacaagagacaggaagccctgagaccatacctgagcagcgaggaagatcggaagaagggaaagaaattcgctcggtaccagctgggcgacctgctgctgcacctggaaaagaagcacggcgaggactggggaaaggtgtacgacgaggcctgggagcggattgacaagaaagtggaaggcctgagcaagcacatcaagctggaagaggaacggagaagcgaggacgcccagagcaaggccgccctgaccgactggctgcgggctaaggccagcttcgtgatcgagggcctgaaggaggccgacaaggacgagttctgcagatgcgagctgaagctgcagaagtggtacggggacctgcggggaaagcccttcgccatcgaagccgagaacagcatcctggacatcagcggcttcagcaagcagtacaactgtgccttcatctggcagaaggacggcgtgaagaagctgaacctgtacctgatcatcaactacttcaagggcggcaagctgcggttcaagaagatcaaacctgaagccttcgaagccaacagattctacaccgtgatcaacaaaaagagcggcgagatcgtgcccatggaggtgaacttcaacttcgacgaccccaacctgatcatcctgcctctggcctttggcaagagacagggcagagaattcatctggaacgacctgctgtccctggaaaccggcagcctgaagctggccaacggaagagtgatcgagaagacactgtacaacagaagaacccggcaggatgagcctgccctgttcgtggccctgaccttcgagcggcgggaggtcctggactcctccaatatcaaaccaatgaacctgatcggcgtggcaagaggcgaaaacatccccgccgtgatcgccctgaccgaccccgagggctgcccactgagccggtttaaggatagcctgggaaacccaacccacatcctgagaatcggcgagagctataaggagaagcagcggaccatccaggccaagaaggaggtggagcagcggagagccggcggctacagccggaagtacgccagcaaagccaagaatctggcagacgatatggtgagaaacaccgctagagatctgctgtactacgccgtgacccaggatgccatgctgatcttcgccaacctgagccggggcttcggccggcagggcaagcggaccttcatggccgagagacagtacacacggatggaggactggctgaccgccaagctggcctacgagggcctgagcaagacctacctgtccaagacactggcccagtacacctccaagacatgcagcaactgtgggtttaccatcaccagcgccgactacgacagggtgctggagaagctgaagaagacagcaacaggctggatgaccacaattaacggcaaggagctgaaggtggagggccagattacctactacaacagatacaagagacagaacgtagtcaaggacctgtccgtcgagctggatagactgagcgaagaatctgtgaacaacgacatctcctcctggacaaagggcagaagcggagaagctctgagcctcctgaagaaaagattctcccatagacccgtgcaggagaagttcgtgtgcctgaactgcggcttcgagacacacgcagccgagcaagccgccctgaacatcgccagatcctggctgttcctgcggagccaggagtacaagaaataccagacaaacaagacaaccggcaacaccgataagagagccttcgtcgagacctggcagtccttttaccggaagaagcttaaggaggtgtggaaacctgccgtgcggtctggcggatctggcggaggctcctaagagcaagagcaaggcccccgtgaccttcggcgacctggccatctacttcagccaggaggagtgggagtggctgagccccatccagaaggacctgtacgaggacgtgatgctggagaactaccagaacctggtgagcctgggcctgagcttcaggaggcccaacgtgatcaccctgctggagaagggcaaggccccctggatggtggagcccgtgaagaggaggaggggcctgggccccctgggatctggctccggcagcggccccaagaaaaagagaaaagtctaagctgccttctgcggggcttgccttctggccatgcccttcttctctcccttgcacctgtacctcttggtctttgaataaagcctgagtaggaaggctagcaaaaaaaaaaaaaaaaaaaaaaaaaaaaaaaaaaaaaaaaaaaaaaaaaaaaaaaaaaaaaaaaaaaaaaaaaaaaaaaa

SEQ ID NO: 16507 - RNA, 9485 nt, synthetic construct
  source 1..9485: mol_type = other RNA
aggaaataagagagaaaagaagagtaagaagaaatataagagccaccatggcccctaagaagaagcgtaaagtgagccggatggaacgcctcgtctacgaggtgcggcagaagtgcagaaacatcgaggacatctgcatctcctgcggatctctgaacgtgaccctggagcacccactgttcatcggcggcatgtgccagaactgtaaaaactgttttctggagtgtgcctatcaatacgacgatgacggctaccagagctactgcaccatctgttgcggcggaagagaggtgctgatgtgtggaaataacaactgctgccggtgcttctgcgtggaatgcgtggacctgctggtgggccccggcgccgcccaggccgctattaaggaagatccttggaactgctacatgtgcggccacaagggcacatacggcctgctgagacggagagaggactggcctagcagactgcagatgttcttcgccaataaccacgaccaggagttcgacccccctaaggtgtaccctcccgtccccgccgagaagagaaagcccatccgggtcctgagcctgttcgatggcatcgccaccggtctgctggtgctgaaggacctgggcatccaggtggataggtacattgcctccgaggtgtgcgaggactccatcaccgtgggaatggtgcgtcatcagggcaagatcatgtacgtgggcgacgtgcggagcgtgacacagaagcatatccaggagtggggccctttcgacctggtgatcggcggcagcccttgcaatgacctgagcatcgtgaacccagcccggaagggcctgtacgagggaaccggcagactgttcttcgagttttacagactgctgcacgacgcccggcctaaggaaggcgacgaccggcccttcttttggctgttcgagaatgtggtggccatgggagtcagcgacaagcgggatattagccggttcctggagagcaaccccgtgatgatcgatgccaaggaagtgagcgccgcccaccgggccagatacttctggggcaatctgcctggcatgaacagacccctggccagcaccgtgaacgacaagctggagctgcaggagtgcctggagcacggccggatcgccaagttcagcaaggtgagaaccatcaccacccgaagcaacagcatcaaacaaggcaaggaccagcactttcctgtgttcatgaacgagaaggaggacatcctgtggtgtaccgagatggagagagtgttcgggttcccagtccactacacagatgtcagcaacatgtctagactggccagacagagactgctgggaagaagctggtccgtccctgtgatcagacacctgttcgcccctctgaaggagtacttcgcctgcgtgagcagcggcaacagcaacgccaacagccggggccccagcttctctagcggcctggtgccactgtccctgagagggagccacatgggccccatggagatctacaaaaccgtgagcgcctggaagcggcagcctgtgcgcgtgctgagcctgtttcggaatatcgataaagtcctgaaaagcctgggattcctggagagcggctctggctccggcggtggcaccctgaagtacgtggaggatgtgacaaacgtggtcagacgggatgtggagaagtggggccccttcgatctggtgtacggcagcacccaacccctgggcagctcttgtgaccggtgccctggctggtacatgtttcagttccaccggatcctgcagtacgccctgccgagacaggagtcccagcggccattcttttggattttcatggacaacttgctgctgaccgaggatgaccaggaaactaccactcggttcctgcagaccgaagccgtgaccctgcaggacgtgagaggccgggactaccagaacgccatgcgggtgtggtccaacatccctggactgaaaagcaagcacgcacctctgacccctaaagaagaggagtacctgcaggcccaggtgcggagcagaagcaagctggacgcccctaaggtggatctgctggtgaagaattgcctcctgcccctgagagagtacttcaagtatttcagccagaatagtctgcccctgggaggcagcggcggcggcgccctggtgacatttgaggacgtcgccgtgcggttcacccaggaggaatgggctctgctggatccttctcagaaaatcctgtaccgggacgtgatgagagagacataccggaatctgacctccgtgggcatcaactgggaatgttgggaccttgaagcctgcttcagaagcctgggaagaaacctgagagtgcaggtggtgaagagaaagtgcgagctgaccaacagcggcccctgcgccgagggcggcccaagcagcggcgcccctcctcccagcggcggcagcccagccggctccccaacctctaccgaggagggcacctctgagtccgccacccccgagagcggccctggcacctccaccgagcccagcgagggcagcgcacccggcagccctgccggcagccccacctccacagaggagggaaccagcaccgagcccagcgaaggcagcgccccaggcaccagcaccgagcctagtgagcaggagattaaacggatcaacaagatcagaagaagacttgtgaaagacagcaacaccaagaaggccggcaagacaggccccatgaaaaccctgctggttagagtgatgacacccgatctgagagagcggctggaaaacctgagaaagaagcctgaaaatatcccccagcccatcagcaatacatctagagccaacctgaataagctgctgaccgattacaccgaaatgaagaaggcgatcctgcatgtgtactgggaagagttccagaaggaccctgtgggcctgatgagccgggtggcccagcctgccagcaagaagatcgatcagaacaagctgaaacctgagatggacgagaagggcaacctgaccaccgccggctttgcctgctctcagtgtggccagcccctgttcgtgtacaagctggagcaggtgtctgagaagggcaaggcttacaccaactacttcggacggtgcaatgtggccgagcacgaaaagctgatcctgctggcccagctgaagcccgagaaggatagcgacgaagccgtgacatatagcctgggaaagtttgggcagagggccctggatttctacagcattcatgtgaccaaggagtccacccaccccgtgaagcccctggcccagatcgccggaaacagatacgcctccggacctgtgggaaaggccctgagcgacgcatgtatgggcacaatcgcctccttcctgtctaagtaccaggacatcatcatcgaacaccagaaggtggtgaagggcaaccagaagagactggagagcctgcgggagctggccggcaaggaaaacctggaataccctagcgtgaccctgccacctcagcctcacaccaaggagggcgttgatgcctacaacgaagtgatcgcccgggtgcgaatgtgggtgaacctgaacctgtggcagaagctgaagctaagcagagatgatgccaagcctctgctgagactgaagggattcccttcctttcctctggtcgagagacaggccaacgaagtggactggtgggacatggtgtgtaacgtgaagaagctgatcaacgagaaaaaggaggatggcaaggtgttttggcagaatctggctggctacaagagacaggaagccctgagaccatacctgagcagcgaggaagatcggaagaagggaaagaaattcgctcggtaccagctgggcgacctgctgctgcacctggaaaagaagcacggcgaggactggggaaaggtgtacgacgaggcctgggagcggattgacaagaaagtggaaggcctgagcaagcacatcaagctggaagaggaacggagaagcgaggacgcccagagcaaggccgccctgaccgactggctgcgggctaaggccagcttcgtgatcgagggcctgaaggaggccgacaaggacgagttctgcagatgcgagctgaagctgcagaagtggtacggggacctgcggggaaagcccttcgccatcgaagccgagaacagcatcctggacatcagcggcttcagcaagcagtacaactgtgccttcatctggcagaaggacggcgtgaagaagctgaacctgtacctgatcatcaactacttcaagggcggcaagctgcggttcaagaagatcaaacctgaagccttcgaagccaacagattctacaccgtgatcaacaaaaagagcggcgagatcgtgcccatggaggtgaacttcaacttcgacgaccccaacctgatcatcctgcctctggcctttggcaagagacagggcagagaattcatctggaacgacctgctgtccctggaaaccggcagcctgaagctggccaacggaagagtgatcgagaagacactgtacaacagaagaacccggcaggatgagcctgccctgttcgtggccctgaccttcgagcggcgggaggtcctggactcctccaatatcaaaccaatgaacctgatcggcgtggcaagaggcgaaaacatccccgccgtgatcgccctgaccgaccccgagggctgcccactgagccggtttaaggatagcctgggaaacccaacccacatcctgagaatcggcgagagctataaggagaagcagcggaccatccaggccaagaaggaggtggagcagcggagagccggcggctacagccggaagtacgccagcaaagccaagaatctggcagacgatatggtgagaaacaccgctagagatctgctgtactacgccgtgacccaggatgccatgctgatcttcgccaacctgagccggggcttcggccggcagggcaagcggaccttcatggccgagagacagtacacacggatggaggactggctgaccgccaagctggcctacgagggcctgagcaagacctacctgtccaagacactggcccagtacacctccaagacatgcagcaactgtgggtttaccatcaccagcgccgactacgacagggtgctggagaagctgaagaagacagcaacaggctggatgaccacaattaacggcaaggagctgaaggtggagggccagattacctactacaacagatacaagagacagaacgtagtcaaggacctgtccgtcgagctggatagactgagcgaagaatctgtgaacaacgacatctcctcctggacaaagggcagaagcggagaagctctgagcctcctgaagaaaagattctcccatagacccgtgcaggagaagttcgtgtgcctgaactgcggcttcgagacacacgcagccgagcaagccgccctgaacatcgccagatcctggctgttcctgcggagccaggagtacaagaaataccagacaaacaagacaaccggcaacaccgataagagagccttcgtcgagacctggcagtccttttaccggaagaagcttaaggaggtgtggaaacctgccgtgcggtctggcggatctggcggaggctccaagcccggcgccgtgagcttcgccgacgtggccgtgtacttcagccccgaggagtggggctgcctgaggcccgcccagagggccctgtacagggacgtgatgagggagacctacggccacctgggcgccctgggcttcaggggcaccaagcccgccctgatcagctgggtggaggaggaggccgacctgtggggccccgacgccagggaccccgaggtgggcgagtgcctgaccgccgccgacggcggcccaagcagcggcgcccctcctcccagcggcggcagcccagccggctccccaacctctaccgaggagggcacctctgagtccgccacccccgagagcggccctggcacctccaccgagcccagcgagggcagcgcacccggcagccctgccggcagccccacctccacagaggagggaaccagcaccgagcccagcgaaggcagcgccccaggcaccagcaccgagcctagtgagcaggagattaaacggatcaacaagatcagaagaagacttgtgaaagacagcaacaccaagaaggccggcaagacaggccccatgaaaaccctgctggttagagtgatgacacccgatctgagagagcggctggaaaacctgagaaagaagcctgaaaatatcccccagcccatcagcaatacatctagagccaacctgaataagctgctgaccgattacaccgaaatgaagaaggcgatcctgcatgtgtactgggaagagttccagaaggaccctgtgggcctgatgagccgggtggcccagcctgccagcaagaagatcgatcagaacaagctgaaacctgagatggacgagaagggcaacctgaccaccgccggctttgcctgctctcagtgtggccagcccctgttcgtgtacaagctggagcaggtgtctgagaagggcaaggcttacaccaactacttcggacggtgcaatgtggccgagcacgaaaagctgatcctgctggcccagctgaagcccgagaaggatagcgacgaagccgtgacatatagcctgggaaagtttgggcagagggccctggatttctacagcattcatgtgaccaaggagtccacccaccccgtgaagcccctggcccagatcgccggaaacagatacgcctccggacctgtgggaaaggccctgagcgacgcatgtatgggcacaatcgcctccttcctgtctaagtaccaggacatcatcatcgaacaccagaaggtggtgaagggcaaccagaagagactggagagcctgcgggagctggccggcaaggaaaacctggaataccctagcgtgaccctgccacctcagcctcacaccaaggagggcgttgatgcctacaacgaagtgatcgcccgggtgcgaatgtgggtgaacctgaacctgtggcagaagctgaagctaagcagagatgatgccaagcctctgctgagactgaagggattcccttcctttcctctggtcgagagacaggccaacgaagtggactggtgggacatggtgtgtaacgtgaagaagctgatcaacgagaaaaaggaggatggcaaggtgttttggcagaatctggctggctacaagagacaggaagccctgagaccatacctgagcagcgaggaagatcggaagaagggaaagaaattcgctcggtaccagctgggcgacctgctgctgcacctggaaaagaagcacggcgaggactggggaaaggtgtacgacgaggcctgggagcggattgacaagaaagtggaaggcctgagcaagcacatcaagctggaagaggaacggagaagcgaggacgcccagagcaaggccgccctgaccgactggctgcgggctaaggccagcttcgtgatcgagggcctgaaggaggccgacaaggacgagttctgcagatgcgagctgaagctgcagaagtggtacggggacctgcggggaaagcccttcgccatcgaagccgagaacagcatcctggacatcagcggcttcagcaagcagtacaactgtgccttcatctggcagaaggacggcgtgaagaagctgaacctgtacctgatcatcaactacttcaagggcggcaagctgcggttcaagaagatcaaacctgaagccttcgaagccaacagattctacaccgtgatcaacaaaaagagcggcgagatcgtgcccatggaggtgaacttcaacttcgacgaccccaacctgatcatcctgcctctggcctttggcaagagacagggcagagaattcatctggaacgacctgctgtccctggaaaccggcagcctgaagctggccaacggaagagtgatcgagaagacactgtacaacagaagaacccggcaggatgagcctgccctgttcgtggccctgaccttcgagcggcgggaggtcctggactcctccaatatcaaaccaatgaacctgatcggcgtggcaagaggcgaaaacatccccgccgtgatcgccctgaccgaccccgagggctgcccactgagccggtttaaggatagcctgggaaacccaacccacatcctgagaatcggcgagagctataaggagaagcagcggaccatccaggccaagaaggaggtggagcagcggagagccggcggctacagccggaagtacgccagcaaagccaagaatctggcagacgatatggtgagaaacaccgctagagatctgctgtactacgccgtgacccaggatgccatgctgatcttcgccaacctgagccggggcttcggccggcagggcaagcggaccttcatggccgagagacagtacacacggatggaggactggctgaccgccaagctggcctacgagggcctgagcaagacctacctgtccaagacactggcccagtacacctccaagacatgcagcaactgtgggtttaccatcaccagcgccgactacgacagggtgctggagaagctgaagaagacagcaacaggctggatgaccacaattaacggcaaggagctgaaggtggagggccagattacctactacaacagatacaagagacagaacgtagtcaaggacctgtccgtcgagctggatagactgagcgaagaatctgtgaacaacgacatctcctcctggacaaagggcagaagcggagaagctctgagcctcctgaagaaaagattctcccatagacccgtgcaggagaagttcgtgtgcctgaactgcggcttcgagacacacgcagccgagcaagccgccctgaacatcgccagatcctggctgttcctgcggagccaggagtacaagaaataccagacaaacaagacaaccggcaacaccgataagagagccttcgtcgagacctggcagtccttttaccggaagaagcttaaggaggtgtggaaacctgccgtgcggtctggcggatctggcggaggctcctaagcccggcgccgtgagcttcgccgacgtggccgtgtacttcagccccgaggagtggggctgcctgaggcccgcccagagggccctgtacagggacgtgatgagggagacctacggccacctgggcgccctgggcttcaggggcaccaagcccgccctgatcagctgggtggaggaggaggccgacctgtggggccccgacgccagggaccccgaggtgggcgagtgcctgaccgccgccgacggatctggctccggcagcggccccaagaaaaagagaaaagtctaagctgccttctgcggggcttgccttctggccatgcccttcttctctcccttgcacctgtacctcttggtctttgaataaagcctgagtaggaaggctagcaaaaaaaaaaaaaaaaaaaaaaaaaaaaaaaaaaaaaaaaaaaaaaaaaaaaaaaaaaaaaaaaaaaaaaaaaaaaaaaa

SEQ ID NO: 16508 - RNA, 9485 nt, synthetic construct
  source 1..9485: mol_type = other RNA
aggaaataagagagaaaagaagagtaagaagaaatataagagccaccatggcccctaagaagaagcgtaaagtgagccggatggaacgcctcgtctacgaggtgcggcagaagtgcagaaacatcgaggacatctgcatctcctgcggatctctgaacgtgaccctggagcacccactgttcatcggcggcatgtgccagaactgtaaaaactgttttctggagtgtgcctatcaatacgacgatgacggctaccagagctactgcaccatctgttgcggcggaagagaggtgctgatgtgtggaaataacaactgctgccggtgcttctgcgtggaatgcgtggacctgctggtgggccccggcgccgcccaggccgctattaaggaagatccttggaactgctacatgtgcggccacaagggcacatacggcctgctgagacggagagaggactggcctagcagactgcagatgttcttcgccaataaccacgaccaggagttcgacccccctaaggtgtaccctcccgtccccgccgagaagagaaagcccatccgggtcctgagcctgttcgatggcatcgccaccggtctgctggtgctgaaggacctgggcatccaggtggataggtacattgcctccgaggtgtgcgaggactccatcaccgtgggaatggtgcgtcatcagggcaagatcatgtacgtgggcgacgtgcggagcgtgacacagaagcatatccaggagtggggccctttcgacctggtgatcggcggcagcccttgcaatgacctgagcatcgtgaacccagcccggaagggcctgtacgagggaaccggcagactgttcttcgagttttacagactgctgcacgacgcccggcctaaggaaggcgacgaccggcccttcttttggctgttcgagaatgtggtggccatgggagtcagcgacaagcgggatattagccggttcctggagagcaaccccgtgatgatcgatgccaaggaagtgagcgccgcccaccgggccagatacttctggggcaatctgcctggcatgaacagacccctggccagcaccgtgaacgacaagctggagctgcaggagtgcctggagcacggccggatcgccaagttcagcaaggtgagaaccatcaccacccgaagcaacagcatcaaacaaggcaaggaccagcactttcctgtgttcatgaacgagaaggaggacatcctgtggtgtaccgagatggagagagtgttcgggttcccagtccactacacagatgtcagcaacatgtctagactggccagacagagactgctgggaagaagctggtccgtccctgtgatcagacacctgttcgcccctctgaaggagtacttcgcctgcgtgagcagcggcaacagcaacgccaacagccggggccccagcttctctagcggcctggtgccactgtccctgagagggagccacatgggccccatggagatctacaaaaccgtgagcgcctggaagcggcagcctgtgcgcgtgctgagcctgtttcggaatatcgataaagtcctgaaaagcctgggattcctggagagcggctctggctccggcggtggcaccctgaagtacgtggaggatgtgacaaacgtggtcagacgggatgtggagaagtggggccccttcgatctggtgtacggcagcacccaacccctgggcagctcttgtgaccggtgccctggctggtacatgtttcagttccaccggatcctgcagtacgccctgccgagacaggagtcccagcggccattcttttggattttcatggacaacttgctgctgaccgaggatgaccaggaaactaccactcggttcctgcagaccgaagccgtgaccctgcaggacgtgagaggccgggactaccagaacgccatgcgggtgtggtccaacatccctggactgaaaagcaagcacgcacctctgacccctaaagaagaggagtacctgcaggcccaggtgcggagcagaagcaagctggacgcccctaaggtggatctgctggtgaagaattgcctcctgcccctgagagagtacttcaagtatttcagccagaatagtctgcccctgggaggcagcggcggcggcgccctggtgacatttgaggacgtcgccgtgcggttcacccaggaggaatgggctctgctggatccttctcagaaaatcctgtaccgggacgtgatgagagagacataccggaatctgacctccgtgggcatcaactgggaatgttgggaccttgaagcctgcttcagaagcctgggaagaaacctgagagtgcaggtggtgaagagaaagtgcgagctgaccaacagcggcccctgcgccgagggcggcccaagcagcggcgcccctcctcccagcggcggcagcccagccggctccccaacctctaccgaggagggcacctctgagtccgccacccccgagagcggccctggcacctccaccgagcccagcgagggcagcgcacccggcagccctgccggcagccccacctccacagaggagggaaccagcaccgagcccagcgaaggcagcgccccaggcaccagcaccgagcctagtgagcaggagattaaacggatcaacaagatcagaagaagacttgtgaaagacagcaacaccaagaaggccggcaagacaggccccatgaaaaccctgctggttagagtgatgacacccgatctgagagagcggctggaaaacctgagaaagaagcctgaaaatatcccccagcccatcagcaatacatctagagccaacctgaataagctgctgaccgattacaccgaaatgaagaaggcgatcctgcatgtgtactgggaagagttccagaaggaccctgtgggcctgatgagccgggtggcccagcctgccagcaagaagatcgatcagaacaagctgaaacctgagatggacgagaagggcaacctgaccaccgccggctttgcctgctctcagtgtggccagcccctgttcgtgtacaagctggagcaggtgtctgagaagggcaaggcttacaccaactacttcggacggtgcaatgtggccgagcacgaaaagctgatcctgctggcccagctgaagcccgagaaggatagcgacgaagccgtgacatatagcctgggaaagtttgggcagagggccctggatttctacagcattcatgtgaccaaggagtccacccaccccgtgaagcccctggcccagatcgccggaaacagatacgcctccggacctgtgggaaaggccctgagcgacgcatgtatgggcacaatcgcctccttcctgtctaagtaccaggacatcatcatcgaacaccagaaggtggtgaagggcaaccagaagagactggagagcctgcgggagctggccggcaaggaaaacctggaataccctagcgtgaccctgccacctcagcctcacaccaaggagggcgttgatgcctacaacgaagtgatcgcccgggtgcgaatgtgggtgaacctgaacctgtggcagaagctgaagctaagcagagatgatgccaagcctctgctgagactgaagggattcccttcctttcctctggtcgagagacaggccaacgaagtggactggtgggacatggtgtgtaacgtgaagaagctgatcaacgagaaaaaggaggatggcaaggtgttttggcagaatctggctggctacaagagacaggaagccctgagaccatacctgagcagcgaggaagatcggaagaagggaaagaaattcgctcggtaccagctgggcgacctgctgctgcacctggaaaagaagcacggcgaggactggggaaaggtgtacgacgaggcctgggagcggattgacaagaaagtggaaggcctgagcaagcacatcaagctggaagaggaacggagaagcgaggacgcccagagcaaggccgccctgaccgactggctgcgggctaaggccagcttcgtgatcgagggcctgaaggaggccgacaaggacgagttctgcagatgcgagctgaagctgcagaagtggtacggggacctgcggggaaagcccttcgccatcgaagccgagaacagcatcctggacatcagcggcttcagcaagcagtacaactgtgccttcatctggcagaaggacggcgtgaagaagctgaacctgtacctgatcatcaactacttcaagggcggcaagctgcggttcaagaagatcaaacctgaagccttcgaagccaacagattctacaccgtgatcaacaaaaagagcggcgagatcgtgcccatggaggtgaacttcaacttcgacgaccccaacctgatcatcctgcctctggcctttggcaagagacagggcagagaattcatctggaacgacctgctgtccctggaaaccggcagcctgaagctggccaacggaagagtgatcgagaagacactgtacaacagaagaacccggcaggatgagcctgccctgttcgtggccctgaccttcgagcggcgggaggtcctggactcctccaatatcaaaccaatgaacctgatcggcgtggcaagaggcgaaaacatccccgccgtgatcgccctgaccgaccccgagggctgcccactgagccggtttaaggatagcctgggaaacccaacccacatcctgagaatcggcgagagctataaggagaagcagcggaccatccaggccaagaaggaggtggagcagcggagagccggcggctacagccggaagtacgccagcaaagccaagaatctggcagacgatatggtgagaaacaccgctagagatctgctgtactacgccgtgacccaggatgccatgctgatcttcgccaacctgagccggggcttcggccggcagggcaagcggaccttcatggccgagagacagtacacacggatggaggactggctgaccgccaagctggcctacgagggcctgagcaagacctacctgtccaagacactggcccagtacacctccaagacatgcagcaactgtgggtttaccatcaccagcgccgactacgacagggtgctggagaagctgaagaagacagcaacaggctggatgaccacaattaacggcaaggagctgaaggtggagggccagattacctactacaacagatacaagagacagaacgtagtcaaggacctgtccgtcgagctggatagactgagcgaagaatctgtgaacaacgacatctcctcctggacaaagggcagaagcggagaagctctgagcctcctgaagaaaagattctcccatagacccgtgcaggagaagttcgtgtgcctgaactgcggcttcgagacacacgcagccgagcaagccgccctgaacatcgccagatcctggctgttcctgcggagccaggagtacaagaaataccagacaaacaagacaaccggcaacaccgataagagagccttcgtcgagacctggcagtccttttaccggaagaagcttaaggaggtgtggaaacctgccgtgcggtctggcggatctggcggaggctcctgccaggagcccgtgagcttcgcccaggtggccgtgtacttcagcagggaggagtgggccctgctggaccccgcccagagggccctgtacagggacgtgatgctggagacctaccagtgcgtggccagcctggcccccctgcccgcccccaagcccatgctgatcagcctgctggagggcggcgaggacccctgggtgcccgacgtgtgcagccccgaggccgtgcccggcgacctgagccccggcggcccaagcagcggcgcccctcctcccagcggcggcagcccagccggctccccaacctctaccgaggagggcacctctgagtccgccacccccgagagcggccctggcacctccaccgagcccagcgagggcagcgcacccggcagccctgccggcagccccacctccacagaggagggaaccagcaccgagcccagcgaaggcagcgccccaggcaccagcaccgagcctagtgagcaggagattaaacggatcaacaagatcagaagaagacttgtgaaagacagcaacaccaagaaggccggcaagacaggccccatgaaaaccctgctggttagagtgatgacacccgatctgagagagcggctggaaaacctgagaaagaagcctgaaaatatcccccagcccatcagcaatacatctagagccaacctgaataagctgctgaccgattacaccgaaatgaagaaggcgatcctgcatgtgtactgggaagagttccagaaggaccctgtgggcctgatgagccgggtggcccagcctgccagcaagaagatcgatcagaacaagctgaaacctgagatggacgagaagggcaacctgaccaccgccggctttgcctgctctcagtgtggccagcccctgttcgtgtacaagctggagcaggtgtctgagaagggcaaggcttacaccaactacttcggacggtgcaatgtggccgagcacgaaaagctgatcctgctggcccagctgaagcccgagaaggatagcgacgaagccgtgacatatagcctgggaaagtttgggcagagggccctggatttctacagcattcatgtgaccaaggagtccacccaccccgtgaagcccctggcccagatcgccggaaacagatacgcctccggacctgtgggaaaggccctgagcgacgcatgtatgggcacaatcgcctccttcctgtctaagtaccaggacatcatcatcgaacaccagaaggtggtgaagggcaaccagaagagactggagagcctgcgggagctggccggcaaggaaaacctggaataccctagcgtgaccctgccacctcagcctcacaccaaggagggcgttgatgcctacaacgaagtgatcgcccgggtgcgaatgtgggtgaacctgaacctgtggcagaagctgaagctaagcagagatgatgccaagcctctgctgagactgaagggattcccttcctttcctctggtcgagagacaggccaacgaagtggactggtgggacatggtgtgtaacgtgaagaagctgatcaacgagaaaaaggaggatggcaaggtgttttggcagaatctggctggctacaagagacaggaagccctgagaccatacctgagcagcgaggaagatcggaagaagggaaagaaattcgctcggtaccagctgggcgacctgctgctgcacctggaaaagaagcacggcgaggactggggaaaggtgtacgacgaggcctgggagcggattgacaagaaagtggaaggcctgagcaagcacatcaagctggaagaggaacggagaagcgaggacgcccagagcaaggccgccctgaccgactggctgcgggctaaggccagcttcgtgatcgagggcctgaaggaggccgacaaggacgagttctgcagatgcgagctgaagctgcagaagtggtacggggacctgcggggaaagcccttcgccatcgaagccgagaacagcatcctggacatcagcggcttcagcaagcagtacaactgtgccttcatctggcagaaggacggcgtgaagaagctgaacctgtacctgatcatcaactacttcaagggcggcaagctgcggttcaagaagatcaaacctgaagccttcgaagccaacagattctacaccgtgatcaacaaaaagagcggcgagatcgtgcccatggaggtgaacttcaacttcgacgaccccaacctgatcatcctgcctctggcctttggcaagagacagggcagagaattcatctggaacgacctgctgtccctggaaaccggcagcctgaagctggccaacggaagagtgatcgagaagacactgtacaacagaagaacccggcaggatgagcctgccctgttcgtggccctgaccttcgagcggcgggaggtcctggactcctccaatatcaaaccaatgaacctgatcggcgtggcaagaggcgaaaacatccccgccgtgatcgccctgaccgaccccgagggctgcccactgagccggtttaaggatagcctgggaaacccaacccacatcctgagaatcggcgagagctataaggagaagcagcggaccatccaggccaagaaggaggtggagcagcggagagccggcggctacagccggaagtacgccagcaaagccaagaatctggcagacgatatggtgagaaacaccgctagagatctgctgtactacgccgtgacccaggatgccatgctgatcttcgccaacctgagccggggcttcggccggcagggcaagcggaccttcatggccgagagacagtacacacggatggaggactggctgaccgccaagctggcctacgagggcctgagcaagacctacctgtccaagacactggcccagtacacctccaagacatgcagcaactgtgggtttaccatcaccagcgccgactacgacagggtgctggagaagctgaagaagacagcaacaggctggatgaccacaattaacggcaaggagctgaaggtggagggccagattacctactacaacagatacaagagacagaacgtagtcaaggacctgtccgtcgagctggatagactgagcgaagaatctgtgaacaacgacatctcctcctggacaaagggcagaagcggagaagctctgagcctcctgaagaaaagattctcccatagacccgtgcaggagaagttcgtgtgcctgaactgcggcttcgagacacacgcagccgagcaagccgccctgaacatcgccagatcctggctgttcctgcggagccaggagtacaagaaataccagacaaacaagacaaccggcaacaccgataagagagccttcgtcgagacctggcagtccttttaccggaagaagcttaaggaggtgtggaaacctgccgtgcggtctggcggatctggcggaggctccttgccaggagcccgtgagcttcgcccaggtggccgtgtacttcagcagggaggagtgggccctgctggaccccgcccagagggccctgtacagggacgtgatgctggagacctaccagtgcgtggccagcctggcccccctgcccgcccccaagcccatgctgatcagcctgctggagggcggcgaggacccctgggtgcccgacgtgtgcagccccgaggccgtgcccggcgacctgagccccggatctggctccggcagcggccccaagaaaaagagaaaagtctaagctgccttctgcggggcttgccttctggccatgcccttcttctctcccttgcacctgtacctcttggtctttgaataaagcctgagtaggaaggctagcaaaaaaaaaaaaaaaaaaaaaaaaaaaaaaaaaaaaaaaaaaaaaaaaaaaaaaaaaaaaaaaaaaaaaaaaaaaaaaaa

SEQ ID NO: 16509 - RNA, 9485 nt, synthetic construct
  source 1..9485: mol_type = other RNA
aggaaataagagagaaaagaagagtaagaagaaatataagagccaccatggcccctaagaagaagcgtaaagtgagccggatggaacgcctcgtctacgaggtgcggcagaagtgcagaaacatcgaggacatctgcatctcctgcggatctctgaacgtgaccctggagcacccactgttcatcggcggcatgtgccagaactgtaaaaactgttttctggagtgtgcctatcaatacgacgatgacggctaccagagctactgcaccatctgttgcggcggaagagaggtgctgatgtgtggaaataacaactgctgccggtgcttctgcgtggaatgcgtggacctgctggtgggccccggcgccgcccaggccgctattaaggaagatccttggaactgctacatgtgcggccacaagggcacatacggcctgctgagacggagagaggactggcctagcagactgcagatgttcttcgccaataaccacgaccaggagttcgacccccctaaggtgtaccctcccgtccccgccgagaagagaaagcccatccgggtcctgagcctgttcgatggcatcgccaccggtctgctggtgctgaaggacctgggcatccaggtggataggtacattgcctccgaggtgtgcgaggactccatcaccgtgggaatggtgcgtcatcagggcaagatcatgtacgtgggcgacgtgcggagcgtgacacagaagcatatccaggagtggggccctttcgacctggtgatcggcggcagcccttgcaatgacctgagcatcgtgaacccagcccggaagggcctgtacgagggaaccggcagactgttcttcgagttttacagactgctgcacgacgcccggcctaaggaaggcgacgaccggcccttcttttggctgttcgagaatgtggtggccatgggagtcagcgacaagcgggatattagccggttcctggagagcaaccccgtgatgatcgatgccaaggaagtgagcgccgcccaccgggccagatacttctggggcaatctgcctggcatgaacagacccctggccagcaccgtgaacgacaagctggagctgcaggagtgcctggagcacggccggatcgccaagttcagcaaggtgagaaccatcaccacccgaagcaacagcatcaaacaaggcaaggaccagcactttcctgtgttcatgaacgagaaggaggacatcctgtggtgtaccgagatggagagagtgttcgggttcccagtccactacacagatgtcagcaacatgtctagactggccagacagagactgctgggaagaagctggtccgtccctgtgatcagacacctgttcgcccctctgaaggagtacttcgcctgcgtgagcagcggcaacagcaacgccaacagccggggccccagcttctctagcggcctggtgccactgtccctgagagggagccacatgggccccatggagatctacaaaaccgtgagcgcctggaagcggcagcctgtgcgcgtgctgagcctgtttcggaatatcgataaagtcctgaaaagcctgggattcctggagagcggctctggctccggcggtggcaccctgaagtacgtggaggatgtgacaaacgtggtcagacgggatgtggagaagtggggccccttcgatctggtgtacggcagcacccaacccctgggcagctcttgtgaccggtgccctggctggtacatgtttcagttccaccggatcctgcagtacgccctgccgagacaggagtcccagcggccattcttttggattttcatggacaacttgctgctgaccgaggatgaccaggaaactaccactcggttcctgcagaccgaagccgtgaccctgcaggacgtgagaggccgggactaccagaacgccatgcgggtgtggtccaacatccctggactgaaaagcaagcacgcacctctgacccctaaagaagaggagtacctgcaggcccaggtgcggagcagaagcaagctggacgcccctaaggtggatctgctggtgaagaattgcctcctgcccctgagagagtacttcaagtatttcagccagaatagtctgcccctgggaggcagcggcggcggcgccctggtgacatttgaggacgtcgccgtgcggttcacccaggaggaatgggctctgctggatccttctcagaaaatcctgtaccgggacgtgatgagagagacataccggaatctgacctccgtgggcatcaactgggaatgttgggaccttgaagcctgcttcagaagcctgggaagaaacctgagagtgcaggtggtgaagagaaagtgcgagctgaccaacagcggcccctgcgccgagggcggcccaagcagcggcgcccctcctcccagcggcggcagcccagccggctccccaacctctaccgaggagggcacctctgagtccgccacccccgagagcggccctggcacctccaccgagcccagcgagggcagcgcacccggcagccctgccggcagccccacctccacagaggagggaaccagcaccgagcccagcgaaggcagcgccccaggcaccagcaccgagcctagtgagcaggagattaaacggatcaacaagatcagaagaagacttgtgaaagacagcaacaccaagaaggccggcaagacaggccccatgaaaaccctgctggttagagtgatgacacccgatctgagagagcggctggaaaacctgagaaagaagcctgaaaatatcccccagcccatcagcaatacatctagagccaacctgaataagctgctgaccgattacaccgaaatgaagaaggcgatcctgcatgtgtactgggaagagttccagaaggaccctgtgggcctgatgagccgggtggcccagcctgccagcaagaagatcgatcagaacaagctgaaacctgagatggacgagaagggcaacctgaccaccgccggctttgcctgctctcagtgtggccagcccctgttcgtgtacaagctggagcaggtgtctgagaagggcaaggcttacaccaactacttcggacggtgcaatgtggccgagcacgaaaagctgatcctgctggcccagctgaagcccgagaaggatagcgacgaagccgtgacatatagcctgggaaagtttgggcagagggccctggatttctacagcattcatgtgaccaaggagtccacccaccccgtgaagcccctggcccagatcgccggaaacagatacgcctccggacctgtgggaaaggccctgagcgacgcatgtatgggcacaatcgcctccttcctgtctaagtaccaggacatcatcatcgaacaccagaaggtggtgaagggcaaccagaagagactggagagcctgcgggagctggccggcaaggaaaacctggaataccctagcgtgaccctgccacctcagcctcacaccaaggagggcgttgatgcctacaacgaagtgatcgcccgggtgcgaatgtgggtgaacctgaacctgtggcagaagctgaagctaagcagagatgatgccaagcctctgctgagactgaagggattcccttcctttcctctggtcgagagacaggccaacgaagtggactggtgggacatggtgtgtaacgtgaagaagctgatcaacgagaaaaaggaggatggcaaggtgttttggcagaatctggctggctacaagagacaggaagccctgagaccatacctgagcagcgaggaagatcggaagaagggaaagaaattcgctcggtaccagctgggcgacctgctgctgcacctggaaaagaagcacggcgaggactggggaaaggtgtacgacgaggcctgggagcggattgacaagaaagtggaaggcctgagcaagcacatcaagctggaagaggaacggagaagcgaggacgcccagagcaaggccgccctgaccgactggctgcgggctaaggccagcttcgtgatcgagggcctgaaggaggccgacaaggacgagttctgcagatgcgagctgaagctgcagaagtggtacggggacctgcggggaaagcccttcgccatcgaagccgagaacagcatcctggacatcagcggcttcagcaagcagtacaactgtgccttcatctggcagaaggacggcgtgaagaagctgaacctgtacctgatcatcaactacttcaagggcggcaagctgcggttcaagaagatcaaacctgaagccttcgaagccaacagattctacaccgtgatcaacaaaaagagcggcgagatcgtgcccatggaggtgaacttcaacttcgacgaccccaacctgatcatcctgcctctggcctttggcaagagacagggcagagaattcatctggaacgacctgctgtccctggaaaccggcagcctgaagctggccaacggaagagtgatcgagaagacactgtacaacagaagaacccggcaggatgagcctgccctgttcgtggccctgaccttcgagcggcgggaggtcctggactcctccaatatcaaaccaatgaacctgatcggcgtggcaagaggcgaaaacatccccgccgtgatcgccctgaccgaccccgagggctgcccactgagccggtttaaggatagcctgggaaacccaacccacatcctgagaatcggcgagagctataaggagaagcagcggaccatccaggccaagaaggaggtggagcagcggagagccggcggctacagccggaagtacgccagcaaagccaagaatctggcagacgatatggtgagaaacaccgctagagatctgctgtactacgccgtgacccaggatgccatgctgatcttcgccaacctgagccggggcttcggccggcagggcaagcggaccttcatggccgagagacagtacacacggatggaggactggctgaccgccaagctggcctacgagggcctgagcaagacctacctgtccaagacactggcccagtacacctccaagacatgcagcaactgtgggtttaccatcaccagcgccgactacgacagggtgctggagaagctgaagaagacagcaacaggctggatgaccacaattaacggcaaggagctgaaggtggagggccagattacctactacaacagatacaagagacagaacgtagtcaaggacctgtccgtcgagctggatagactgagcgaagaatctgtgaacaacgacatctcctcctggacaaagggcagaagcggagaagctctgagcctcctgaagaaaagattctcccatagacccgtgcaggagaagttcgtgtgcctgaactgcggcttcgagacacacgcagccgagcaagccgccctgaacatcgccagatcctggctgttcctgcggagccaggagtacaagaaataccagacaaacaagacaaccggcaacaccgataagagagccttcgtcgagacctggcagtccttttaccggaagaagcttaaggaggtgtggaaacctgccgtgcggtctggcggatctggcggaggctccatggagcccgtgaccttcgaggacgtggccgtgtacttcacccagaaccagtgggccagcctggaccccgtgcagagggccctgtacagggaggtgatgctggagaactacgccaacgtggccagcctggccttccccttccccaagcccgtgctgatcagccagctggagcagggcgaggccccctggggccccgaccccggcgaggccgaggtgctgaagggcatctggcccggcggcgagggcggcccaagcagcggcgcccctcctcccagcggcggcagcccagccggctccccaacctctaccgaggagggcacctctgagtccgccacccccgagagcggccctggcacctccaccgagcccagcgagggcagcgcacccggcagccctgccggcagccccacctccacagaggagggaaccagcaccgagcccagcgaaggcagcgccccaggcaccagcaccgagcctagtgagcaggagattaaacggatcaacaagatcagaagaagacttgtgaaagacagcaacaccaagaaggccggcaagacaggccccatgaaaaccctgctggttagagtgatgacacccgatctgagagagcggctggaaaacctgagaaagaagcctgaaaatatcccccagcccatcagcaatacatctagagccaacctgaataagctgctgaccgattacaccgaaatgaagaaggcgatcctgcatgtgtactgggaagagttccagaaggaccctgtgggcctgatgagccgggtggcccagcctgccagcaagaagatcgatcagaacaagctgaaacctgagatggacgagaagggcaacctgaccaccgccggctttgcctgctctcagtgtggccagcccctgttcgtgtacaagctggagcaggtgtctgagaagggcaaggcttacaccaactacttcggacggtgcaatgtggccgagcacgaaaagctgatcctgctggcccagctgaagcccgagaaggatagcgacgaagccgtgacatatagcctgggaaagtttgggcagagggccctggatttctacagcattcatgtgaccaaggagtccacccaccccgtgaagcccctggcccagatcgccggaaacagatacgcctccggacctgtgggaaaggccctgagcgacgcatgtatgggcacaatcgcctccttcctgtctaagtaccaggacatcatcatcgaacaccagaaggtggtgaagggcaaccagaagagactggagagcctgcgggagctggccggcaaggaaaacctggaataccctagcgtgaccctgccacctcagcctcacaccaaggagggcgttgatgcctacaacgaagtgatcgcccgggtgcgaatgtgggtgaacctgaacctgtggcagaagctgaagctaagcagagatgatgccaagcctctgctgagactgaagggattcccttcctttcctctggtcgagagacaggccaacgaagtggactggtgggacatggtgtgtaacgtgaagaagctgatcaacgagaaaaaggaggatggcaaggtgttttggcagaatctggctggctacaagagacaggaagccctgagaccatacctgagcagcgaggaagatcggaagaagggaaagaaattcgctcggtaccagctgggcgacctgctgctgcacctggaaaagaagcacggcgaggactggggaaaggtgtacgacgaggcctgggagcggattgacaagaaagtggaaggcctgagcaagcacatcaagctggaagaggaacggagaagcgaggacgcccagagcaaggccgccctgaccgactggctgcgggctaaggccagcttcgtgatcgagggcctgaaggaggccgacaaggacgagttctgcagatgcgagctgaagctgcagaagtggtacggggacctgcggggaaagcccttcgccatcgaagccgagaacagcatcctggacatcagcggcttcagcaagcagtacaactgtgccttcatctggcagaaggacggcgtgaagaagctgaacctgtacctgatcatcaactacttcaagggcggcaagctgcggttcaagaagatcaaacctgaagccttcgaagccaacagattctacaccgtgatcaacaaaaagagcggcgagatcgtgcccatggaggtgaacttcaacttcgacgaccccaacctgatcatcctgcctctggcctttggcaagagacagggcagagaattcatctggaacgacctgctgtccctggaaaccggcagcctgaagctggccaacggaagagtgatcgagaagacactgtacaacagaagaacccggcaggatgagcctgccctgttcgtggccctgaccttcgagcggcgggaggtcctggactcctccaatatcaaaccaatgaacctgatcggcgtggcaagaggcgaaaacatccccgccgtgatcgccctgaccgaccccgagggctgcccactgagccggtttaaggatagcctgggaaacccaacccacatcctgagaatcggcgagagctataaggagaagcagcggaccatccaggccaagaaggaggtggagcagcggagagccggcggctacagccggaagtacgccagcaaagccaagaatctggcagacgatatggtgagaaacaccgctagagatctgctgtactacgccgtgacccaggatgccatgctgatcttcgccaacctgagccggggcttcggccggcagggcaagcggaccttcatggccgagagacagtacacacggatggaggactggctgaccgccaagctggcctacgagggcctgagcaagacctacctgtccaagacactggcccagtacacctccaagacatgcagcaactgtgggtttaccatcaccagcgccgactacgacagggtgctggagaagctgaagaagacagcaacaggctggatgaccacaattaacggcaaggagctgaaggtggagggccagattacctactacaacagatacaagagacagaacgtagtcaaggacctgtccgtcgagctggatagactgagcgaagaatctgtgaacaacgacatctcctcctggacaaagggcagaagcggagaagctctgagcctcctgaagaaaagattctcccatagacccgtgcaggagaagttcgtgtgcctgaactgcggcttcgagacacacgcagccgagcaagccgccctgaacatcgccagatcctggctgttcctgcggagccaggagtacaagaaataccagacaaacaagacaaccggcaacaccgataagagagccttcgtcgagacctggcagtccttttaccggaagaagcttaaggaggtgtggaaacctgccgtgcggtctggcggatctggcggaggctcctatggagcccgtgaccttcgaggacgtggccgtgtacttcacccagaaccagtgggccagcctggaccccgtgcagagggccctgtacagggaggtgatgctggagaactacgccaacgtggccagcctggccttccccttccccaagcccgtgctgatcagccagctggagcagggcgaggccccctggggccccgaccccggcgaggccgaggtgctgaagggcatctggcccggcggcgagggatctggctccggcagcggccccaagaaaaagagaaaagtctaagctgccttctgcggggcttgccttctggccatgcccttcttctctcccttgcacctgtacctcttggtctttgaataaagcctgagtaggaaggctagcaaaaaaaaaaaaaaaaaaaaaaaaaaaaaaaaaaaaaaaaaaaaaaaaaaaaaaaaaaaaaaaaaaaaaaaaaaaaaaaa

SEQ ID NO: 16510 - RNA, 9485 nt, synthetic construct
  source 1..9485: mol_type = other RNA
aggaaataagagagaaaagaagagtaagaagaaatataagagccaccatggcccctaagaagaagcgtaaagtgagccggatggaacgcctcgtctacgaggtgcggcagaagtgcagaaacatcgaggacatctgcatctcctgcggatctctgaacgtgaccctggagcacccactgttcatcggcggcatgtgccagaactgtaaaaactgttttctggagtgtgcctatcaatacgacgatgacggctaccagagctactgcaccatctgttgcggcggaagagaggtgctgatgtgtggaaataacaactgctgccggtgcttctgcgtggaatgcgtggacctgctggtgggccccggcgccgcccaggccgctattaaggaagatccttggaactgctacatgtgcggccacaagggcacatacggcctgctgagacggagagaggactggcctagcagactgcagatgttcttcgccaataaccacgaccaggagttcgacccccctaaggtgtaccctcccgtccccgccgagaagagaaagcccatccgggtcctgagcctgttcgatggcatcgccaccggtctgctggtgctgaaggacctgggcatccaggtggataggtacattgcctccgaggtgtgcgaggactccatcaccgtgggaatggtgcgtcatcagggcaagatcatgtacgtgggcgacgtgcggagcgtgacacagaagcatatccaggagtggggccctttcgacctggtgatcggcggcagcccttgcaatgacctgagcatcgtgaacccagcccggaagggcctgtacgagggaaccggcagactgttcttcgagttttacagactgctgcacgacgcccggcctaaggaaggcgacgaccggcccttcttttggctgttcgagaatgtggtggccatgggagtcagcgacaagcgggatattagccggttcctggagagcaaccccgtgatgatcgatgccaaggaagtgagcgccgcccaccgggccagatacttctggggcaatctgcctggcatgaacagacccctggccagcaccgtgaacgacaagctggagctgcaggagtgcctggagcacggccggatcgccaagttcagcaaggtgagaaccatcaccacccgaagcaacagcatcaaacaaggcaaggaccagcactttcctgtgttcatgaacgagaaggaggacatcctgtggtgtaccgagatggagagagtgttcgggttcccagtccactacacagatgtcagcaacatgtctagactggccagacagagactgctgggaagaagctggtccgtccctgtgatcagacacctgttcgcccctctgaaggagtacttcgcctgcgtgagcagcggcaacagcaacgccaacagccggggccccagcttctctagcggcctggtgccactgtccctgagagggagccacatgggccccatggagatctacaaaaccgtgagcgcctggaagcggcagcctgtgcgcgtgctgagcctgtttcggaatatcgataaagtcctgaaaagcctgggattcctggagagcggctctggctccggcggtggcaccctgaagtacgtggaggatgtgacaaacgtggtcagacgggatgtggagaagtggggccccttcgatctggtgtacggcagcacccaacccctgggcagctcttgtgaccggtgccctggctggtacatgtttcagttccaccggatcctgcagtacgccctgccgagacaggagtcccagcggccattcttttggattttcatggacaacttgctgctgaccgaggatgaccaggaaactaccactcggttcctgcagaccgaagccgtgaccctgcaggacgtgagaggccgggactaccagaacgccatgcgggtgtggtccaacatccctggactgaaaagcaagcacgcacctctgacccctaaagaagaggagtacctgcaggcccaggtgcggagcagaagcaagctggacgcccctaaggtggatctgctggtgaagaattgcctcctgcccctgagagagtacttcaagtatttcagccagaatagtctgcccctgggaggcagcggcggcggcgccctggtgacatttgaggacgtcgccgtgcggttcacccaggaggaatgggctctgctggatccttctcagaaaatcctgtaccgggacgtgatgagagagacataccggaatctgacctccgtgggcatcaactgggaatgttgggaccttgaagcctgcttcagaagcctgggaagaaacctgagagtgcaggtggtgaagagaaagtgcgagctgaccaacagcggcccctgcgccgagggcggcccaagcagcggcgcccctcctcccagcggcggcagcccagccggctccccaacctctaccgaggagggcacctctgagtccgccacccccgagagcggccctggcacctccaccgagcccagcgagggcagcgcacccggcagccctgccggcagccccacctccacagaggagggaaccagcaccgagcccagcgaaggcagcgccccaggcaccagcaccgagcctagtgagcaggagattaaacggatcaacaagatcagaagaagacttgtgaaagacagcaacaccaagaaggccggcaagacaggccccatgaaaaccctgctggttagagtgatgacacccgatctgagagagcggctggaaaacctgagaaagaagcctgaaaatatcccccagcccatcagcaatacatctagagccaacctgaataagctgctgaccgattacaccgaaatgaagaaggcgatcctgcatgtgtactgggaagagttccagaaggaccctgtgggcctgatgagccgggtggcccagcctgccagcaagaagatcgatcagaacaagctgaaacctgagatggacgagaagggcaacctgaccaccgccggctttgcctgctctcagtgtggccagcccctgttcgtgtacaagctggagcaggtgtctgagaagggcaaggcttacaccaactacttcggacggtgcaatgtggccgagcacgaaaagctgatcctgctggcccagctgaagcccgagaaggatagcgacgaagccgtgacatatagcctgggaaagtttgggcagagggccctggatttctacagcattcatgtgaccaaggagtccacccaccccgtgaagcccctggcccagatcgccggaaacagatacgcctccggacctgtgggaaaggccctgagcgacgcatgtatgggcacaatcgcctccttcctgtctaagtaccaggacatcatcatcgaacaccagaaggtggtgaagggcaaccagaagagactggagagcctgcgggagctggccggcaaggaaaacctggaataccctagcgtgaccctgccacctcagcctcacaccaaggagggcgttgatgcctacaacgaagtgatcgcccgggtgcgaatgtgggtgaacctgaacctgtggcagaagctgaagctaagcagagatgatgccaagcctctgctgagactgaagggattcccttcctttcctctggtcgagagacaggccaacgaagtggactggtgggacatggtgtgtaacgtgaagaagctgatcaacgagaaaaaggaggatggcaaggtgttttggcagaatctggctggctacaagagacaggaagccctgagaccatacctgagcagcgaggaagatcggaagaagggaaagaaattcgctcggtaccagctgggcgacctgctgctgcacctggaaaagaagcacggcgaggactggggaaaggtgtacgacgaggcctgggagcggattgacaagaaagtggaaggcctgagcaagcacatcaagctggaagaggaacggagaagcgaggacgcccagagcaaggccgccctgaccgactggctgcgggctaaggccagcttcgtgatcgagggcctgaaggaggccgacaaggacgagttctgcagatgcgagctgaagctgcagaagtggtacggggacctgcggggaaagcccttcgccatcgaagccgagaacagcatcctggacatcagcggcttcagcaagcagtacaactgtgccttcatctggcagaaggacggcgtgaagaagctgaacctgtacctgatcatcaactacttcaagggcggcaagctgcggttcaagaagatcaaacctgaagccttcgaagccaacagattctacaccgtgatcaacaaaaagagcggcgagatcgtgcccatggaggtgaacttcaacttcgacgaccccaacctgatcatcctgcctctggcctttggcaagagacagggcagagaattcatctggaacgacctgctgtccctggaaaccggcagcctgaagctggccaacggaagagtgatcgagaagacactgtacaacagaagaacccggcaggatgagcctgccctgttcgtggccctgaccttcgagcggcgggaggtcctggactcctccaatatcaaaccaatgaacctgatcggcgtggcaagaggcgaaaacatccccgccgtgatcgccctgaccgaccccgagggctgcccactgagccggtttaaggatagcctgggaaacccaacccacatcctgagaatcggcgagagctataaggagaagcagcggaccatccaggccaagaaggaggtggagcagcggagagccggcggctacagccggaagtacgccagcaaagccaagaatctggcagacgatatggtgagaaacaccgctagagatctgctgtactacgccgtgacccaggatgccatgctgatcttcgccaacctgagccggggcttcggccggcagggcaagcggaccttcatggccgagagacagtacacacggatggaggactggctgaccgccaagctggcctacgagggcctgagcaagacctacctgtccaagacactggcccagtacacctccaagacatgcagcaactgtgggtttaccatcaccagcgccgactacgacagggtgctggagaagctgaagaagacagcaacaggctggatgaccacaattaacggcaaggagctgaaggtggagggccagattacctactacaacagatacaagagacagaacgtagtcaaggacctgtccgtcgagctggatagactgagcgaagaatctgtgaacaacgacatctcctcctggacaaagggcagaagcggagaagctctgagcctcctgaagaaaagattctcccatagacccgtgcaggagaagttcgtgtgcctgaactgcggcttcgagacacacgcagccgagcaagccgccctgaacatcgccagatcctggctgttcctgcggagccaggagtacaagaaataccagacaaacaagacaaccggcaacaccgataagagagccttcgtcgagacctggcagtccttttaccggaagaagcttaaggaggtgtggaaacctgccgtgcggtctggcggatctggcggaggctccgtgagcgagcccgtgaccttcgaggaggtggccctgtacttcagcgaggaggagtgggccctgctggacgccggccagagggccctgtacagggacgtgatgaaggagaactacgaggccgtgaggtggctggacaacggcaggctgaacgagaaccacgacaagagcctgcagaacgagggccccgagcagatggccccctgcggcatgatgctgggcatcagcgagggccacgtgagccagggcggcccaagcagcggcgcccctcctcccagcggcggcagcccagccggctccccaacctctaccgaggagggcacctctgagtccgccacccccgagagcggccctggcacctccaccgagcccagcgagggcagcgcacccggcagccctgccggcagccccacctccacagaggagggaaccagcaccgagcccagcgaaggcagcgccccaggcaccagcaccgagcctagtgagcaggagattaaacggatcaacaagatcagaagaagacttgtgaaagacagcaacaccaagaaggccggcaagacaggccccatgaaaaccctgctggttagagtgatgacacccgatctgagagagcggctggaaaacctgagaaagaagcctgaaaatatcccccagcccatcagcaatacatctagagccaacctgaataagctgctgaccgattacaccgaaatgaagaaggcgatcctgcatgtgtactgggaagagttccagaaggaccctgtgggcctgatgagccgggtggcccagcctgccagcaagaagatcgatcagaacaagctgaaacctgagatggacgagaagggcaacctgaccaccgccggctttgcctgctctcagtgtggccagcccctgttcgtgtacaagctggagcaggtgtctgagaagggcaaggcttacaccaactacttcggacggtgcaatgtggccgagcacgaaaagctgatcctgctggcccagctgaagcccgagaaggatagcgacgaagccgtgacatatagcctgggaaagtttgggcagagggccctggatttctacagcattcatgtgaccaaggagtccacccaccccgtgaagcccctggcccagatcgccggaaacagatacgcctccggacctgtgggaaaggccctgagcgacgcatgtatgggcacaatcgcctccttcctgtctaagtaccaggacatcatcatcgaacaccagaaggtggtgaagggcaaccagaagagactggagagcctgcgggagctggccggcaaggaaaacctggaataccctagcgtgaccctgccacctcagcctcacaccaaggagggcgttgatgcctacaacgaagtgatcgcccgggtgcgaatgtgggtgaacctgaacctgtggcagaagctgaagctaagcagagatgatgccaagcctctgctgagactgaagggattcccttcctttcctctggtcgagagacaggccaacgaagtggactggtgggacatggtgtgtaacgtgaagaagctgatcaacgagaaaaaggaggatggcaaggtgttttggcagaatctggctggctacaagagacaggaagccctgagaccatacctgagcagcgaggaagatcggaagaagggaaagaaattcgctcggtaccagctgggcgacctgctgctgcacctggaaaagaagcacggcgaggactggggaaaggtgtacgacgaggcctgggagcggattgacaagaaagtggaaggcctgagcaagcacatcaagctggaagaggaacggagaagcgaggacgcccagagcaaggccgccctgaccgactggctgcgggctaaggccagcttcgtgatcgagggcctgaaggaggccgacaaggacgagttctgcagatgcgagctgaagctgcagaagtggtacggggacctgcggggaaagcccttcgccatcgaagccgagaacagcatcctggacatcagcggcttcagcaagcagtacaactgtgccttcatctggcagaaggacggcgtgaagaagctgaacctgtacctgatcatcaactacttcaagggcggcaagctgcggttcaagaagatcaaacctgaagccttcgaagccaacagattctacaccgtgatcaacaaaaagagcggcgagatcgtgcccatggaggtgaacttcaacttcgacgaccccaacctgatcatcctgcctctggcctttggcaagagacagggcagagaattcatctggaacgacctgctgtccctggaaaccggcagcctgaagctggccaacggaagagtgatcgagaagacactgtacaacagaagaacccggcaggatgagcctgccctgttcgtggccctgaccttcgagcggcgggaggtcctggactcctccaatatcaaaccaatgaacctgatcggcgtggcaagaggcgaaaacatccccgccgtgatcgccctgaccgaccccgagggctgcccactgagccggtttaaggatagcctgggaaacccaacccacatcctgagaatcggcgagagctataaggagaagcagcggaccatccaggccaagaaggaggtggagcagcggagagccggcggctacagccggaagtacgccagcaaagccaagaatctggcagacgatatggtgagaaacaccgctagagatctgctgtactacgccgtgacccaggatgccatgctgatcttcgccaacctgagccggggcttcggccggcagggcaagcggaccttcatggccgagagacagtacacacggatggaggactggctgaccgccaagctggcctacgagggcctgagcaagacctacctgtccaagacactggcccagtacacctccaagacatgcagcaactgtgggtttaccatcaccagcgccgactacgacagggtgctggagaagctgaagaagacagcaacaggctggatgaccacaattaacggcaaggagctgaaggtggagggccagattacctactacaacagatacaagagacagaacgtagtcaaggacctgtccgtcgagctggatagactgagcgaagaatctgtgaacaacgacatctcctcctggacaaagggcagaagcggagaagctctgagcctcctgaagaaaagattctcccatagacccgtgcaggagaagttcgtgtgcctgaactgcggcttcgagacacacgcagccgagcaagccgccctgaacatcgccagatcctggctgttcctgcggagccaggagtacaagaaataccagacaaacaagacaaccggcaacaccgataagagagccttcgtcgagacctggcagtccttttaccggaagaagcttaaggaggtgtggaaacctgccgtgcggtctggcggatctggcggaggctcctgtgagcgagcccgtgaccttcgaggaggtggccctgtacttcagcgaggaggagtgggccctgctggacgccggccagagggccctgtacagggacgtgatgaaggagaactacgaggccgtgaggtggctggacaacggcaggctgaacgagaaccacgacaagagcctgcagaacgagggccccgagcagatggccccctgcggcatgatgctgggcatcagcgagggccacgtgagccagggatctggctccggcagcggccccaagaaaaagagaaaagtctaagctgccttctgcggggcttgccttctggccatgcccttcttctctcccttgcacctgtacctcttggtctttgaataaagcctgagtaggaaggctagcaaaaaaaaaaaaaaaaaaaaaaaaaaaaaaaaaaaaaaaaaaaaaaaaaaaaaaaaaaaaaaaaaaaaaaaaaaaaaaaa

SEQ ID NO: 16511 - RNA, 9485 nt, synthetic construct
  source 1..9485: mol_type = other RNA
aggaaataagagagaaaagaagagtaagaagaaatataagagccaccatggcccctaagaagaagcgtaaagtgagccggatggaacgcctcgtctacgaggtgcggcagaagtgcagaaacatcgaggacatctgcatctcctgcggatctctgaacgtgaccctggagcacccactgttcatcggcggcatgtgccagaactgtaaaaactgttttctggagtgtgcctatcaatacgacgatgacggctaccagagctactgcaccatctgttgcggcggaagagaggtgctgatgtgtggaaataacaactgctgccggtgcttctgcgtggaatgcgtggacctgctggtgggccccggcgccgcccaggccgctattaaggaagatccttggaactgctacatgtgcggccacaagggcacatacggcctgctgagacggagagaggactggcctagcagactgcagatgttcttcgccaataaccacgaccaggagttcgacccccctaaggtgtaccctcccgtccccgccgagaagagaaagcccatccgggtcctgagcctgttcgatggcatcgccaccggtctgctggtgctgaaggacctgggcatccaggtggataggtacattgcctccgaggtgtgcgaggactccatcaccgtgggaatggtgcgtcatcagggcaagatcatgtacgtgggcgacgtgcggagcgtgacacagaagcatatccaggagtggggccctttcgacctggtgatcggcggcagcccttgcaatgacctgagcatcgtgaacccagcccggaagggcctgtacgagggaaccggcagactgttcttcgagttttacagactgctgcacgacgcccggcctaaggaaggcgacgaccggcccttcttttggctgttcgagaatgtggtggccatgggagtcagcgacaagcgggatattagccggttcctggagagcaaccccgtgatgatcgatgccaaggaagtgagcgccgcccaccgggccagatacttctggggcaatctgcctggcatgaacagacccctggccagcaccgtgaacgacaagctggagctgcaggagtgcctggagcacggccggatcgccaagttcagcaaggtgagaaccatcaccacccgaagcaacagcatcaaacaaggcaaggaccagcactttcctgtgttcatgaacgagaaggaggacatcctgtggtgtaccgagatggagagagtgttcgggttcccagtccactacacagatgtcagcaacatgtctagactggccagacagagactgctgggaagaagctggtccgtccctgtgatcagacacctgttcgcccctctgaaggagtacttcgcctgcgtgagcagcggcaacagcaacgccaacagccggggccccagcttctctagcggcctggtgccactgtccctgagagggagccacatgggccccatggagatctacaaaaccgtgagcgcctggaagcggcagcctgtgcgcgtgctgagcctgtttcggaatatcgataaagtcctgaaaagcctgggattcctggagagcggctctggctccggcggtggcaccctgaagtacgtggaggatgtgacaaacgtggtcagacgggatgtggagaagtggggccccttcgatctggtgtacggcagcacccaacccctgggcagctcttgtgaccggtgccctggctggtacatgtttcagttccaccggatcctgcagtacgccctgccgagacaggagtcccagcggccattcttttggattttcatggacaacttgctgctgaccgaggatgaccaggaaactaccactcggttcctgcagaccgaagccgtgaccctgcaggacgtgagaggccgggactaccagaacgccatgcgggtgtggtccaacatccctggactgaaaagcaagcacgcacctctgacccctaaagaagaggagtacctgcaggcccaggtgcggagcagaagcaagctggacgcccctaaggtggatctgctggtgaagaattgcctcctgcccctgagagagtacttcaagtatttcagccagaatagtctgcccctgggaggcagcggcggcggcgccctggtgacatttgaggacgtcgccgtgcggttcacccaggaggaatgggctctgctggatccttctcagaaaatcctgtaccgggacgtgatgagagagacataccggaatctgacctccgtgggcatcaactgggaatgttgggaccttgaagcctgcttcagaagcctgggaagaaacctgagagtgcaggtggtgaagagaaagtgcgagctgaccaacagcggcccctgcgccgagggcggcccaagcagcggcgcccctcctcccagcggcggcagcccagccggctccccaacctctaccgaggagggcacctctgagtccgccacccccgagagcggccctggcacctccaccgagcccagcgagggcagcgcacccggcagccctgccggcagccccacctccacagaggagggaaccagcaccgagcccagcgaaggcagcgccccaggcaccagcaccgagcctagtgagcaggagattaaacggatcaacaagatcagaagaagacttgtgaaagacagcaacaccaagaaggccggcaagacaggccccatgaaaaccctgctggttagagtgatgacacccgatctgagagagcggctggaaaacctgagaaagaagcctgaaaatatcccccagcccatcagcaatacatctagagccaacctgaataagctgctgaccgattacaccgaaatgaagaaggcgatcctgcatgtgtactgggaagagttccagaaggaccctgtgggcctgatgagccgggtggcccagcctgccagcaagaagatcgatcagaacaagctgaaacctgagatggacgagaagggcaacctgaccaccgccggctttgcctgctctcagtgtggccagcccctgttcgtgtacaagctggagcaggtgtctgagaagggcaaggcttacaccaactacttcggacggtgcaatgtggccgagcacgaaaagctgatcctgctggcccagctgaagcccgagaaggatagcgacgaagccgtgacatatagcctgggaaagtttgggcagagggccctggatttctacagcattcatgtgaccaaggagtccacccaccccgtgaagcccctggcccagatcgccggaaacagatacgcctccggacctgtgggaaaggccctgagcgacgcatgtatgggcacaatcgcctccttcctgtctaagtaccaggacatcatcatcgaacaccagaaggtggtgaagggcaaccagaagagactggagagcctgcgggagctggccggcaaggaaaacctggaataccctagcgtgaccctgccacctcagcctcacaccaaggagggcgttgatgcctacaacgaagtgatcgcccgggtgcgaatgtgggtgaacctgaacctgtggcagaagctgaagctaagcagagatgatgccaagcctctgctgagactgaagggattcccttcctttcctctggtcgagagacaggccaacgaagtggactggtgggacatggtgtgtaacgtgaagaagctgatcaacgagaaaaaggaggatggcaaggtgttttggcagaatctggctggctacaagagacaggaagccctgagaccatacctgagcagcgaggaagatcggaagaagggaaagaaattcgctcggtaccagctgggcgacctgctgctgcacctggaaaagaagcacggcgaggactggggaaaggtgtacgacgaggcctgggagcggattgacaagaaagtggaaggcctgagcaagcacatcaagctggaagaggaacggagaagcgaggacgcccagagcaaggccgccctgaccgactggctgcgggctaaggccagcttcgtgatcgagggcctgaaggaggccgacaaggacgagttctgcagatgcgagctgaagctgcagaagtggtacggggacctgcggggaaagcccttcgccatcgaagccgagaacagcatcctggacatcagcggcttcagcaagcagtacaactgtgccttcatctggcagaaggacggcgtgaagaagctgaacctgtacctgatcatcaactacttcaagggcggcaagctgcggttcaagaagatcaaacctgaagccttcgaagccaacagattctacaccgtgatcaacaaaaagagcggcgagatcgtgcccatggaggtgaacttcaacttcgacgaccccaacctgatcatcctgcctctggcctttggcaagagacagggcagagaattcatctggaacgacctgctgtccctggaaaccggcagcctgaagctggccaacggaagagtgatcgagaagacactgtacaacagaagaacccggcaggatgagcctgccctgttcgtggccctgaccttcgagcggcgggaggtcctggactcctccaatatcaaaccaatgaacctgatcggcgtggcaagaggcgaaaacatccccgccgtgatcgccctgaccgaccccgagggctgcccactgagccggtttaaggatagcctgggaaacccaacccacatcctgagaatcggcgagagctataaggagaagcagcggaccatccaggccaagaaggaggtggagcagcggagagccggcggctacagccggaagtacgccagcaaagccaagaatctggcagacgatatggtgagaaacaccgctagagatctgctgtactacgccgtgacccaggatgccatgctgatcttcgccaacctgagccggggcttcggccggcagggcaagcggaccttcatggccgagagacagtacacacggatggaggactggctgaccgccaagctggcctacgagggcctgagcaagacctacctgtccaagacactggcccagtacacctccaagacatgcagcaactgtgggtttaccatcaccagcgccgactacgacagggtgctggagaagctgaagaagacagcaacaggctggatgaccacaattaacggcaaggagctgaaggtggagggccagattacctactacaacagatacaagagacagaacgtagtcaaggacctgtccgtcgagctggatagactgagcgaagaatctgtgaacaacgacatctcctcctggacaaagggcagaagcggagaagctctgagcctcctgaagaaaagattctcccatagacccgtgcaggagaagttcgtgtgcctgaactgcggcttcgagacacacgcagccgagcaagccgccctgaacatcgccagatcctggctgttcctgcggagccaggagtacaagaaataccagacaaacaagacaaccggcaacaccgataagagagccttcgtcgagacctggcagtccttttaccggaagaagcttaaggaggtgtggaaacctgccgtgcggtctggcggatctggcggaggctccaagcccggcgtggtgaggttcgtggacgtggccgtgtacttcagccccgaggagtgggcctgcctgaggcccgcccagagggccctgtacagggacgtgatgagggagacctacggccacctgggcgccctgggcttccccggccccaagcccgccctgatcagctggatggagcaggagaacgaggcctggagccccgccgcccaggaccccgaggagagggagaacctgggcggcgtgcccggcggcccaagcagcggcgcccctcctcccagcggcggcagcccagccggctccccaacctctaccgaggagggcacctctgagtccgccacccccgagagcggccctggcacctccaccgagcccagcgagggcagcgcacccggcagccctgccggcagccccacctccacagaggagggaaccagcaccgagcccagcgaaggcagcgccccaggcaccagcaccgagcctagtgagcaggagattaaacggatcaacaagatcagaagaagacttgtgaaagacagcaacaccaagaaggccggcaagacaggccccatgaaaaccctgctggttagagtgatgacacccgatctgagagagcggctggaaaacctgagaaagaagcctgaaaatatcccccagcccatcagcaatacatctagagccaacctgaataagctgctgaccgattacaccgaaatgaagaaggcgatcctgcatgtgtactgggaagagttccagaaggaccctgtgggcctgatgagccgggtggcccagcctgccagcaagaagatcgatcagaacaagctgaaacctgagatggacgagaagggcaacctgaccaccgccggctttgcctgctctcagtgtggccagcccctgttcgtgtacaagctggagcaggtgtctgagaagggcaaggcttacaccaactacttcggacggtgcaatgtggccgagcacgaaaagctgatcctgctggcccagctgaagcccgagaaggatagcgacgaagccgtgacatatagcctgggaaagtttgggcagagggccctggatttctacagcattcatgtgaccaaggagtccacccaccccgtgaagcccctggcccagatcgccggaaacagatacgcctccggacctgtgggaaaggccctgagcgacgcatgtatgggcacaatcgcctccttcctgtctaagtaccaggacatcatcatcgaacaccagaaggtggtgaagggcaaccagaagagactggagagcctgcgggagctggccggcaaggaaaacctggaataccctagcgtgaccctgccacctcagcctcacaccaaggagggcgttgatgcctacaacgaagtgatcgcccgggtgcgaatgtgggtgaacctgaacctgtggcagaagctgaagctaagcagagatgatgccaagcctctgctgagactgaagggattcccttcctttcctctggtcgagagacaggccaacgaagtggactggtgggacatggtgtgtaacgtgaagaagctgatcaacgagaaaaaggaggatggcaaggtgttttggcagaatctggctggctacaagagacaggaagccctgagaccatacctgagcagcgaggaagatcggaagaagggaaagaaattcgctcggtaccagctgggcgacctgctgctgcacctggaaaagaagcacggcgaggactggggaaaggtgtacgacgaggcctgggagcggattgacaagaaagtggaaggcctgagcaagcacatcaagctggaagaggaacggagaagcgaggacgcccagagcaaggccgccctgaccgactggctgcgggctaaggccagcttcgtgatcgagggcctgaaggaggccgacaaggacgagttctgcagatgcgagctgaagctgcagaagtggtacggggacctgcggggaaagcccttcgccatcgaagccgagaacagcatcctggacatcagcggcttcagcaagcagtacaactgtgccttcatctggcagaaggacggcgtgaagaagctgaacctgtacctgatcatcaactacttcaagggcggcaagctgcggttcaagaagatcaaacctgaagccttcgaagccaacagattctacaccgtgatcaacaaaaagagcggcgagatcgtgcccatggaggtgaacttcaacttcgacgaccccaacctgatcatcctgcctctggcctttggcaagagacagggcagagaattcatctggaacgacctgctgtccctggaaaccggcagcctgaagctggccaacggaagagtgatcgagaagacactgtacaacagaagaacccggcaggatgagcctgccctgttcgtggccctgaccttcgagcggcgggaggtcctggactcctccaatatcaaaccaatgaacctgatcggcgtggcaagaggcgaaaacatccccgccgtgatcgccctgaccgaccccgagggctgcccactgagccggtttaaggatagcctgggaaacccaacccacatcctgagaatcggcgagagctataaggagaagcagcggaccatccaggccaagaaggaggtggagcagcggagagccggcggctacagccggaagtacgccagcaaagccaagaatctggcagacgatatggtgagaaacaccgctagagatctgctgtactacgccgtgacccaggatgccatgctgatcttcgccaacctgagccggggcttcggccggcagggcaagcggaccttcatggccgagagacagtacacacggatggaggactggctgaccgccaagctggcctacgagggcctgagcaagacctacctgtccaagacactggcccagtacacctccaagacatgcagcaactgtgggtttaccatcaccagcgccgactacgacagggtgctggagaagctgaagaagacagcaacaggctggatgaccacaattaacggcaaggagctgaaggtggagggccagattacctactacaacagatacaagagacagaacgtagtcaaggacctgtccgtcgagctggatagactgagcgaagaatctgtgaacaacgacatctcctcctggacaaagggcagaagcggagaagctctgagcctcctgaagaaaagattctcccatagacccgtgcaggagaagttcgtgtgcctgaactgcggcttcgagacacacgcagccgagcaagccgccctgaacatcgccagatcctggctgttcctgcggagccaggagtacaagaaataccagacaaacaagacaaccggcaacaccgataagagagccttcgtcgagacctggcagtccttttaccggaagaagcttaaggaggtgtggaaacctgccgtgcggtctggcggatctggcggaggctcctaagcccggcgtggtgaggttcgtggacgtggccgtgtacttcagccccgaggagtgggcctgcctgaggcccgcccagagggccctgtacagggacgtgatgagggagacctacggccacctgggcgccctgggcttccccggccccaagcccgccctgatcagctggatggagcaggagaacgaggcctggagccccgccgcccaggaccccgaggagagggagaacctgggcggcgtgcccggatctggctccggcagcggccccaagaaaaagagaaaagtctaagctgccttctgcggggcttgccttctggccatgcccttcttctctcccttgcacctgtacctcttggtctttgaataaagcctgagtaggaaggctagcaaaaaaaaaaaaaaaaaaaaaaaaaaaaaaaaaaaaaaaaaaaaaaaaaaaaaaaaaaaaaaaaaaaaaaaaaaaaaaaa

SEQ ID NO: 16512 - RNA, 9485 nt, synthetic construct
  source 1..9485: mol_type = other RNA
aggaaataagagagaaaagaagagtaagaagaaatataagagccaccatggcccctaagaagaagcgtaaagtgagccggatggaacgcctcgtctacgaggtgcggcagaagtgcagaaacatcgaggacatctgcatctcctgcggatctctgaacgtgaccctggagcacccactgttcatcggcggcatgtgccagaactgtaaaaactgttttctggagtgtgcctatcaatacgacgatgacggctaccagagctactgcaccatctgttgcggcggaagagaggtgctgatgtgtggaaataacaactgctgccggtgcttctgcgtggaatgcgtggacctgctggtgggccccggcgccgcccaggccgctattaaggaagatccttggaactgctacatgtgcggccacaagggcacatacggcctgctgagacggagagaggactggcctagcagactgcagatgttcttcgccaataaccacgaccaggagttcgacccccctaaggtgtaccctcccgtccccgccgagaagagaaagcccatccgggtcctgagcctgttcgatggcatcgccaccggtctgctggtgctgaaggacctgggcatccaggtggataggtacattgcctccgaggtgtgcgaggactccatcaccgtgggaatggtgcgtcatcagggcaagatcatgtacgtgggcgacgtgcggagcgtgacacagaagcatatccaggagtggggccctttcgacctggtgatcggcggcagcccttgcaatgacctgagcatcgtgaacccagcccggaagggcctgtacgagggaaccggcagactgttcttcgagttttacagactgctgcacgacgcccggcctaaggaaggcgacgaccggcccttcttttggctgttcgagaatgtggtggccatgggagtcagcgacaagcgggatattagccggttcctggagagcaaccccgtgatgatcgatgccaaggaagtgagcgccgcccaccgggccagatacttctggggcaatctgcctggcatgaacagacccctggccagcaccgtgaacgacaagctggagctgcaggagtgcctggagcacggccggatcgccaagttcagcaaggtgagaaccatcaccacccgaagcaacagcatcaaacaaggcaaggaccagcactttcctgtgttcatgaacgagaaggaggacatcctgtggtgtaccgagatggagagagtgttcgggttcccagtccactacacagatgtcagcaacatgtctagactggccagacagagactgctgggaagaagctggtccgtccctgtgatcagacacctgttcgcccctctgaaggagtacttcgcctgcgtgagcagcggcaacagcaacgccaacagccggggccccagcttctctagcggcctggtgccactgtccctgagagggagccacatgggccccatggagatctacaaaaccgtgagcgcctggaagcggcagcctgtgcgcgtgctgagcctgtttcggaatatcgataaagtcctgaaaagcctgggattcctggagagcggctctggctccggcggtggcaccctgaagtacgtggaggatgtgacaaacgtggtcagacgggatgtggagaagtggggccccttcgatctggtgtacggcagcacccaacccctgggcagctcttgtgaccggtgccctggctggtacatgtttcagttccaccggatcctgcagtacgccctgccgagacaggagtcccagcggccattcttttggattttcatggacaacttgctgctgaccgaggatgaccaggaaactaccactcggttcctgcagaccgaagccgtgaccctgcaggacgtgagaggccgggactaccagaacgccatgcgggtgtggtccaacatccctggactgaaaagcaagcacgcacctctgacccctaaagaagaggagtacctgcaggcccaggtgcggagcagaagcaagctggacgcccctaaggtggatctgctggtgaagaattgcctcctgcccctgagagagtacttcaagtatttcagccagaatagtctgcccctgggaggcagcggcggcggcgccctggtgacatttgaggacgtcgccgtgcggttcacccaggaggaatgggctctgctggatccttctcagaaaatcctgtaccgggacgtgatgagagagacataccggaatctgacctccgtgggcatcaactgggaatgttgggaccttgaagcctgcttcagaagcctgggaagaaacctgagagtgcaggtggtgaagagaaagtgcgagctgaccaacagcggcccctgcgccgagggcggcccaagcagcggcgcccctcctcccagcggcggcagcccagccggctccccaacctctaccgaggagggcacctctgagtccgccacccccgagagcggccctggcacctccaccgagcccagcgagggcagcgcacccggcagccctgccggcagccccacctccacagaggagggaaccagcaccgagcccagcgaaggcagcgccccaggcaccagcaccgagcctagtgagcaggagattaaacggatcaacaagatcagaagaagacttgtgaaagacagcaacaccaagaaggccggcaagacaggccccatgaaaaccctgctggttagagtgatgacacccgatctgagagagcggctggaaaacctgagaaagaagcctgaaaatatcccccagcccatcagcaatacatctagagccaacctgaataagctgctgaccgattacaccgaaatgaagaaggcgatcctgcatgtgtactgggaagagttccagaaggaccctgtgggcctgatgagccgggtggcccagcctgccagcaagaagatcgatcagaacaagctgaaacctgagatggacgagaagggcaacctgaccaccgccggctttgcctgctctcagtgtggccagcccctgttcgtgtacaagctggagcaggtgtctgagaagggcaaggcttacaccaactacttcggacggtgcaatgtggccgagcacgaaaagctgatcctgctggcccagctgaagcccgagaaggatagcgacgaagccgtgacatatagcctgggaaagtttgggcagagggccctggatttctacagcattcatgtgaccaaggagtccacccaccccgtgaagcccctggcccagatcgccggaaacagatacgcctccggacctgtgggaaaggccctgagcgacgcatgtatgggcacaatcgcctccttcctgtctaagtaccaggacatcatcatcgaacaccagaaggtggtgaagggcaaccagaagagactggagagcctgcgggagctggccggcaaggaaaacctggaataccctagcgtgaccctgccacctcagcctcacaccaaggagggcgttgatgcctacaacgaagtgatcgcccgggtgcgaatgtgggtgaacctgaacctgtggcagaagctgaagctaagcagagatgatgccaagcctctgctgagactgaagggattcccttcctttcctctggtcgagagacaggccaacgaagtggactggtgggacatggtgtgtaacgtgaagaagctgatcaacgagaaaaaggaggatggcaaggtgttttggcagaatctggctggctacaagagacaggaagccctgagaccatacctgagcagcgaggaagatcggaagaagggaaagaaattcgctcggtaccagctgggcgacctgctgctgcacctggaaaagaagcacggcgaggactggggaaaggtgtacgacgaggcctgggagcggattgacaagaaagtggaaggcctgagcaagcacatcaagctggaagaggaacggagaagcgaggacgcccagagcaaggccgccctgaccgactggctgcgggctaaggccagcttcgtgatcgagggcctgaaggaggccgacaaggacgagttctgcagatgcgagctgaagctgcagaagtggtacggggacctgcggggaaagcccttcgccatcgaagccgagaacagcatcctggacatcagcggcttcagcaagcagtacaactgtgccttcatctggcagaaggacggcgtgaagaagctgaacctgtacctgatcatcaactacttcaagggcggcaagctgcggttcaagaagatcaaacctgaagccttcgaagccaacagattctacaccgtgatcaacaaaaagagcggcgagatcgtgcccatggaggtgaacttcaacttcgacgaccccaacctgatcatcctgcctctggcctttggcaagagacagggcagagaattcatctggaacgacctgctgtccctggaaaccggcagcctgaagctggccaacggaagagtgatcgagaagacactgtacaacagaagaacccggcaggatgagcctgccctgttcgtggccctgaccttcgagcggcgggaggtcctggactcctccaatatcaaaccaatgaacctgatcggcgtggcaagaggcgaaaacatccccgccgtgatcgccctgaccgaccccgagggctgcccactgagccggtttaaggatagcctgggaaacccaacccacatcctgagaatcggcgagagctataaggagaagcagcggaccatccaggccaagaaggaggtggagcagcggagagccggcggctacagccggaagtacgccagcaaagccaagaatctggcagacgatatggtgagaaacaccgctagagatctgctgtactacgccgtgacccaggatgccatgctgatcttcgccaacctgagccggggcttcggccggcagggcaagcggaccttcatggccgagagacagtacacacggatggaggactggctgaccgccaagctggcctacgagggcctgagcaagacctacctgtccaagacactggcccagtacacctccaagacatgcagcaactgtgggtttaccatcaccagcgccgactacgacagggtgctggagaagctgaagaagacagcaacaggctggatgaccacaattaacggcaaggagctgaaggtggagggccagattacctactacaacagatacaagagacagaacgtagtcaaggacctgtccgtcgagctggatagactgagcgaagaatctgtgaacaacgacatctcctcctggacaaagggcagaagcggagaagctctgagcctcctgaagaaaagattctcccatagacccgtgcaggagaagttcgtgtgcctgaactgcggcttcgagacacacgcagccgagcaagccgccctgaacatcgccagatcctggctgttcctgcggagccaggagtacaagaaataccagacaaacaagacaaccggcaacaccgataagagagccttcgtcgagacctggcagtccttttaccggaagaagcttaaggaggtgtggaaacctgccgtgcggtctggcggatctggcggaggctccgtggtgttcaccgacgtggccgtggacttcagccaggaggagtgggagtgcctggacagctaccagaggagcctgtacagggacgtgatcctggagaactacagcaacctggtgagcctgggcggcggcagcatcagcaagcccgacgtggtgaccctgctggagcagggcaaggagccctggatggtggtgagggacaccaagatcaggtggagcctgggcctggagagcaactacgacgccggcggcccaagcagcggcgcccctcctcccagcggcggcagcccagccggctccccaacctctaccgaggagggcacctctgagtccgccacccccgagagcggccctggcacctccaccgagcccagcgagggcagcgcacccggcagccctgccggcagccccacctccacagaggagggaaccagcaccgagcccagcgaaggcagcgccccaggcaccagcaccgagcctagtgagcaggagattaaacggatcaacaagatcagaagaagacttgtgaaagacagcaacaccaagaaggccggcaagacaggccccatgaaaaccctgctggttagagtgatgacacccgatctgagagagcggctggaaaacctgagaaagaagcctgaaaatatcccccagcccatcagcaatacatctagagccaacctgaataagctgctgaccgattacaccgaaatgaagaaggcgatcctgcatgtgtactgggaagagttccagaaggaccctgtgggcctgatgagccgggtggcccagcctgccagcaagaagatcgatcagaacaagctgaaacctgagatggacgagaagggcaacctgaccaccgccggctttgcctgctctcagtgtggccagcccctgttcgtgtacaagctggagcaggtgtctgagaagggcaaggcttacaccaactacttcggacggtgcaatgtggccgagcacgaaaagctgatcctgctggcccagctgaagcccgagaaggatagcgacgaagccgtgacatatagcctgggaaagtttgggcagagggccctggatttctacagcattcatgtgaccaaggagtccacccaccccgtgaagcccctggcccagatcgccggaaacagatacgcctccggacctgtgggaaaggccctgagcgacgcatgtatgggcacaatcgcctccttcctgtctaagtaccaggacatcatcatcgaacaccagaaggtggtgaagggcaaccagaagagactggagagcctgcgggagctggccggcaaggaaaacctggaataccctagcgtgaccctgccacctcagcctcacaccaaggagggcgttgatgcctacaacgaagtgatcgcccgggtgcgaatgtgggtgaacctgaacctgtggcagaagctgaagctaagcagagatgatgccaagcctctgctgagactgaagggattcccttcctttcctctggtcgagagacaggccaacgaagtggactggtgggacatggtgtgtaacgtgaagaagctgatcaacgagaaaaaggaggatggcaaggtgttttggcagaatctggctggctacaagagacaggaagccctgagaccatacctgagcagcgaggaagatcggaagaagggaaagaaattcgctcggtaccagctgggcgacctgctgctgcacctggaaaagaagcacggcgaggactggggaaaggtgtacgacgaggcctgggagcggattgacaagaaagtggaaggcctgagcaagcacatcaagctggaagaggaacggagaagcgaggacgcccagagcaaggccgccctgaccgactggctgcgggctaaggccagcttcgtgatcgagggcctgaaggaggccgacaaggacgagttctgcagatgcgagctgaagctgcagaagtggtacggggacctgcggggaaagcccttcgccatcgaagccgagaacagcatcctggacatcagcggcttcagcaagcagtacaactgtgccttcatctggcagaaggacggcgtgaagaagctgaacctgtacctgatcatcaactacttcaagggcggcaagctgcggttcaagaagatcaaacctgaagccttcgaagccaacagattctacaccgtgatcaacaaaaagagcggcgagatcgtgcccatggaggtgaacttcaacttcgacgaccccaacctgatcatcctgcctctggcctttggcaagagacagggcagagaattcatctggaacgacctgctgtccctggaaaccggcagcctgaagctggccaacggaagagtgatcgagaagacactgtacaacagaagaacccggcaggatgagcctgccctgttcgtggccctgaccttcgagcggcgggaggtcctggactcctccaatatcaaaccaatgaacctgatcggcgtggcaagaggcgaaaacatccccgccgtgatcgccctgaccgaccccgagggctgcccactgagccggtttaaggatagcctgggaaacccaacccacatcctgagaatcggcgagagctataaggagaagcagcggaccatccaggccaagaaggaggtggagcagcggagagccggcggctacagccggaagtacgccagcaaagccaagaatctggcagacgatatggtgagaaacaccgctagagatctgctgtactacgccgtgacccaggatgccatgctgatcttcgccaacctgagccggggcttcggccggcagggcaagcggaccttcatggccgagagacagtacacacggatggaggactggctgaccgccaagctggcctacgagggcctgagcaagacctacctgtccaagacactggcccagtacacctccaagacatgcagcaactgtgggtttaccatcaccagcgccgactacgacagggtgctggagaagctgaagaagacagcaacaggctggatgaccacaattaacggcaaggagctgaaggtggagggccagattacctactacaacagatacaagagacagaacgtagtcaaggacctgtccgtcgagctggatagactgagcgaagaatctgtgaacaacgacatctcctcctggacaaagggcagaagcggagaagctctgagcctcctgaagaaaagattctcccatagacccgtgcaggagaagttcgtgtgcctgaactgcggcttcgagacacacgcagccgagcaagccgccctgaacatcgccagatcctggctgttcctgcggagccaggagtacaagaaataccagacaaacaagacaaccggcaacaccgataagagagccttcgtcgagacctggcagtccttttaccggaagaagcttaaggaggtgtggaaacctgccgtgcggtctggcggatctggcggaggctcctgtggtgttcaccgacgtggccgtggacttcagccaggaggagtgggagtgcctggacagctaccagaggagcctgtacagggacgtgatcctggagaactacagcaacctggtgagcctgggcggcggcagcatcagcaagcccgacgtggtgaccctgctggagcagggcaaggagccctggatggtggtgagggacaccaagatcaggtggagcctgggcctggagagcaactacgacgccggatctggctccggcagcggccccaagaaaaagagaaaagtctaagctgccttctgcggggcttgccttctggccatgcccttcttctctcccttgcacctgtacctcttggtctttgaataaagcctgagtaggaaggctagcaaaaaaaaaaaaaaaaaaaaaaaaaaaaaaaaaaaaaaaaaaaaaaaaaaaaaaaaaaaaaaaaaaaaaaaaaaaaaaaa

SEQ ID NO: 16513 - RNA, 9485 nt, synthetic construct
  source 1..9485: mol_type = other RNA
aggaaataagagagaaaagaagagtaagaagaaatataagagccaccatggcccctaagaagaagcgtaaagtgagccggatggaacgcctcgtctacgaggtgcggcagaagtgcagaaacatcgaggacatctgcatctcctgcggatctctgaacgtgaccctggagcacccactgttcatcggcggcatgtgccagaactgtaaaaactgttttctggagtgtgcctatcaatacgacgatgacggctaccagagctactgcaccatctgttgcggcggaagagaggtgctgatgtgtggaaataacaactgctgccggtgcttctgcgtggaatgcgtggacctgctggtgggccccggcgccgcccaggccgctattaaggaagatccttggaactgctacatgtgcggccacaagggcacatacggcctgctgagacggagagaggactggcctagcagactgcagatgttcttcgccaataaccacgaccaggagttcgacccccctaaggtgtaccctcccgtccccgccgagaagagaaagcccatccgggtcctgagcctgttcgatggcatcgccaccggtctgctggtgctgaaggacctgggcatccaggtggataggtacattgcctccgaggtgtgcgaggactccatcaccgtgggaatggtgcgtcatcagggcaagatcatgtacgtgggcgacgtgcggagcgtgacacagaagcatatccaggagtggggccctttcgacctggtgatcggcggcagcccttgcaatgacctgagcatcgtgaacccagcccggaagggcctgtacgagggaaccggcagactgttcttcgagttttacagactgctgcacgacgcccggcctaaggaaggcgacgaccggcccttcttttggctgttcgagaatgtggtggccatgggagtcagcgacaagcgggatattagccggttcctggagagcaaccccgtgatgatcgatgccaaggaagtgagcgccgcccaccgggccagatacttctggggcaatctgcctggcatgaacagacccctggccagcaccgtgaacgacaagctggagctgcaggagtgcctggagcacggccggatcgccaagttcagcaaggtgagaaccatcaccacccgaagcaacagcatcaaacaaggcaaggaccagcactttcctgtgttcatgaacgagaaggaggacatcctgtggtgtaccgagatggagagagtgttcgggttcccagtccactacacagatgtcagcaacatgtctagactggccagacagagactgctgggaagaagctggtccgtccctgtgatcagacacctgttcgcccctctgaaggagtacttcgcctgcgtgagcagcggcaacagcaacgccaacagccggggccccagcttctctagcggcctggtgccactgtccctgagagggagccacatgggccccatggagatctacaaaaccgtgagcgcctggaagcggcagcctgtgcgcgtgctgagcctgtttcggaatatcgataaagtcctgaaaagcctgggattcctggagagcggctctggctccggcggtggcaccctgaagtacgtggaggatgtgacaaacgtggtcagacgggatgtggagaagtggggccccttcgatctggtgtacggcagcacccaacccctgggcagctcttgtgaccggtgccctggctggtacatgtttcagttccaccggatcctgcagtacgccctgccgagacaggagtcccagcggccattcttttggattttcatggacaacttgctgctgaccgaggatgaccaggaaactaccactcggttcctgcagaccgaagccgtgaccctgcaggacgtgagaggccgggactaccagaacgccatgcgggtgtggtccaacatccctggactgaaaagcaagcacgcacctctgacccctaaagaagaggagtacctgcaggcccaggtgcggagcagaagcaagctggacgcccctaaggtggatctgctggtgaagaattgcctcctgcccctgagagagtacttcaagtatttcagccagaatagtctgcccctgggaggcagcggcggcggcgccctggtgacatttgaggacgtcgccgtgcggttcacccaggaggaatgggctctgctggatccttctcagaaaatcctgtaccgggacgtgatgagagagacataccggaatctgacctccgtgggcatcaactgggaatgttgggaccttgaagcctgcttcagaagcctgggaagaaacctgagagtgcaggtggtgaagagaaagtgcgagctgaccaacagcggcccctgcgccgagggcggcccaagcagcggcgcccctcctcccagcggcggcagcccagccggctccccaacctctaccgaggagggcacctctgagtccgccacccccgagagcggccctggcacctccaccgagcccagcgagggcagcgcacccggcagccctgccggcagccccacctccacagaggagggaaccagcaccgagcccagcgaaggcagcgccccaggcaccagcaccgagcctagtgagcaggagattaaacggatcaacaagatcagaagaagacttgtgaaagacagcaacaccaagaaggccggcaagacaggccccatgaaaaccctgctggttagagtgatgacacccgatctgagagagcggctggaaaacctgagaaagaagcctgaaaatatcccccagcccatcagcaatacatctagagccaacctgaataagctgctgaccgattacaccgaaatgaagaaggcgatcctgcatgtgtactgggaagagttccagaaggaccctgtgggcctgatgagccgggtggcccagcctgccagcaagaagatcgatcagaacaagctgaaacctgagatggacgagaagggcaacctgaccaccgccggctttgcctgctctcagtgtggccagcccctgttcgtgtacaagctggagcaggtgtctgagaagggcaaggcttacaccaactacttcggacggtgcaatgtggccgagcacgaaaagctgatcctgctggcccagctgaagcccgagaaggatagcgacgaagccgtgacatatagcctgggaaagtttgggcagagggccctggatttctacagcattcatgtgaccaaggagtccacccaccccgtgaagcccctggcccagatcgccggaaacagatacgcctccggacctgtgggaaaggccctgagcgacgcatgtatgggcacaatcgcctccttcctgtctaagtaccaggacatcatcatcgaacaccagaaggtggtgaagggcaaccagaagagactggagagcctgcgggagctggccggcaaggaaaacctggaataccctagcgtgaccctgccacctcagcctcacaccaaggagggcgttgatgcctacaacgaagtgatcgcccgggtgcgaatgtgggtgaacctgaacctgtggcagaagctgaagctaagcagagatgatgccaagcctctgctgagactgaagggattcccttcctttcctctggtcgagagacaggccaacgaagtggactggtgggacatggtgtgtaacgtgaagaagctgatcaacgagaaaaaggaggatggcaaggtgttttggcagaatctggctggctacaagagacaggaagccctgagaccatacctgagcagcgaggaagatcggaagaagggaaagaaattcgctcggtaccagctgggcgacctgctgctgcacctggaaaagaagcacggcgaggactggggaaaggtgtacgacgaggcctgggagcggattgacaagaaagtggaaggcctgagcaagcacatcaagctggaagaggaacggagaagcgaggacgcccagagcaaggccgccctgaccgactggctgcgggctaaggccagcttcgtgatcgagggcctgaaggaggccgacaaggacgagttctgcagatgcgagctgaagctgcagaagtggtacggggacctgcggggaaagcccttcgccatcgaagccgagaacagcatcctggacatcagcggcttcagcaagcagtacaactgtgccttcatctggcagaaggacggcgtgaagaagctgaacctgtacctgatcatcaactacttcaagggcggcaagctgcggttcaagaagatcaaacctgaagccttcgaagccaacagattctacaccgtgatcaacaaaaagagcggcgagatcgtgcccatggaggtgaacttcaacttcgacgaccccaacctgatcatcctgcctctggcctttggcaagagacagggcagagaattcatctggaacgacctgctgtccctggaaaccggcagcctgaagctggccaacggaagagtgatcgagaagacactgtacaacagaagaacccggcaggatgagcctgccctgttcgtggccctgaccttcgagcggcgggaggtcctggactcctccaatatcaaaccaatgaacctgatcggcgtggcaagaggcgaaaacatccccgccgtgatcgccctgaccgaccccgagggctgcccactgagccggtttaaggatagcctgggaaacccaacccacatcctgagaatcggcgagagctataaggagaagcagcggaccatccaggccaagaaggaggtggagcagcggagagccggcggctacagccggaagtacgccagcaaagccaagaatctggcagacgatatggtgagaaacaccgctagagatctgctgtactacgccgtgacccaggatgccatgctgatcttcgccaacctgagccggggcttcggccggcagggcaagcggaccttcatggccgagagacagtacacacggatggaggactggctgaccgccaagctggcctacgagggcctgagcaagacctacctgtccaagacactggcccagtacacctccaagacatgcagcaactgtgggtttaccatcaccagcgccgactacgacagggtgctggagaagctgaagaagacagcaacaggctggatgaccacaattaacggcaaggagctgaaggtggagggccagattacctactacaacagatacaagagacagaacgtagtcaaggacctgtccgtcgagctggatagactgagcgaagaatctgtgaacaacgacatctcctcctggacaaagggcagaagcggagaagctctgagcctcctgaagaaaagattctcccatagacccgtgcaggagaagttcgtgtgcctgaactgcggcttcgagacacacgcagccgagcaagccgccctgaacatcgccagatcctggctgttcctgcggagccaggagtacaagaaataccagacaaacaagacaaccggcaacaccgataagagagccttcgtcgagacctggcagtccttttaccggaagaagcttaaggaggtgtggaaacctgccgtgcggtctggcggatctggcggaggctccctgcaggacagcgtgaccttcaaggacgtggccgtggacttcagccaggaggagtgggagaggctgaaccccgcccagaggagcctgtacaggaccgtggtgctggagaactactggaacctggtgagcgtgggcgcctgcgtgagcaagagccacctgatcagcctgctggagcacggcaaggccccctgggacatgaggggcgaggtgaccgagagcaccagccaggacggcgagagcgtgggcggcccaagcagcggcgcccctcctcccagcggcggcagcccagccggctccccaacctctaccgaggagggcacctctgagtccgccacccccgagagcggccctggcacctccaccgagcccagcgagggcagcgcacccggcagccctgccggcagccccacctccacagaggagggaaccagcaccgagcccagcgaaggcagcgccccaggcaccagcaccgagcctagtgagcaggagattaaacggatcaacaagatcagaagaagacttgtgaaagacagcaacaccaagaaggccggcaagacaggccccatgaaaaccctgctggttagagtgatgacacccgatctgagagagcggctggaaaacctgagaaagaagcctgaaaatatcccccagcccatcagcaatacatctagagccaacctgaataagctgctgaccgattacaccgaaatgaagaaggcgatcctgcatgtgtactgggaagagttccagaaggaccctgtgggcctgatgagccgggtggcccagcctgccagcaagaagatcgatcagaacaagctgaaacctgagatggacgagaagggcaacctgaccaccgccggctttgcctgctctcagtgtggccagcccctgttcgtgtacaagctggagcaggtgtctgagaagggcaaggcttacaccaactacttcggacggtgcaatgtggccgagcacgaaaagctgatcctgctggcccagctgaagcccgagaaggatagcgacgaagccgtgacatatagcctgggaaagtttgggcagagggccctggatttctacagcattcatgtgaccaaggagtccacccaccccgtgaagcccctggcccagatcgccggaaacagatacgcctccggacctgtgggaaaggccctgagcgacgcatgtatgggcacaatcgcctccttcctgtctaagtaccaggacatcatcatcgaacaccagaaggtggtgaagggcaaccagaagagactggagagcctgcgggagctggccggcaaggaaaacctggaataccctagcgtgaccctgccacctcagcctcacaccaaggagggcgttgatgcctacaacgaagtgatcgcccgggtgcgaatgtgggtgaacctgaacctgtggcagaagctgaagctaagcagagatgatgccaagcctctgctgagactgaagggattcccttcctttcctctggtcgagagacaggccaacgaagtggactggtgggacatggtgtgtaacgtgaagaagctgatcaacgagaaaaaggaggatggcaaggtgttttggcagaatctggctggctacaagagacaggaagccctgagaccatacctgagcagcgaggaagatcggaagaagggaaagaaattcgctcggtaccagctgggcgacctgctgctgcacctggaaaagaagcacggcgaggactggggaaaggtgtacgacgaggcctgggagcggattgacaagaaagtggaaggcctgagcaagcacatcaagctggaagaggaacggagaagcgaggacgcccagagcaaggccgccctgaccgactggctgcgggctaaggccagcttcgtgatcgagggcctgaaggaggccgacaaggacgagttctgcagatgcgagctgaagctgcagaagtggtacggggacctgcggggaaagcccttcgccatcgaagccgagaacagcatcctggacatcagcggcttcagcaagcagtacaactgtgccttcatctggcagaaggacggcgtgaagaagctgaacctgtacctgatcatcaactacttcaagggcggcaagctgcggttcaagaagatcaaacctgaagccttcgaagccaacagattctacaccgtgatcaacaaaaagagcggcgagatcgtgcccatggaggtgaacttcaacttcgacgaccccaacctgatcatcctgcctctggcctttggcaagagacagggcagagaattcatctggaacgacctgctgtccctggaaaccggcagcctgaagctggccaacggaagagtgatcgagaagacactgtacaacagaagaacccggcaggatgagcctgccctgttcgtggccctgaccttcgagcggcgggaggtcctggactcctccaatatcaaaccaatgaacctgatcggcgtggcaagaggcgaaaacatccccgccgtgatcgccctgaccgaccccgagggctgcccactgagccggtttaaggatagcctgggaaacccaacccacatcctgagaatcggcgagagctataaggagaagcagcggaccatccaggccaagaaggaggtggagcagcggagagccggcggctacagccggaagtacgccagcaaagccaagaatctggcagacgatatggtgagaaacaccgctagagatctgctgtactacgccgtgacccaggatgccatgctgatcttcgccaacctgagccggggcttcggccggcagggcaagcggaccttcatggccgagagacagtacacacggatggaggactggctgaccgccaagctggcctacgagggcctgagcaagacctacctgtccaagacactggcccagtacacctccaagacatgcagcaactgtgggtttaccatcaccagcgccgactacgacagggtgctggagaagctgaagaagacagcaacaggctggatgaccacaattaacggcaaggagctgaaggtggagggccagattacctactacaacagatacaagagacagaacgtagtcaaggacctgtccgtcgagctggatagactgagcgaagaatctgtgaacaacgacatctcctcctggacaaagggcagaagcggagaagctctgagcctcctgaagaaaagattctcccatagacccgtgcaggagaagttcgtgtgcctgaactgcggcttcgagacacacgcagccgagcaagccgccctgaacatcgccagatcctggctgttcctgcggagccaggagtacaagaaataccagacaaacaagacaaccggcaacaccgataagagagccttcgtcgagacctggcagtccttttaccggaagaagcttaaggaggtgtggaaacctgccgtgcggtctggcggatctggcggaggctcctctgcaggacagcgtgaccttcaaggacgtggccgtggacttcagccaggaggagtgggagaggctgaaccccgcccagaggagcctgtacaggaccgtggtgctggagaactactggaacctggtgagcgtgggcgcctgcgtgagcaagagccacctgatcagcctgctggagcacggcaaggccccctgggacatgaggggcgaggtgaccgagagcaccagccaggacggcgagagcgtgggatctggctccggcagcggccccaagaaaaagagaaaagtctaagctgccttctgcggggcttgccttctggccatgcccttcttctctcccttgcacctgtacctcttggtctttgaataaagcctgagtaggaaggctagcaaaaaaaaaaaaaaaaaaaaaaaaaaaaaaaaaaaaaaaaaaaaaaaaaaaaaaaaaaaaaaaaaaaaaaaaaaaaaaaa

SEQ ID NO: 16514 - RNA, 9485 nt, synthetic construct
  source 1..9485: mol_type = other RNA
aggaaataagagagaaaagaagagtaagaagaaatataagagccaccatggcccctaagaagaagcgtaaagtgagccggatggaacgcctcgtctacgaggtgcggcagaagtgcagaaacatcgaggacatctgcatctcctgcggatctctgaacgtgaccctggagcacccactgttcatcggcggcatgtgccagaactgtaaaaactgttttctggagtgtgcctatcaatacgacgatgacggctaccagagctactgcaccatctgttgcggcggaagagaggtgctgatgtgtggaaataacaactgctgccggtgcttctgcgtggaatgcgtggacctgctggtgggccccggcgccgcccaggccgctattaaggaagatccttggaactgctacatgtgcggccacaagggcacatacggcctgctgagacggagagaggactggcctagcagactgcagatgttcttcgccaataaccacgaccaggagttcgacccccctaaggtgtaccctcccgtccccgccgagaagagaaagcccatccgggtcctgagcctgttcgatggcatcgccaccggtctgctggtgctgaaggacctgggcatccaggtggataggtacattgcctccgaggtgtgcgaggactccatcaccgtgggaatggtgcgtcatcagggcaagatcatgtacgtgggcgacgtgcggagcgtgacacagaagcatatccaggagtggggccctttcgacctggtgatcggcggcagcccttgcaatgacctgagcatcgtgaacccagcccggaagggcctgtacgagggaaccggcagactgttcttcgagttttacagactgctgcacgacgcccggcctaaggaaggcgacgaccggcccttcttttggctgttcgagaatgtggtggccatgggagtcagcgacaagcgggatattagccggttcctggagagcaaccccgtgatgatcgatgccaaggaagtgagcgccgcccaccgggccagatacttctggggcaatctgcctggcatgaacagacccctggccagcaccgtgaacgacaagctggagctgcaggagtgcctggagcacggccggatcgccaagttcagcaaggtgagaaccatcaccacccgaagcaacagcatcaaacaaggcaaggaccagcactttcctgtgttcatgaacgagaaggaggacatcctgtggtgtaccgagatggagagagtgttcgggttcccagtccactacacagatgtcagcaacatgtctagactggccagacagagactgctgggaagaagctggtccgtccctgtgatcagacacctgttcgcccctctgaaggagtacttcgcctgcgtgagcagcggcaacagcaacgccaacagccggggccccagcttctctagcggcctggtgccactgtccctgagagggagccacatgggccccatggagatctacaaaaccgtgagcgcctggaagcggcagcctgtgcgcgtgctgagcctgtttcggaatatcgataaagtcctgaaaagcctgggattcctggagagcggctctggctccggcggtggcaccctgaagtacgtggaggatgtgacaaacgtggtcagacgggatgtggagaagtggggccccttcgatctggtgtacggcagcacccaacccctgggcagctcttgtgaccggtgccctggctggtacatgtttcagttccaccggatcctgcagtacgccctgccgagacaggagtcccagcggccattcttttggattttcatggacaacttgctgctgaccgaggatgaccaggaaactaccactcggttcctgcagaccgaagccgtgaccctgcaggacgtgagaggccgggactaccagaacgccatgcgggtgtggtccaacatccctggactgaaaagcaagcacgcacctctgacccctaaagaagaggagtacctgcaggcccaggtgcggagcagaagcaagctggacgcccctaaggtggatctgctggtgaagaattgcctcctgcccctgagagagtacttcaagtatttcagccagaatagtctgcccctgggaggcagcggcggcggcgccctggtgacatttgaggacgtcgccgtgcggttcacccaggaggaatgggctctgctggatccttctcagaaaatcctgtaccgggacgtgatgagagagacataccggaatctgacctccgtgggcatcaactgggaatgttgggaccttgaagcctgcttcagaagcctgggaagaaacctgagagtgcaggtggtgaagagaaagtgcgagctgaccaacagcggcccctgcgccgagggcggcccaagcagcggcgcccctcctcccagcggcggcagcccagccggctccccaacctctaccgaggagggcacctctgagtccgccacccccgagagcggccctggcacctccaccgagcccagcgagggcagcgcacccggcagccctgccggcagccccacctccacagaggagggaaccagcaccgagcccagcgaaggcagcgccccaggcaccagcaccgagcctagtgagcaggagattaaacggatcaacaagatcagaagaagacttgtgaaagacagcaacaccaagaaggccggcaagacaggccccatgaaaaccctgctggttagagtgatgacacccgatctgagagagcggctggaaaacctgagaaagaagcctgaaaatatcccccagcccatcagcaatacatctagagccaacctgaataagctgctgaccgattacaccgaaatgaagaaggcgatcctgcatgtgtactgggaagagttccagaaggaccctgtgggcctgatgagccgggtggcccagcctgccagcaagaagatcgatcagaacaagctgaaacctgagatggacgagaagggcaacctgaccaccgccggctttgcctgctctcagtgtggccagcccctgttcgtgtacaagctggagcaggtgtctgagaagggcaaggcttacaccaactacttcggacggtgcaatgtggccgagcacgaaaagctgatcctgctggcccagctgaagcccgagaaggatagcgacgaagccgtgacatatagcctgggaaagtttgggcagagggccctggatttctacagcattcatgtgaccaaggagtccacccaccccgtgaagcccctggcccagatcgccggaaacagatacgcctccggacctgtgggaaaggccctgagcgacgcatgtatgggcacaatcgcctccttcctgtctaagtaccaggacatcatcatcgaacaccagaaggtggtgaagggcaaccagaagagactggagagcctgcgggagctggccggcaaggaaaacctggaataccctagcgtgaccctgccacctcagcctcacaccaaggagggcgttgatgcctacaacgaagtgatcgcccgggtgcgaatgtgggtgaacctgaacctgtggcagaagctgaagctaagcagagatgatgccaagcctctgctgagactgaagggattcccttcctttcctctggtcgagagacaggccaacgaagtggactggtgggacatggtgtgtaacgtgaagaagctgatcaacgagaaaaaggaggatggcaaggtgttttggcagaatctggctggctacaagagacaggaagccctgagaccatacctgagcagcgaggaagatcggaagaagggaaagaaattcgctcggtaccagctgggcgacctgctgctgcacctggaaaagaagcacggcgaggactggggaaaggtgtacgacgaggcctgggagcggattgacaagaaagtggaaggcctgagcaagcacatcaagctggaagaggaacggagaagcgaggacgcccagagcaaggccgccctgaccgactggctgcgggctaaggccagcttcgtgatcgagggcctgaaggaggccgacaaggacgagttctgcagatgcgagctgaagctgcagaagtggtacggggacctgcggggaaagcccttcgccatcgaagccgagaacagcatcctggacatcagcggcttcagcaagcagtacaactgtgccttcatctggcagaaggacggcgtgaagaagctgaacctgtacctgatcatcaactacttcaagggcggcaagctgcggttcaagaagatcaaacctgaagccttcgaagccaacagattctacaccgtgatcaacaaaaagagcggcgagatcgtgcccatggaggtgaacttcaacttcgacgaccccaacctgatcatcctgcctctggcctttggcaagagacagggcagagaattcatctggaacgacctgctgtccctggaaaccggcagcctgaagctggccaacggaagagtgatcgagaagacactgtacaacagaagaacccggcaggatgagcctgccctgttcgtggccctgaccttcgagcggcgggaggtcctggactcctccaatatcaaaccaatgaacctgatcggcgtggcaagaggcgaaaacatccccgccgtgatcgccctgaccgaccccgagggctgcccactgagccggtttaaggatagcctgggaaacccaacccacatcctgagaatcggcgagagctataaggagaagcagcggaccatccaggccaagaaggaggtggagcagcggagagccggcggctacagccggaagtacgccagcaaagccaagaatctggcagacgatatggtgagaaacaccgctagagatctgctgtactacgccgtgacccaggatgccatgctgatcttcgccaacctgagccggggcttcggccggcagggcaagcggaccttcatggccgagagacagtacacacggatggaggactggctgaccgccaagctggcctacgagggcctgagcaagacctacctgtccaagacactggcccagtacacctccaagacatgcagcaactgtgggtttaccatcaccagcgccgactacgacagggtgctggagaagctgaagaagacagcaacaggctggatgaccacaattaacggcaaggagctgaaggtggagggccagattacctactacaacagatacaagagacagaacgtagtcaaggacctgtccgtcgagctggatagactgagcgaagaatctgtgaacaacgacatctcctcctggacaaagggcagaagcggagaagctctgagcctcctgaagaaaagattctcccatagacccgtgcaggagaagttcgtgtgcctgaactgcggcttcgagacacacgcagccgagcaagccgccctgaacatcgccagatcctggctgttcctgcggagccaggagtacaagaaataccagacaaacaagacaaccggcaacaccgataagagagccttcgtcgagacctggcagtccttttaccggaagaagcttaaggaggtgtggaaacctgccgtgcggtctggcggatctggcggaggctccccccaggagagcgtgaccttcgaggacgtggccgtgtacttcacccagaaggagtgggagggcctggcccccgcccagagggccctgtacagggacgtgatgctggagaactacggcaacctggtgagcctggccttcctgttccccaagcccgccgtgatcagccagctggagcagggcgagaagccctggatccagaccccccagaggcccctggacaagaagaagacctacaagggctgcggcggcccaagcagcggcgcccctcctcccagcggcggcagcccagccggctccccaacctctaccgaggagggcacctctgagtccgccacccccgagagcggccctggcacctccaccgagcccagcgagggcagcgcacccggcagccctgccggcagccccacctccacagaggagggaaccagcaccgagcccagcgaaggcagcgccccaggcaccagcaccgagcctagtgagcaggagattaaacggatcaacaagatcagaagaagacttgtgaaagacagcaacaccaagaaggccggcaagacaggccccatgaaaaccctgctggttagagtgatgacacccgatctgagagagcggctggaaaacctgagaaagaagcctgaaaatatcccccagcccatcagcaatacatctagagccaacctgaataagctgctgaccgattacaccgaaatgaagaaggcgatcctgcatgtgtactgggaagagttccagaaggaccctgtgggcctgatgagccgggtggcccagcctgccagcaagaagatcgatcagaacaagctgaaacctgagatggacgagaagggcaacctgaccaccgccggctttgcctgctctcagtgtggccagcccctgttcgtgtacaagctggagcaggtgtctgagaagggcaaggcttacaccaactacttcggacggtgcaatgtggccgagcacgaaaagctgatcctgctggcccagctgaagcccgagaaggatagcgacgaagccgtgacatatagcctgggaaagtttgggcagagggccctggatttctacagcattcatgtgaccaaggagtccacccaccccgtgaagcccctggcccagatcgccggaaacagatacgcctccggacctgtgggaaaggccctgagcgacgcatgtatgggcacaatcgcctccttcctgtctaagtaccaggacatcatcatcgaacaccagaaggtggtgaagggcaaccagaagagactggagagcctgcgggagctggccggcaaggaaaacctggaataccctagcgtgaccctgccacctcagcctcacaccaaggagggcgttgatgcctacaacgaagtgatcgcccgggtgcgaatgtgggtgaacctgaacctgtggcagaagctgaagctaagcagagatgatgccaagcctctgctgagactgaagggattcccttcctttcctctggtcgagagacaggccaacgaagtggactggtgggacatggtgtgtaacgtgaagaagctgatcaacgagaaaaaggaggatggcaaggtgttttggcagaatctggctggctacaagagacaggaagccctgagaccatacctgagcagcgaggaagatcggaagaagggaaagaaattcgctcggtaccagctgggcgacctgctgctgcacctggaaaagaagcacggcgaggactggggaaaggtgtacgacgaggcctgggagcggattgacaagaaagtggaaggcctgagcaagcacatcaagctggaagaggaacggagaagcgaggacgcccagagcaaggccgccctgaccgactggctgcgggctaaggccagcttcgtgatcgagggcctgaaggaggccgacaaggacgagttctgcagatgcgagctgaagctgcagaagtggtacggggacctgcggggaaagcccttcgccatcgaagccgagaacagcatcctggacatcagcggcttcagcaagcagtacaactgtgccttcatctggcagaaggacggcgtgaagaagctgaacctgtacctgatcatcaactacttcaagggcggcaagctgcggttcaagaagatcaaacctgaagccttcgaagccaacagattctacaccgtgatcaacaaaaagagcggcgagatcgtgcccatggaggtgaacttcaacttcgacgaccccaacctgatcatcctgcctctggcctttggcaagagacagggcagagaattcatctggaacgacctgctgtccctggaaaccggcagcctgaagctggccaacggaagagtgatcgagaagacactgtacaacagaagaacccggcaggatgagcctgccctgttcgtggccctgaccttcgagcggcgggaggtcctggactcctccaatatcaaaccaatgaacctgatcggcgtggcaagaggcgaaaacatccccgccgtgatcgccctgaccgaccccgagggctgcccactgagccggtttaaggatagcctgggaaacccaacccacatcctgagaatcggcgagagctataaggagaagcagcggaccatccaggccaagaaggaggtggagcagcggagagccggcggctacagccggaagtacgccagcaaagccaagaatctggcagacgatatggtgagaaacaccgctagagatctgctgtactacgccgtgacccaggatgccatgctgatcttcgccaacctgagccggggcttcggccggcagggcaagcggaccttcatggccgagagacagtacacacggatggaggactggctgaccgccaagctggcctacgagggcctgagcaagacctacctgtccaagacactggcccagtacacctccaagacatgcagcaactgtgggtttaccatcaccagcgccgactacgacagggtgctggagaagctgaagaagacagcaacaggctggatgaccacaattaacggcaaggagctgaaggtggagggccagattacctactacaacagatacaagagacagaacgtagtcaaggacctgtccgtcgagctggatagactgagcgaagaatctgtgaacaacgacatctcctcctggacaaagggcagaagcggagaagctctgagcctcctgaagaaaagattctcccatagacccgtgcaggagaagttcgtgtgcctgaactgcggcttcgagacacacgcagccgagcaagccgccctgaacatcgccagatcctggctgttcctgcggagccaggagtacaagaaataccagacaaacaagacaaccggcaacaccgataagagagccttcgtcgagacctggcagtccttttaccggaagaagcttaaggaggtgtggaaacctgccgtgcggtctggcggatctggcggaggctcctccccaggagagcgtgaccttcgaggacgtggccgtgtacttcacccagaaggagtgggagggcctggcccccgcccagagggccctgtacagggacgtgatgctggagaactacggcaacctggtgagcctggccttcctgttccccaagcccgccgtgatcagccagctggagcagggcgagaagccctggatccagaccccccagaggcccctggacaagaagaagacctacaagggctgcggatctggctccggcagcggccccaagaaaaagagaaaagtctaagctgccttctgcggggcttgccttctggccatgcccttcttctctcccttgcacctgtacctcttggtctttgaataaagcctgagtaggaaggctagcaaaaaaaaaaaaaaaaaaaaaaaaaaaaaaaaaaaaaaaaaaaaaaaaaaaaaaaaaaaaaaaaaaaaaaaaaaaaaaaa

SEQ ID NO: 16515 - RNA, 9485 nt, synthetic construct
  source 1..9485: mol_type = other RNA
aggaaataagagagaaaagaagagtaagaagaaatataagagccaccatggcccctaagaagaagcgtaaagtgagccggatggaacgcctcgtctacgaggtgcggcagaagtgcagaaacatcgaggacatctgcatctcctgcggatctctgaacgtgaccctggagcacccactgttcatcggcggcatgtgccagaactgtaaaaactgttttctggagtgtgcctatcaatacgacgatgacggctaccagagctactgcaccatctgttgcggcggaagagaggtgctgatgtgtggaaataacaactgctgccggtgcttctgcgtggaatgcgtggacctgctggtgggccccggcgccgcccaggccgctattaaggaagatccttggaactgctacatgtgcggccacaagggcacatacggcctgctgagacggagagaggactggcctagcagactgcagatgttcttcgccaataaccacgaccaggagttcgacccccctaaggtgtaccctcccgtccccgccgagaagagaaagcccatccgggtcctgagcctgttcgatggcatcgccaccggtctgctggtgctgaaggacctgggcatccaggtggataggtacattgcctccgaggtgtgcgaggactccatcaccgtgggaatggtgcgtcatcagggcaagatcatgtacgtgggcgacgtgcggagcgtgacacagaagcatatccaggagtggggccctttcgacctggtgatcggcggcagcccttgcaatgacctgagcatcgtgaacccagcccggaagggcctgtacgagggaaccggcagactgttcttcgagttttacagactgctgcacgacgcccggcctaaggaaggcgacgaccggcccttcttttggctgttcgagaatgtggtggccatgggagtcagcgacaagcgggatattagccggttcctggagagcaaccccgtgatgatcgatgccaaggaagtgagcgccgcccaccgggccagatacttctggggcaatctgcctggcatgaacagacccctggccagcaccgtgaacgacaagctggagctgcaggagtgcctggagcacggccggatcgccaagttcagcaaggtgagaaccatcaccacccgaagcaacagcatcaaacaaggcaaggaccagcactttcctgtgttcatgaacgagaaggaggacatcctgtggtgtaccgagatggagagagtgttcgggttcccagtccactacacagatgtcagcaacatgtctagactggccagacagagactgctgggaagaagctggtccgtccctgtgatcagacacctgttcgcccctctgaaggagtacttcgcctgcgtgagcagcggcaacagcaacgccaacagccggggccccagcttctctagcggcctggtgccactgtccctgagagggagccacatgggccccatggagatctacaaaaccgtgagcgcctggaagcggcagcctgtgcgcgtgctgagcctgtttcggaatatcgataaagtcctgaaaagcctgggattcctggagagcggctctggctccggcggtggcaccctgaagtacgtggaggatgtgacaaacgtggtcagacgggatgtggagaagtggggccccttcgatctggtgtacggcagcacccaacccctgggcagctcttgtgaccggtgccctggctggtacatgtttcagttccaccggatcctgcagtacgccctgccgagacaggagtcccagcggccattcttttggattttcatggacaacttgctgctgaccgaggatgaccaggaaactaccactcggttcctgcagaccgaagccgtgaccctgcaggacgtgagaggccgggactaccagaacgccatgcgggtgtggtccaacatccctggactgaaaagcaagcacgcacctctgacccctaaagaagaggagtacctgcaggcccaggtgcggagcagaagcaagctggacgcccctaaggtggatctgctggtgaagaattgcctcctgcccctgagagagtacttcaagtatttcagccagaatagtctgcccctgggaggcagcggcggcggcgccctggtgacatttgaggacgtcgccgtgcggttcacccaggaggaatgggctctgctggatccttctcagaaaatcctgtaccgggacgtgatgagagagacataccggaatctgacctccgtgggcatcaactgggaatgttgggaccttgaagcctgcttcagaagcctgggaagaaacctgagagtgcaggtggtgaagagaaagtgcgagctgaccaacagcggcccctgcgccgagggcggcccaagcagcggcgcccctcctcccagcggcggcagcccagccggctccccaacctctaccgaggagggcacctctgagtccgccacccccgagagcggccctggcacctccaccgagcccagcgagggcagcgcacccggcagccctgccggcagccccacctccacagaggagggaaccagcaccgagcccagcgaaggcagcgccccaggcaccagcaccgagcctagtgagcaggagattaaacggatcaacaagatcagaagaagacttgtgaaagacagcaacaccaagaaggccggcaagacaggccccatgaaaaccctgctggttagagtgatgacacccgatctgagagagcggctggaaaacctgagaaagaagcctgaaaatatcccccagcccatcagcaatacatctagagccaacctgaataagctgctgaccgattacaccgaaatgaagaaggcgatcctgcatgtgtactgggaagagttccagaaggaccctgtgggcctgatgagccgggtggcccagcctgccagcaagaagatcgatcagaacaagctgaaacctgagatggacgagaagggcaacctgaccaccgccggctttgcctgctctcagtgtggccagcccctgttcgtgtacaagctggagcaggtgtctgagaagggcaaggcttacaccaactacttcggacggtgcaatgtggccgagcacgaaaagctgatcctgctggcccagctgaagcccgagaaggatagcgacgaagccgtgacatatagcctgggaaagtttgggcagagggccctggatttctacagcattcatgtgaccaaggagtccacccaccccgtgaagcccctggcccagatcgccggaaacagatacgcctccggacctgtgggaaaggccctgagcgacgcatgtatgggcacaatcgcctccttcctgtctaagtaccaggacatcatcatcgaacaccagaaggtggtgaagggcaaccagaagagactggagagcctgcgggagctggccggcaaggaaaacctggaataccctagcgtgaccctgccacctcagcctcacaccaaggagggcgttgatgcctacaacgaagtgatcgcccgggtgcgaatgtgggtgaacctgaacctgtggcagaagctgaagctaagcagagatgatgccaagcctctgctgagactgaagggattcccttcctttcctctggtcgagagacaggccaacgaagtggactggtgggacatggtgtgtaacgtgaagaagctgatcaacgagaaaaaggaggatggcaaggtgttttggcagaatctggctggctacaagagacaggaagccctgagaccatacctgagcagcgaggaagatcggaagaagggaaagaaattcgctcggtaccagctgggcgacctgctgctgcacctggaaaagaagcacggcgaggactggggaaaggtgtacgacgaggcctgggagcggattgacaagaaagtggaaggcctgagcaagcacatcaagctggaagaggaacggagaagcgaggacgcccagagcaaggccgccctgaccgactggctgcgggctaaggccagcttcgtgatcgagggcctgaaggaggccgacaaggacgagttctgcagatgcgagctgaagctgcagaagtggtacggggacctgcggggaaagcccttcgccatcgaagccgagaacagcatcctggacatcagcggcttcagcaagcagtacaactgtgccttcatctggcagaaggacggcgtgaagaagctgaacctgtacctgatcatcaactacttcaagggcggcaagctgcggttcaagaagatcaaacctgaagccttcgaagccaacagattctacaccgtgatcaacaaaaagagcggcgagatcgtgcccatggaggtgaacttcaacttcgacgaccccaacctgatcatcctgcctctggcctttggcaagagacagggcagagaattcatctggaacgacctgctgtccctggaaaccggcagcctgaagctggccaacggaagagtgatcgagaagacactgtacaacagaagaacccggcaggatgagcctgccctgttcgtggccctgaccttcgagcggcgggaggtcctggactcctccaatatcaaaccaatgaacctgatcggcgtggcaagaggcgaaaacatccccgccgtgatcgccctgaccgaccccgagggctgcccactgagccggtttaaggatagcctgggaaacccaacccacatcctgagaatcggcgagagctataaggagaagcagcggaccatccaggccaagaaggaggtggagcagcggagagccggcggctacagccggaagtacgccagcaaagccaagaatctggcagacgatatggtgagaaacaccgctagagatctgctgtactacgccgtgacccaggatgccatgctgatcttcgccaacctgagccggggcttcggccggcagggcaagcggaccttcatggccgagagacagtacacacggatggaggactggctgaccgccaagctggcctacgagggcctgagcaagacctacctgtccaagacactggcccagtacacctccaagacatgcagcaactgtgggtttaccatcaccagcgccgactacgacagggtgctggagaagctgaagaagacagcaacaggctggatgaccacaattaacggcaaggagctgaaggtggagggccagattacctactacaacagatacaagagacagaacgtagtcaaggacctgtccgtcgagctggatagactgagcgaagaatctgtgaacaacgacatctcctcctggacaaagggcagaagcggagaagctctgagcctcctgaagaaaagattctcccatagacccgtgcaggagaagttcgtgtgcctgaactgcggcttcgagacacacgcagccgagcaagccgccctgaacatcgccagatcctggctgttcctgcggagccaggagtacaagaaataccagacaaacaagacaaccggcaacaccgataagagagccttcgtcgagacctggcagtccttttaccggaagaagcttaaggaggtgtggaaacctgccgtgcggtctggcggatctggcggaggctccatgcccgccaacgaggacgccccccagcccggcgagcacggcagcgcctgcgaggtgagcgtgagcttcgaggacgtgaccgtggacttcagcagggaggagtggcagcagctggacagcacccagaggaggctgtaccaggacgtgatgctggagaactacagccacctgctgagcgtgggcttcgaggtgcccaagcccgaggtgatcttcaagctggagcagggcgagggcccctggaccggcggcccaagcagcggcgcccctcctcccagcggcggcagcccagccggctccccaacctctaccgaggagggcacctctgagtccgccacccccgagagcggccctggcacctccaccgagcccagcgagggcagcgcacccggcagccctgccggcagccccacctccacagaggagggaaccagcaccgagcccagcgaaggcagcgccccaggcaccagcaccgagcctagtgagcaggagattaaacggatcaacaagatcagaagaagacttgtgaaagacagcaacaccaagaaggccggcaagacaggccccatgaaaaccctgctggttagagtgatgacacccgatctgagagagcggctggaaaacctgagaaagaagcctgaaaatatcccccagcccatcagcaatacatctagagccaacctgaataagctgctgaccgattacaccgaaatgaagaaggcgatcctgcatgtgtactgggaagagttccagaaggaccctgtgggcctgatgagccgggtggcccagcctgccagcaagaagatcgatcagaacaagctgaaacctgagatggacgagaagggcaacctgaccaccgccggctttgcctgctctcagtgtggccagcccctgttcgtgtacaagctggagcaggtgtctgagaagggcaaggcttacaccaactacttcggacggtgcaatgtggccgagcacgaaaagctgatcctgctggcccagctgaagcccgagaaggatagcgacgaagccgtgacatatagcctgggaaagtttgggcagagggccctggatttctacagcattcatgtgaccaaggagtccacccaccccgtgaagcccctggcccagatcgccggaaacagatacgcctccggacctgtgggaaaggccctgagcgacgcatgtatgggcacaatcgcctccttcctgtctaagtaccaggacatcatcatcgaacaccagaaggtggtgaagggcaaccagaagagactggagagcctgcgggagctggccggcaaggaaaacctggaataccctagcgtgaccctgccacctcagcctcacaccaaggagggcgttgatgcctacaacgaagtgatcgcccgggtgcgaatgtgggtgaacctgaacctgtggcagaagctgaagctaagcagagatgatgccaagcctctgctgagactgaagggattcccttcctttcctctggtcgagagacaggccaacgaagtggactggtgggacatggtgtgtaacgtgaagaagctgatcaacgagaaaaaggaggatggcaaggtgttttggcagaatctggctggctacaagagacaggaagccctgagaccatacctgagcagcgaggaagatcggaagaagggaaagaaattcgctcggtaccagctgggcgacctgctgctgcacctggaaaagaagcacggcgaggactggggaaaggtgtacgacgaggcctgggagcggattgacaagaaagtggaaggcctgagcaagcacatcaagctggaagaggaacggagaagcgaggacgcccagagcaaggccgccctgaccgactggctgcgggctaaggccagcttcgtgatcgagggcctgaaggaggccgacaaggacgagttctgcagatgcgagctgaagctgcagaagtggtacggggacctgcggggaaagcccttcgccatcgaagccgagaacagcatcctggacatcagcggcttcagcaagcagtacaactgtgccttcatctggcagaaggacggcgtgaagaagctgaacctgtacctgatcatcaactacttcaagggcggcaagctgcggttcaagaagatcaaacctgaagccttcgaagccaacagattctacaccgtgatcaacaaaaagagcggcgagatcgtgcccatggaggtgaacttcaacttcgacgaccccaacctgatcatcctgcctctggcctttggcaagagacagggcagagaattcatctggaacgacctgctgtccctggaaaccggcagcctgaagctggccaacggaagagtgatcgagaagacactgtacaacagaagaacccggcaggatgagcctgccctgttcgtggccctgaccttcgagcggcgggaggtcctggactcctccaatatcaaaccaatgaacctgatcggcgtggcaagaggcgaaaacatccccgccgtgatcgccctgaccgaccccgagggctgcccactgagccggtttaaggatagcctgggaaacccaacccacatcctgagaatcggcgagagctataaggagaagcagcggaccatccaggccaagaaggaggtggagcagcggagagccggcggctacagccggaagtacgccagcaaagccaagaatctggcagacgatatggtgagaaacaccgctagagatctgctgtactacgccgtgacccaggatgccatgctgatcttcgccaacctgagccggggcttcggccggcagggcaagcggaccttcatggccgagagacagtacacacggatggaggactggctgaccgccaagctggcctacgagggcctgagcaagacctacctgtccaagacactggcccagtacacctccaagacatgcagcaactgtgggtttaccatcaccagcgccgactacgacagggtgctggagaagctgaagaagacagcaacaggctggatgaccacaattaacggcaaggagctgaaggtggagggccagattacctactacaacagatacaagagacagaacgtagtcaaggacctgtccgtcgagctggatagactgagcgaagaatctgtgaacaacgacatctcctcctggacaaagggcagaagcggagaagctctgagcctcctgaagaaaagattctcccatagacccgtgcaggagaagttcgtgtgcctgaactgcggcttcgagacacacgcagccgagcaagccgccctgaacatcgccagatcctggctgttcctgcggagccaggagtacaagaaataccagacaaacaagacaaccggcaacaccgataagagagccttcgtcgagacctggcagtccttttaccggaagaagcttaaggaggtgtggaaacctgccgtgcggtctggcggatctggcggaggctcctatgcccgccaacgaggacgccccccagcccggcgagcacggcagcgcctgcgaggtgagcgtgagcttcgaggacgtgaccgtggacttcagcagggaggagtggcagcagctggacagcacccagaggaggctgtaccaggacgtgatgctggagaactacagccacctgctgagcgtgggcttcgaggtgcccaagcccgaggtgatcttcaagctggagcagggcgagggcccctggaccggatctggctccggcagcggccccaagaaaaagagaaaagtctaagctgccttctgcggggcttgccttctggccatgcccttcttctctcccttgcacctgtacctcttggtctttgaataaagcctgagtaggaaggctagcaaaaaaaaaaaaaaaaaaaaaaaaaaaaaaaaaaaaaaaaaaaaaaaaaaaaaaaaaaaaaaaaaaaaaaaaaaaaaaaa

SEQ ID NO: 16516 - RNA, 9485 nt, synthetic construct
  source 1..9485: mol_type = other RNA
aggaaataagagagaaaagaagagtaagaagaaatataagagccaccatggcccctaagaagaagcgtaaagtgagccggatggaacgcctcgtctacgaggtgcggcagaagtgcagaaacatcgaggacatctgcatctcctgcggatctctgaacgtgaccctggagcacccactgttcatcggcggcatgtgccagaactgtaaaaactgttttctggagtgtgcctatcaatacgacgatgacggctaccagagctactgcaccatctgttgcggcggaagagaggtgctgatgtgtggaaataacaactgctgccggtgcttctgcgtggaatgcgtggacctgctggtgggccccggcgccgcccaggccgctattaaggaagatccttggaactgctacatgtgcggccacaagggcacatacggcctgctgagacggagagaggactggcctagcagactgcagatgttcttcgccaataaccacgaccaggagttcgacccccctaaggtgtaccctcccgtccccgccgagaagagaaagcccatccgggtcctgagcctgttcgatggcatcgccaccggtctgctggtgctgaaggacctgggcatccaggtggataggtacattgcctccgaggtgtgcgaggactccatcaccgtgggaatggtgcgtcatcagggcaagatcatgtacgtgggcgacgtgcggagcgtgacacagaagcatatccaggagtggggccctttcgacctggtgatcggcggcagcccttgcaatgacctgagcatcgtgaacccagcccggaagggcctgtacgagggaaccggcagactgttcttcgagttttacagactgctgcacgacgcccggcctaaggaaggcgacgaccggcccttcttttggctgttcgagaatgtggtggccatgggagtcagcgacaagcgggatattagccggttcctggagagcaaccccgtgatgatcgatgccaaggaagtgagcgccgcccaccgggccagatacttctggggcaatctgcctggcatgaacagacccctggccagcaccgtgaacgacaagctggagctgcaggagtgcctggagcacggccggatcgccaagttcagcaaggtgagaaccatcaccacccgaagcaacagcatcaaacaaggcaaggaccagcactttcctgtgttcatgaacgagaaggaggacatcctgtggtgtaccgagatggagagagtgttcgggttcccagtccactacacagatgtcagcaacatgtctagactggccagacagagactgctgggaagaagctggtccgtccctgtgatcagacacctgttcgcccctctgaaggagtacttcgcctgcgtgagcagcggcaacagcaacgccaacagccggggccccagcttctctagcggcctggtgccactgtccctgagagggagccacatgggccccatggagatctacaaaaccgtgagcgcctggaagcggcagcctgtgcgcgtgctgagcctgtttcggaatatcgataaagtcctgaaaagcctgggattcctggagagcggctctggctccggcggtggcaccctgaagtacgtggaggatgtgacaaacgtggtcagacgggatgtggagaagtggggccccttcgatctggtgtacggcagcacccaacccctgggcagctcttgtgaccggtgccctggctggtacatgtttcagttccaccggatcctgcagtacgccctgccgagacaggagtcccagcggccattcttttggattttcatggacaacttgctgctgaccgaggatgaccaggaaactaccactcggttcctgcagaccgaagccgtgaccctgcaggacgtgagaggccgggactaccagaacgccatgcgggtgtggtccaacatccctggactgaaaagcaagcacgcacctctgacccctaaagaagaggagtacctgcaggcccaggtgcggagcagaagcaagctggacgcccctaaggtggatctgctggtgaagaattgcctcctgcccctgagagagtacttcaagtatttcagccagaatagtctgcccctgggaggcagcggcggcggcgccctggtgacatttgaggacgtcgccgtgcggttcacccaggaggaatgggctctgctggatccttctcagaaaatcctgtaccgggacgtgatgagagagacataccggaatctgacctccgtgggcatcaactgggaatgttgggaccttgaagcctgcttcagaagcctgggaagaaacctgagagtgcaggtggtgaagagaaagtgcgagctgaccaacagcggcccctgcgccgagggcggcccaagcagcggcgcccctcctcccagcggcggcagcccagccggctccccaacctctaccgaggagggcacctctgagtccgccacccccgagagcggccctggcacctccaccgagcccagcgagggcagcgcacccggcagccctgccggcagccccacctccacagaggagggaaccagcaccgagcccagcgaaggcagcgccccaggcaccagcaccgagcctagtgagcaggagattaaacggatcaacaagatcagaagaagacttgtgaaagacagcaacaccaagaaggccggcaagacaggccccatgaaaaccctgctggttagagtgatgacacccgatctgagagagcggctggaaaacctgagaaagaagcctgaaaatatcccccagcccatcagcaatacatctagagccaacctgaataagctgctgaccgattacaccgaaatgaagaaggcgatcctgcatgtgtactgggaagagttccagaaggaccctgtgggcctgatgagccgggtggcccagcctgccagcaagaagatcgatcagaacaagctgaaacctgagatggacgagaagggcaacctgaccaccgccggctttgcctgctctcagtgtggccagcccctgttcgtgtacaagctggagcaggtgtctgagaagggcaaggcttacaccaactacttcggacggtgcaatgtggccgagcacgaaaagctgatcctgctggcccagctgaagcccgagaaggatagcgacgaagccgtgacatatagcctgggaaagtttgggcagagggccctggatttctacagcattcatgtgaccaaggagtccacccaccccgtgaagcccctggcccagatcgccggaaacagatacgcctccggacctgtgggaaaggccctgagcgacgcatgtatgggcacaatcgcctccttcctgtctaagtaccaggacatcatcatcgaacaccagaaggtggtgaagggcaaccagaagagactggagagcctgcgggagctggccggcaaggaaaacctggaataccctagcgtgaccctgccacctcagcctcacaccaaggagggcgttgatgcctacaacgaagtgatcgcccgggtgcgaatgtgggtgaacctgaacctgtggcagaagctgaagctaagcagagatgatgccaagcctctgctgagactgaagggattcccttcctttcctctggtcgagagacaggccaacgaagtggactggtgggacatggtgtgtaacgtgaagaagctgatcaacgagaaaaaggaggatggcaaggtgttttggcagaatctggctggctacaagagacaggaagccctgagaccatacctgagcagcgaggaagatcggaagaagggaaagaaattcgctcggtaccagctgggcgacctgctgctgcacctggaaaagaagcacggcgaggactggggaaaggtgtacgacgaggcctgggagcggattgacaagaaagtggaaggcctgagcaagcacatcaagctggaagaggaacggagaagcgaggacgcccagagcaaggccgccctgaccgactggctgcgggctaaggccagcttcgtgatcgagggcctgaaggaggccgacaaggacgagttctgcagatgcgagctgaagctgcagaagtggtacggggacctgcggggaaagcccttcgccatcgaagccgagaacagcatcctggacatcagcggcttcagcaagcagtacaactgtgccttcatctggcagaaggacggcgtgaagaagctgaacctgtacctgatcatcaactacttcaagggcggcaagctgcggttcaagaagatcaaacctgaagccttcgaagccaacagattctacaccgtgatcaacaaaaagagcggcgagatcgtgcccatggaggtgaacttcaacttcgacgaccccaacctgatcatcctgcctctggcctttggcaagagacagggcagagaattcatctggaacgacctgctgtccctggaaaccggcagcctgaagctggccaacggaagagtgatcgagaagacactgtacaacagaagaacccggcaggatgagcctgccctgttcgtggccctgaccttcgagcggcgggaggtcctggactcctccaatatcaaaccaatgaacctgatcggcgtggcaagaggcgaaaacatccccgccgtgatcgccctgaccgaccccgagggctgcccactgagccggtttaaggatagcctgggaaacccaacccacatcctgagaatcggcgagagctataaggagaagcagcggaccatccaggccaagaaggaggtggagcagcggagagccggcggctacagccggaagtacgccagcaaagccaagaatctggcagacgatatggtgagaaacaccgctagagatctgctgtactacgccgtgacccaggatgccatgctgatcttcgccaacctgagccggggcttcggccggcagggcaagcggaccttcatggccgagagacagtacacacggatggaggactggctgaccgccaagctggcctacgagggcctgagcaagacctacctgtccaagacactggcccagtacacctccaagacatgcagcaactgtgggtttaccatcaccagcgccgactacgacagggtgctggagaagctgaagaagacagcaacaggctggatgaccacaattaacggcaaggagctgaaggtggagggccagattacctactacaacagatacaagagacagaacgtagtcaaggacctgtccgtcgagctggatagactgagcgaagaatctgtgaacaacgacatctcctcctggacaaagggcagaagcggagaagctctgagcctcctgaagaaaagattctcccatagacccgtgcaggagaagttcgtgtgcctgaactgcggcttcgagacacacgcagccgagcaagccgccctgaacatcgccagatcctggctgttcctgcggagccaggagtacaagaaataccagacaaacaagacaaccggcaacaccgataagagagccttcgtcgagacctggcagtccttttaccggaagaagcttaaggaggtgtggaaacctgccgtgcggtctggcggatctggcggaggctccgcccaggaggccgtgaccttcaaggacgtggccgtggacttcaccagggaggagtggaggctgctgagccccccccagaaggagctgtacaaggaggtgatgctggagaacgcccagaacctgctgaccgtgggcctgcccgccccccccgagaacgtgatcagcgccctgggcgccgagggcagccccgtggacgccaggggcaggaggcccgagggcgcctgctgccccggcgagatcatcggcggcccaagcagcggcgcccctcctcccagcggcggcagcccagccggctccccaacctctaccgaggagggcacctctgagtccgccacccccgagagcggccctggcacctccaccgagcccagcgagggcagcgcacccggcagccctgccggcagccccacctccacagaggagggaaccagcaccgagcccagcgaaggcagcgccccaggcaccagcaccgagcctagtgagcaggagattaaacggatcaacaagatcagaagaagacttgtgaaagacagcaacaccaagaaggccggcaagacaggccccatgaaaaccctgctggttagagtgatgacacccgatctgagagagcggctggaaaacctgagaaagaagcctgaaaatatcccccagcccatcagcaatacatctagagccaacctgaataagctgctgaccgattacaccgaaatgaagaaggcgatcctgcatgtgtactgggaagagttccagaaggaccctgtgggcctgatgagccgggtggcccagcctgccagcaagaagatcgatcagaacaagctgaaacctgagatggacgagaagggcaacctgaccaccgccggctttgcctgctctcagtgtggccagcccctgttcgtgtacaagctggagcaggtgtctgagaagggcaaggcttacaccaactacttcggacggtgcaatgtggccgagcacgaaaagctgatcctgctggcccagctgaagcccgagaaggatagcgacgaagccgtgacatatagcctgggaaagtttgggcagagggccctggatttctacagcattcatgtgaccaaggagtccacccaccccgtgaagcccctggcccagatcgccggaaacagatacgcctccggacctgtgggaaaggccctgagcgacgcatgtatgggcacaatcgcctccttcctgtctaagtaccaggacatcatcatcgaacaccagaaggtggtgaagggcaaccagaagagactggagagcctgcgggagctggccggcaaggaaaacctggaataccctagcgtgaccctgccacctcagcctcacaccaaggagggcgttgatgcctacaacgaagtgatcgcccgggtgcgaatgtgggtgaacctgaacctgtggcagaagctgaagctaagcagagatgatgccaagcctctgctgagactgaagggattcccttcctttcctctggtcgagagacaggccaacgaagtggactggtgggacatggtgtgtaacgtgaagaagctgatcaacgagaaaaaggaggatggcaaggtgttttggcagaatctggctggctacaagagacaggaagccctgagaccatacctgagcagcgaggaagatcggaagaagggaaagaaattcgctcggtaccagctgggcgacctgctgctgcacctggaaaagaagcacggcgaggactggggaaaggtgtacgacgaggcctgggagcggattgacaagaaagtggaaggcctgagcaagcacatcaagctggaagaggaacggagaagcgaggacgcccagagcaaggccgccctgaccgactggctgcgggctaaggccagcttcgtgatcgagggcctgaaggaggccgacaaggacgagttctgcagatgcgagctgaagctgcagaagtggtacggggacctgcggggaaagcccttcgccatcgaagccgagaacagcatcctggacatcagcggcttcagcaagcagtacaactgtgccttcatctggcagaaggacggcgtgaagaagctgaacctgtacctgatcatcaactacttcaagggcggcaagctgcggttcaagaagatcaaacctgaagccttcgaagccaacagattctacaccgtgatcaacaaaaagagcggcgagatcgtgcccatggaggtgaacttcaacttcgacgaccccaacctgatcatcctgcctctggcctttggcaagagacagggcagagaattcatctggaacgacctgctgtccctggaaaccggcagcctgaagctggccaacggaagagtgatcgagaagacactgtacaacagaagaacccggcaggatgagcctgccctgttcgtggccctgaccttcgagcggcgggaggtcctggactcctccaatatcaaaccaatgaacctgatcggcgtggcaagaggcgaaaacatccccgccgtgatcgccctgaccgaccccgagggctgcccactgagccggtttaaggatagcctgggaaacccaacccacatcctgagaatcggcgagagctataaggagaagcagcggaccatccaggccaagaaggaggtggagcagcggagagccggcggctacagccggaagtacgccagcaaagccaagaatctggcagacgatatggtgagaaacaccgctagagatctgctgtactacgccgtgacccaggatgccatgctgatcttcgccaacctgagccggggcttcggccggcagggcaagcggaccttcatggccgagagacagtacacacggatggaggactggctgaccgccaagctggcctacgagggcctgagcaagacctacctgtccaagacactggcccagtacacctccaagacatgcagcaactgtgggtttaccatcaccagcgccgactacgacagggtgctggagaagctgaagaagacagcaacaggctggatgaccacaattaacggcaaggagctgaaggtggagggccagattacctactacaacagatacaagagacagaacgtagtcaaggacctgtccgtcgagctggatagactgagcgaagaatctgtgaacaacgacatctcctcctggacaaagggcagaagcggagaagctctgagcctcctgaagaaaagattctcccatagacccgtgcaggagaagttcgtgtgcctgaactgcggcttcgagacacacgcagccgagcaagccgccctgaacatcgccagatcctggctgttcctgcggagccaggagtacaagaaataccagacaaacaagacaaccggcaacaccgataagagagccttcgtcgagacctggcagtccttttaccggaagaagcttaaggaggtgtggaaacctgccgtgcggtctggcggatctggcggaggctcctgcccaggaggccgtgaccttcaaggacgtggccgtggacttcaccagggaggagtggaggctgctgagccccccccagaaggagctgtacaaggaggtgatgctggagaacgcccagaacctgctgaccgtgggcctgcccgccccccccgagaacgtgatcagcgccctgggcgccgagggcagccccgtggacgccaggggcaggaggcccgagggcgcctgctgccccggcgagatcatcggatctggctccggcagcggccccaagaaaaagagaaaagtctaagctgccttctgcggggcttgccttctggccatgcccttcttctctcccttgcacctgtacctcttggtctttgaataaagcctgagtaggaaggctagcaaaaaaaaaaaaaaaaaaaaaaaaaaaaaaaaaaaaaaaaaaaaaaaaaaaaaaaaaaaaaaaaaaaaaaaaaaaaaaaa

SEQ ID NO: 16517 - RNA, 9485 nt, synthetic construct
  source 1..9485: mol_type = other RNA
aggaaataagagagaaaagaagagtaagaagaaatataagagccaccatggcccctaagaagaagcgtaaagtgagccggatggaacgcctcgtctacgaggtgcggcagaagtgcagaaacatcgaggacatctgcatctcctgcggatctctgaacgtgaccctggagcacccactgttcatcggcggcatgtgccagaactgtaaaaactgttttctggagtgtgcctatcaatacgacgatgacggctaccagagctactgcaccatctgttgcggcggaagagaggtgctgatgtgtggaaataacaactgctgccggtgcttctgcgtggaatgcgtggacctgctggtgggccccggcgccgcccaggccgctattaaggaagatccttggaactgctacatgtgcggccacaagggcacatacggcctgctgagacggagagaggactggcctagcagactgcagatgttcttcgccaataaccacgaccaggagttcgacccccctaaggtgtaccctcccgtccccgccgagaagagaaagcccatccgggtcctgagcctgttcgatggcatcgccaccggtctgctggtgctgaaggacctgggcatccaggtggataggtacattgcctccgaggtgtgcgaggactccatcaccgtgggaatggtgcgtcatcagggcaagatcatgtacgtgggcgacgtgcggagcgtgacacagaagcatatccaggagtggggccctttcgacctggtgatcggcggcagcccttgcaatgacctgagcatcgtgaacccagcccggaagggcctgtacgagggaaccggcagactgttcttcgagttttacagactgctgcacgacgcccggcctaaggaaggcgacgaccggcccttcttttggctgttcgagaatgtggtggccatgggagtcagcgacaagcgggatattagccggttcctggagagcaaccccgtgatgatcgatgccaaggaagtgagcgccgcccaccgggccagatacttctggggcaatctgcctggcatgaacagacccctggccagcaccgtgaacgacaagctggagctgcaggagtgcctggagcacggccggatcgccaagttcagcaaggtgagaaccatcaccacccgaagcaacagcatcaaacaaggcaaggaccagcactttcctgtgttcatgaacgagaaggaggacatcctgtggtgtaccgagatggagagagtgttcgggttcccagtccactacacagatgtcagcaacatgtctagactggccagacagagactgctgggaagaagctggtccgtccctgtgatcagacacctgttcgcccctctgaaggagtacttcgcctgcgtgagcagcggcaacagcaacgccaacagccggggccccagcttctctagcggcctggtgccactgtccctgagagggagccacatgggccccatggagatctacaaaaccgtgagcgcctggaagcggcagcctgtgcgcgtgctgagcctgtttcggaatatcgataaagtcctgaaaagcctgggattcctggagagcggctctggctccggcggtggcaccctgaagtacgtggaggatgtgacaaacgtggtcagacgggatgtggagaagtggggccccttcgatctggtgtacggcagcacccaacccctgggcagctcttgtgaccggtgccctggctggtacatgtttcagttccaccggatcctgcagtacgccctgccgagacaggagtcccagcggccattcttttggattttcatggacaacttgctgctgaccgaggatgaccaggaaactaccactcggttcctgcagaccgaagccgtgaccctgcaggacgtgagaggccgggactaccagaacgccatgcgggtgtggtccaacatccctggactgaaaagcaagcacgcacctctgacccctaaagaagaggagtacctgcaggcccaggtgcggagcagaagcaagctggacgcccctaaggtggatctgctggtgaagaattgcctcctgcccctgagagagtacttcaagtatttcagccagaatagtctgcccctgggaggcagcggcggcggcgccctggtgacatttgaggacgtcgccgtgcggttcacccaggaggaatgggctctgctggatccttctcagaaaatcctgtaccgggacgtgatgagagagacataccggaatctgacctccgtgggcatcaactgggaatgttgggaccttgaagcctgcttcagaagcctgggaagaaacctgagagtgcaggtggtgaagagaaagtgcgagctgaccaacagcggcccctgcgccgagggcggcccaagcagcggcgcccctcctcccagcggcggcagcccagccggctccccaacctctaccgaggagggcacctctgagtccgccacccccgagagcggccctggcacctccaccgagcccagcgagggcagcgcacccggcagccctgccggcagccccacctccacagaggagggaaccagcaccgagcccagcgaaggcagcgccccaggcaccagcaccgagcctagtgagcaggagattaaacggatcaacaagatcagaagaagacttgtgaaagacagcaacaccaagaaggccggcaagacaggccccatgaaaaccctgctggttagagtgatgacacccgatctgagagagcggctggaaaacctgagaaagaagcctgaaaatatcccccagcccatcagcaatacatctagagccaacctgaataagctgctgaccgattacaccgaaatgaagaaggcgatcctgcatgtgtactgggaagagttccagaaggaccctgtgggcctgatgagccgggtggcccagcctgccagcaagaagatcgatcagaacaagctgaaacctgagatggacgagaagggcaacctgaccaccgccggctttgcctgctctcagtgtggccagcccctgttcgtgtacaagctggagcaggtgtctgagaagggcaaggcttacaccaactacttcggacggtgcaatgtggccgagcacgaaaagctgatcctgctggcccagctgaagcccgagaaggatagcgacgaagccgtgacatatagcctgggaaagtttgggcagagggccctggatttctacagcattcatgtgaccaaggagtccacccaccccgtgaagcccctggcccagatcgccggaaacagatacgcctccggacctgtgggaaaggccctgagcgacgcatgtatgggcacaatcgcctccttcctgtctaagtaccaggacatcatcatcgaacaccagaaggtggtgaagggcaaccagaagagactggagagcctgcgggagctggccggcaaggaaaacctggaataccctagcgtgaccctgccacctcagcctcacaccaaggagggcgttgatgcctacaacgaagtgatcgcccgggtgcgaatgtgggtgaacctgaacctgtggcagaagctgaagctaagcagagatgatgccaagcctctgctgagactgaagggattcccttcctttcctctggtcgagagacaggccaacgaagtggactggtgggacatggtgtgtaacgtgaagaagctgatcaacgagaaaaaggaggatggcaaggtgttttggcagaatctggctggctacaagagacaggaagccctgagaccatacctgagcagcgaggaagatcggaagaagggaaagaaattcgctcggtaccagctgggcgacctgctgctgcacctggaaaagaagcacggcgaggactggggaaaggtgtacgacgaggcctgggagcggattgacaagaaagtggaaggcctgagcaagcacatcaagctggaagaggaacggagaagcgaggacgcccagagcaaggccgccctgaccgactggctgcgggctaaggccagcttcgtgatcgagggcctgaaggaggccgacaaggacgagttctgcagatgcgagctgaagctgcagaagtggtacggggacctgcggggaaagcccttcgccatcgaagccgagaacagcatcctggacatcagcggcttcagcaagcagtacaactgtgccttcatctggcagaaggacggcgtgaagaagctgaacctgtacctgatcatcaactacttcaagggcggcaagctgcggttcaagaagatcaaacctgaagccttcgaagccaacagattctacaccgtgatcaacaaaaagagcggcgagatcgtgcccatggaggtgaacttcaacttcgacgaccccaacctgatcatcctgcctctggcctttggcaagagacagggcagagaattcatctggaacgacctgctgtccctggaaaccggcagcctgaagctggccaacggaagagtgatcgagaagacactgtacaacagaagaacccggcaggatgagcctgccctgttcgtggccctgaccttcgagcggcgggaggtcctggactcctccaatatcaaaccaatgaacctgatcggcgtggcaagaggcgaaaacatccccgccgtgatcgccctgaccgaccccgagggctgcccactgagccggtttaaggatagcctgggaaacccaacccacatcctgagaatcggcgagagctataaggagaagcagcggaccatccaggccaagaaggaggtggagcagcggagagccggcggctacagccggaagtacgccagcaaagccaagaatctggcagacgatatggtgagaaacaccgctagagatctgctgtactacgccgtgacccaggatgccatgctgatcttcgccaacctgagccggggcttcggccggcagggcaagcggaccttcatggccgagagacagtacacacggatggaggactggctgaccgccaagctggcctacgagggcctgagcaagacctacctgtccaagacactggcccagtacacctccaagacatgcagcaactgtgggtttaccatcaccagcgccgactacgacagggtgctggagaagctgaagaagacagcaacaggctggatgaccacaattaacggcaaggagctgaaggtggagggccagattacctactacaacagatacaagagacagaacgtagtcaaggacctgtccgtcgagctggatagactgagcgaagaatctgtgaacaacgacatctcctcctggacaaagggcagaagcggagaagctctgagcctcctgaagaaaagattctcccatagacccgtgcaggagaagttcgtgtgcctgaactgcggcttcgagacacacgcagccgagcaagccgccctgaacatcgccagatcctggctgttcctgcggagccaggagtacaagaaataccagacaaacaagacaaccggcaacaccgataagagagccttcgtcgagacctggcagtccttttaccggaagaagcttaaggaggtgtggaaacctgccgtgcggtctggcggatctggcggaggctccttcaaggagctggtggtgttcagggacgtggccgtggagttctgcagggaggagtgggagtgcctggaccccaggcagaggagcctgtacagggacgtgatgctggagacctacggcaacttcgtgagcctgggcctggccatcagcaagcccagcgtgatcagcctgctggagcagggcaaggagccctggatggtggagcaggccggctggtaccccgacctgctgagcgtgaacgagaccggcggcccaagcagcggcgcccctcctcccagcggcggcagcccagccggctccccaacctctaccgaggagggcacctctgagtccgccacccccgagagcggccctggcacctccaccgagcccagcgagggcagcgcacccggcagccctgccggcagccccacctccacagaggagggaaccagcaccgagcccagcgaaggcagcgccccaggcaccagcaccgagcctagtgagcaggagattaaacggatcaacaagatcagaagaagacttgtgaaagacagcaacaccaagaaggccggcaagacaggccccatgaaaaccctgctggttagagtgatgacacccgatctgagagagcggctggaaaacctgagaaagaagcctgaaaatatcccccagcccatcagcaatacatctagagccaacctgaataagctgctgaccgattacaccgaaatgaagaaggcgatcctgcatgtgtactgggaagagttccagaaggaccctgtgggcctgatgagccgggtggcccagcctgccagcaagaagatcgatcagaacaagctgaaacctgagatggacgagaagggcaacctgaccaccgccggctttgcctgctctcagtgtggccagcccctgttcgtgtacaagctggagcaggtgtctgagaagggcaaggcttacaccaactacttcggacggtgcaatgtggccgagcacgaaaagctgatcctgctggcccagctgaagcccgagaaggatagcgacgaagccgtgacatatagcctgggaaagtttgggcagagggccctggatttctacagcattcatgtgaccaaggagtccacccaccccgtgaagcccctggcccagatcgccggaaacagatacgcctccggacctgtgggaaaggccctgagcgacgcatgtatgggcacaatcgcctccttcctgtctaagtaccaggacatcatcatcgaacaccagaaggtggtgaagggcaaccagaagagactggagagcctgcgggagctggccggcaaggaaaacctggaataccctagcgtgaccctgccacctcagcctcacaccaaggagggcgttgatgcctacaacgaagtgatcgcccgggtgcgaatgtgggtgaacctgaacctgtggcagaagctgaagctaagcagagatgatgccaagcctctgctgagactgaagggattcccttcctttcctctggtcgagagacaggccaacgaagtggactggtgggacatggtgtgtaacgtgaagaagctgatcaacgagaaaaaggaggatggcaaggtgttttggcagaatctggctggctacaagagacaggaagccctgagaccatacctgagcagcgaggaagatcggaagaagggaaagaaattcgctcggtaccagctgggcgacctgctgctgcacctggaaaagaagcacggcgaggactggggaaaggtgtacgacgaggcctgggagcggattgacaagaaagtggaaggcctgagcaagcacatcaagctggaagaggaacggagaagcgaggacgcccagagcaaggccgccctgaccgactggctgcgggctaaggccagcttcgtgatcgagggcctgaaggaggccgacaaggacgagttctgcagatgcgagctgaagctgcagaagtggtacggggacctgcggggaaagcccttcgccatcgaagccgagaacagcatcctggacatcagcggcttcagcaagcagtacaactgtgccttcatctggcagaaggacggcgtgaagaagctgaacctgtacctgatcatcaactacttcaagggcggcaagctgcggttcaagaagatcaaacctgaagccttcgaagccaacagattctacaccgtgatcaacaaaaagagcggcgagatcgtgcccatggaggtgaacttcaacttcgacgaccccaacctgatcatcctgcctctggcctttggcaagagacagggcagagaattcatctggaacgacctgctgtccctggaaaccggcagcctgaagctggccaacggaagagtgatcgagaagacactgtacaacagaagaacccggcaggatgagcctgccctgttcgtggccctgaccttcgagcggcgggaggtcctggactcctccaatatcaaaccaatgaacctgatcggcgtggcaagaggcgaaaacatccccgccgtgatcgccctgaccgaccccgagggctgcccactgagccggtttaaggatagcctgggaaacccaacccacatcctgagaatcggcgagagctataaggagaagcagcggaccatccaggccaagaaggaggtggagcagcggagagccggcggctacagccggaagtacgccagcaaagccaagaatctggcagacgatatggtgagaaacaccgctagagatctgctgtactacgccgtgacccaggatgccatgctgatcttcgccaacctgagccggggcttcggccggcagggcaagcggaccttcatggccgagagacagtacacacggatggaggactggctgaccgccaagctggcctacgagggcctgagcaagacctacctgtccaagacactggcccagtacacctccaagacatgcagcaactgtgggtttaccatcaccagcgccgactacgacagggtgctggagaagctgaagaagacagcaacaggctggatgaccacaattaacggcaaggagctgaaggtggagggccagattacctactacaacagatacaagagacagaacgtagtcaaggacctgtccgtcgagctggatagactgagcgaagaatctgtgaacaacgacatctcctcctggacaaagggcagaagcggagaagctctgagcctcctgaagaaaagattctcccatagacccgtgcaggagaagttcgtgtgcctgaactgcggcttcgagacacacgcagccgagcaagccgccctgaacatcgccagatcctggctgttcctgcggagccaggagtacaagaaataccagacaaacaagacaaccggcaacaccgataagagagccttcgtcgagacctggcagtccttttaccggaagaagcttaaggaggtgtggaaacctgccgtgcggtctggcggatctggcggaggctcctttcaaggagctggtggtgttcagggacgtggccgtggagttctgcagggaggagtgggagtgcctggaccccaggcagaggagcctgtacagggacgtgatgctggagacctacggcaacttcgtgagcctgggcctggccatcagcaagcccagcgtgatcagcctgctggagcagggcaaggagccctggatggtggagcaggccggctggtaccccgacctgctgagcgtgaacgagaccggatctggctccggcagcggccccaagaaaaagagaaaagtctaagctgccttctgcggggcttgccttctggccatgcccttcttctctcccttgcacctgtacctcttggtctttgaataaagcctgagtaggaaggctagcaaaaaaaaaaaaaaaaaaaaaaaaaaaaaaaaaaaaaaaaaaaaaaaaaaaaaaaaaaaaaaaaaaaaaaaaaaaaaaaa

SEQ ID NO: 16518 - RNA, 9485 nt, synthetic construct
  source 1..9485: mol_type = other RNA
aggaaataagagagaaaagaagagtaagaagaaatataagagccaccatggcccctaagaagaagcgtaaagtgagccggatggaacgcctcgtctacgaggtgcggcagaagtgcagaaacatcgaggacatctgcatctcctgcggatctctgaacgtgaccctggagcacccactgttcatcggcggcatgtgccagaactgtaaaaactgttttctggagtgtgcctatcaatacgacgatgacggctaccagagctactgcaccatctgttgcggcggaagagaggtgctgatgtgtggaaataacaactgctgccggtgcttctgcgtggaatgcgtggacctgctggtgggccccggcgccgcccaggccgctattaaggaagatccttggaactgctacatgtgcggccacaagggcacatacggcctgctgagacggagagaggactggcctagcagactgcagatgttcttcgccaataaccacgaccaggagttcgacccccctaaggtgtaccctcccgtccccgccgagaagagaaagcccatccgggtcctgagcctgttcgatggcatcgccaccggtctgctggtgctgaaggacctgggcatccaggtggataggtacattgcctccgaggtgtgcgaggactccatcaccgtgggaatggtgcgtcatcagggcaagatcatgtacgtgggcgacgtgcggagcgtgacacagaagcatatccaggagtggggccctttcgacctggtgatcggcggcagcccttgcaatgacctgagcatcgtgaacccagcccggaagggcctgtacgagggaaccggcagactgttcttcgagttttacagactgctgcacgacgcccggcctaaggaaggcgacgaccggcccttcttttggctgttcgagaatgtggtggccatgggagtcagcgacaagcgggatattagccggttcctggagagcaaccccgtgatgatcgatgccaaggaagtgagcgccgcccaccgggccagatacttctggggcaatctgcctggcatgaacagacccctggccagcaccgtgaacgacaagctggagctgcaggagtgcctggagcacggccggatcgccaagttcagcaaggtgagaaccatcaccacccgaagcaacagcatcaaacaaggcaaggaccagcactttcctgtgttcatgaacgagaaggaggacatcctgtggtgtaccgagatggagagagtgttcgggttcccagtccactacacagatgtcagcaacatgtctagactggccagacagagactgctgggaagaagctggtccgtccctgtgatcagacacctgttcgcccctctgaaggagtacttcgcctgcgtgagcagcggcaacagcaacgccaacagccggggccccagcttctctagcggcctggtgccactgtccctgagagggagccacatgggccccatggagatctacaaaaccgtgagcgcctggaagcggcagcctgtgcgcgtgctgagcctgtttcggaatatcgataaagtcctgaaaagcctgggattcctggagagcggctctggctccggcggtggcaccctgaagtacgtggaggatgtgacaaacgtggtcagacgggatgtggagaagtggggccccttcgatctggtgtacggcagcacccaacccctgggcagctcttgtgaccggtgccctggctggtacatgtttcagttccaccggatcctgcagtacgccctgccgagacaggagtcccagcggccattcttttggattttcatggacaacttgctgctgaccgaggatgaccaggaaactaccactcggttcctgcagaccgaagccgtgaccctgcaggacgtgagaggccgggactaccagaacgccatgcgggtgtggtccaacatccctggactgaaaagcaagcacgcacctctgacccctaaagaagaggagtacctgcaggcccaggtgcggagcagaagcaagctggacgcccctaaggtggatctgctggtgaagaattgcctcctgcccctgagagagtacttcaagtatttcagccagaatagtctgcccctgggaggcagcggcggcggcgccctggtgacatttgaggacgtcgccgtgcggttcacccaggaggaatgggctctgctggatccttctcagaaaatcctgtaccgggacgtgatgagagagacataccggaatctgacctccgtgggcatcaactgggaatgttgggaccttgaagcctgcttcagaagcctgggaagaaacctgagagtgcaggtggtgaagagaaagtgcgagctgaccaacagcggcccctgcgccgagggcggcccaagcagcggcgcccctcctcccagcggcggcagcccagccggctccccaacctctaccgaggagggcacctctgagtccgccacccccgagagcggccctggcacctccaccgagcccagcgagggcagcgcacccggcagccctgccggcagccccacctccacagaggagggaaccagcaccgagcccagcgaaggcagcgccccaggcaccagcaccgagcctagtgagcaggagattaaacggatcaacaagatcagaagaagacttgtgaaagacagcaacaccaagaaggccggcaagacaggccccatgaaaaccctgctggttagagtgatgacacccgatctgagagagcggctggaaaacctgagaaagaagcctgaaaatatcccccagcccatcagcaatacatctagagccaacctgaataagctgctgaccgattacaccgaaatgaagaaggcgatcctgcatgtgtactgggaagagttccagaaggaccctgtgggcctgatgagccgggtggcccagcctgccagcaagaagatcgatcagaacaagctgaaacctgagatggacgagaagggcaacctgaccaccgccggctttgcctgctctcagtgtggccagcccctgttcgtgtacaagctggagcaggtgtctgagaagggcaaggcttacaccaactacttcggacggtgcaatgtggccgagcacgaaaagctgatcctgctggcccagctgaagcccgagaaggatagcgacgaagccgtgacatatagcctgggaaagtttgggcagagggccctggatttctacagcattcatgtgaccaaggagtccacccaccccgtgaagcccctggcccagatcgccggaaacagatacgcctccggacctgtgggaaaggccctgagcgacgcatgtatgggcacaatcgcctccttcctgtctaagtaccaggacatcatcatcgaacaccagaaggtggtgaagggcaaccagaagagactggagagcctgcgggagctggccggcaaggaaaacctggaataccctagcgtgaccctgccacctcagcctcacaccaaggagggcgttgatgcctacaacgaagtgatcgcccgggtgcgaatgtgggtgaacctgaacctgtggcagaagctgaagctaagcagagatgatgccaagcctctgctgagactgaagggattcccttcctttcctctggtcgagagacaggccaacgaagtggactggtgggacatggtgtgtaacgtgaagaagctgatcaacgagaaaaaggaggatggcaaggtgttttggcagaatctggctggctacaagagacaggaagccctgagaccatacctgagcagcgaggaagatcggaagaagggaaagaaattcgctcggtaccagctgggcgacctgctgctgcacctggaaaagaagcacggcgaggactggggaaaggtgtacgacgaggcctgggagcggattgacaagaaagtggaaggcctgagcaagcacatcaagctggaagaggaacggagaagcgaggacgcccagagcaaggccgccctgaccgactggctgcgggctaaggccagcttcgtgatcgagggcctgaaggaggccgacaaggacgagttctgcagatgcgagctgaagctgcagaagtggtacggggacctgcggggaaagcccttcgccatcgaagccgagaacagcatcctggacatcagcggcttcagcaagcagtacaactgtgccttcatctggcagaaggacggcgtgaagaagctgaacctgtacctgatcatcaactacttcaagggcggcaagctgcggttcaagaagatcaaacctgaagccttcgaagccaacagattctacaccgtgatcaacaaaaagagcggcgagatcgtgcccatggaggtgaacttcaacttcgacgaccccaacctgatcatcctgcctctggcctttggcaagagacagggcagagaattcatctggaacgacctgctgtccctggaaaccggcagcctgaagctggccaacggaagagtgatcgagaagacactgtacaacagaagaacccggcaggatgagcctgccctgttcgtggccctgaccttcgagcggcgggaggtcctggactcctccaatatcaaaccaatgaacctgatcggcgtggcaagaggcgaaaacatccccgccgtgatcgccctgaccgaccccgagggctgcccactgagccggtttaaggatagcctgggaaacccaacccacatcctgagaatcggcgagagctataaggagaagcagcggaccatccaggccaagaaggaggtggagcagcggagagccggcggctacagccggaagtacgccagcaaagccaagaatctggcagacgatatggtgagaaacaccgctagagatctgctgtactacgccgtgacccaggatgccatgctgatcttcgccaacctgagccggggcttcggccggcagggcaagcggaccttcatggccgagagacagtacacacggatggaggactggctgaccgccaagctggcctacgagggcctgagcaagacctacctgtccaagacactggcccagtacacctccaagacatgcagcaactgtgggtttaccatcaccagcgccgactacgacagggtgctggagaagctgaagaagacagcaacaggctggatgaccacaattaacggcaaggagctgaaggtggagggccagattacctactacaacagatacaagagacagaacgtagtcaaggacctgtccgtcgagctggatagactgagcgaagaatctgtgaacaacgacatctcctcctggacaaagggcagaagcggagaagctctgagcctcctgaagaaaagattctcccatagacccgtgcaggagaagttcgtgtgcctgaactgcggcttcgagacacacgcagccgagcaagccgccctgaacatcgccagatcctggctgttcctgcggagccaggagtacaagaaataccagacaaacaagacaaccggcaacaccgataagagagccttcgtcgagacctggcagtccttttaccggaagaagcttaaggaggtgtggaaacctgccgtgcggtctggcggatctggcggaggctccgccgagaccagcagcagcggcctgctggaggagcagaagatgatgaagagccagggcctggtgagcttcaaggacgtggccgtggacttcacccaggaggagtggcagcagctggaccccagccagaggaccctgtacagggacgtgatgctggagaactacagccacctggtgagcatgggctaccccgtgagcaagcccgacgtgatcagcaagctggagcagggcgaggagccctggatcggcggcccaagcagcggcgcccctcctcccagcggcggcagcccagccggctccccaacctctaccgaggagggcacctctgagtccgccacccccgagagcggccctggcacctccaccgagcccagcgagggcagcgcacccggcagccctgccggcagccccacctccacagaggagggaaccagcaccgagcccagcgaaggcagcgccccaggcaccagcaccgagcctagtgagcaggagattaaacggatcaacaagatcagaagaagacttgtgaaagacagcaacaccaagaaggccggcaagacaggccccatgaaaaccctgctggttagagtgatgacacccgatctgagagagcggctggaaaacctgagaaagaagcctgaaaatatcccccagcccatcagcaatacatctagagccaacctgaataagctgctgaccgattacaccgaaatgaagaaggcgatcctgcatgtgtactgggaagagttccagaaggaccctgtgggcctgatgagccgggtggcccagcctgccagcaagaagatcgatcagaacaagctgaaacctgagatggacgagaagggcaacctgaccaccgccggctttgcctgctctcagtgtggccagcccctgttcgtgtacaagctggagcaggtgtctgagaagggcaaggcttacaccaactacttcggacggtgcaatgtggccgagcacgaaaagctgatcctgctggcccagctgaagcccgagaaggatagcgacgaagccgtgacatatagcctgggaaagtttgggcagagggccctggatttctacagcattcatgtgaccaaggagtccacccaccccgtgaagcccctggcccagatcgccggaaacagatacgcctccggacctgtgggaaaggccctgagcgacgcatgtatgggcacaatcgcctccttcctgtctaagtaccaggacatcatcatcgaacaccagaaggtggtgaagggcaaccagaagagactggagagcctgcgggagctggccggcaaggaaaacctggaataccctagcgtgaccctgccacctcagcctcacaccaaggagggcgttgatgcctacaacgaagtgatcgcccgggtgcgaatgtgggtgaacctgaacctgtggcagaagctgaagctaagcagagatgatgccaagcctctgctgagactgaagggattcccttcctttcctctggtcgagagacaggccaacgaagtggactggtgggacatggtgtgtaacgtgaagaagctgatcaacgagaaaaaggaggatggcaaggtgttttggcagaatctggctggctacaagagacaggaagccctgagaccatacctgagcagcgaggaagatcggaagaagggaaagaaattcgctcggtaccagctgggcgacctgctgctgcacctggaaaagaagcacggcgaggactggggaaaggtgtacgacgaggcctgggagcggattgacaagaaagtggaaggcctgagcaagcacatcaagctggaagaggaacggagaagcgaggacgcccagagcaaggccgccctgaccgactggctgcgggctaaggccagcttcgtgatcgagggcctgaaggaggccgacaaggacgagttctgcagatgcgagctgaagctgcagaagtggtacggggacctgcggggaaagcccttcgccatcgaagccgagaacagcatcctggacatcagcggcttcagcaagcagtacaactgtgccttcatctggcagaaggacggcgtgaagaagctgaacctgtacctgatcatcaactacttcaagggcggcaagctgcggttcaagaagatcaaacctgaagccttcgaagccaacagattctacaccgtgatcaacaaaaagagcggcgagatcgtgcccatggaggtgaacttcaacttcgacgaccccaacctgatcatcctgcctctggcctttggcaagagacagggcagagaattcatctggaacgacctgctgtccctggaaaccggcagcctgaagctggccaacggaagagtgatcgagaagacactgtacaacagaagaacccggcaggatgagcctgccctgttcgtggccctgaccttcgagcggcgggaggtcctggactcctccaatatcaaaccaatgaacctgatcggcgtggcaagaggcgaaaacatccccgccgtgatcgccctgaccgaccccgagggctgcccactgagccggtttaaggatagcctgggaaacccaacccacatcctgagaatcggcgagagctataaggagaagcagcggaccatccaggccaagaaggaggtggagcagcggagagccggcggctacagccggaagtacgccagcaaagccaagaatctggcagacgatatggtgagaaacaccgctagagatctgctgtactacgccgtgacccaggatgccatgctgatcttcgccaacctgagccggggcttcggccggcagggcaagcggaccttcatggccgagagacagtacacacggatggaggactggctgaccgccaagctggcctacgagggcctgagcaagacctacctgtccaagacactggcccagtacacctccaagacatgcagcaactgtgggtttaccatcaccagcgccgactacgacagggtgctggagaagctgaagaagacagcaacaggctggatgaccacaattaacggcaaggagctgaaggtggagggccagattacctactacaacagatacaagagacagaacgtagtcaaggacctgtccgtcgagctggatagactgagcgaagaatctgtgaacaacgacatctcctcctggacaaagggcagaagcggagaagctctgagcctcctgaagaaaagattctcccatagacccgtgcaggagaagttcgtgtgcctgaactgcggcttcgagacacacgcagccgagcaagccgccctgaacatcgccagatcctggctgttcctgcggagccaggagtacaagaaataccagacaaacaagacaaccggcaacaccgataagagagccttcgtcgagacctggcagtccttttaccggaagaagcttaaggaggtgtggaaacctgccgtgcggtctggcggatctggcggaggctcctgccgagaccagcagcagcggcctgctggaggagcagaagatgatgaagagccagggcctggtgagcttcaaggacgtggccgtggacttcacccaggaggagtggcagcagctggaccccagccagaggaccctgtacagggacgtgatgctggagaactacagccacctggtgagcatgggctaccccgtgagcaagcccgacgtgatcagcaagctggagcagggcgaggagccctggatcggatctggctccggcagcggccccaagaaaaagagaaaagtctaagctgccttctgcggggcttgccttctggccatgcccttcttctctcccttgcacctgtacctcttggtctttgaataaagcctgagtaggaaggctagcaaaaaaaaaaaaaaaaaaaaaaaaaaaaaaaaaaaaaaaaaaaaaaaaaaaaaaaaaaaaaaaaaaaaaaaaaaaaaaaa

SEQ ID NO: 16519 - RNA, 9485 nt, synthetic construct
  source 1..9485: mol_type = other RNA
aggaaataagagagaaaagaagagtaagaagaaatataagagccaccatggcccctaagaagaagcgtaaagtgagccggatggaacgcctcgtctacgaggtgcggcagaagtgcagaaacatcgaggacatctgcatctcctgcggatctctgaacgtgaccctggagcacccactgttcatcggcggcatgtgccagaactgtaaaaactgttttctggagtgtgcctatcaatacgacgatgacggctaccagagctactgcaccatctgttgcggcggaagagaggtgctgatgtgtggaaataacaactgctgccggtgcttctgcgtggaatgcgtggacctgctggtgggccccggcgccgcccaggccgctattaaggaagatccttggaactgctacatgtgcggccacaagggcacatacggcctgctgagacggagagaggactggcctagcagactgcagatgttcttcgccaataaccacgaccaggagttcgacccccctaaggtgtaccctcccgtccccgccgagaagagaaagcccatccgggtcctgagcctgttcgatggcatcgccaccggtctgctggtgctgaaggacctgggcatccaggtggataggtacattgcctccgaggtgtgcgaggactccatcaccgtgggaatggtgcgtcatcagggcaagatcatgtacgtgggcgacgtgcggagcgtgacacagaagcatatccaggagtggggccctttcgacctggtgatcggcggcagcccttgcaatgacctgagcatcgtgaacccagcccggaagggcctgtacgagggaaccggcagactgttcttcgagttttacagactgctgcacgacgcccggcctaaggaaggcgacgaccggcccttcttttggctgttcgagaatgtggtggccatgggagtcagcgacaagcgggatattagccggttcctggagagcaaccccgtgatgatcgatgccaaggaagtgagcgccgcccaccgggccagatacttctggggcaatctgcctggcatgaacagacccctggccagcaccgtgaacgacaagctggagctgcaggagtgcctggagcacggccggatcgccaagttcagcaaggtgagaaccatcaccacccgaagcaacagcatcaaacaaggcaaggaccagcactttcctgtgttcatgaacgagaaggaggacatcctgtggtgtaccgagatggagagagtgttcgggttcccagtccactacacagatgtcagcaacatgtctagactggccagacagagactgctgggaagaagctggtccgtccctgtgatcagacacctgttcgcccctctgaaggagtacttcgcctgcgtgagcagcggcaacagcaacgccaacagccggggccccagcttctctagcggcctggtgccactgtccctgagagggagccacatgggccccatggagatctacaaaaccgtgagcgcctggaagcggcagcctgtgcgcgtgctgagcctgtttcggaatatcgataaagtcctgaaaagcctgggattcctggagagcggctctggctccggcggtggcaccctgaagtacgtggaggatgtgacaaacgtggtcagacgggatgtggagaagtggggccccttcgatctggtgtacggcagcacccaacccctgggcagctcttgtgaccggtgccctggctggtacatgtttcagttccaccggatcctgcagtacgccctgccgagacaggagtcccagcggccattcttttggattttcatggacaacttgctgctgaccgaggatgaccaggaaactaccactcggttcctgcagaccgaagccgtgaccctgcaggacgtgagaggccgggactaccagaacgccatgcgggtgtggtccaacatccctggactgaaaagcaagcacgcacctctgacccctaaagaagaggagtacctgcaggcccaggtgcggagcagaagcaagctggacgcccctaaggtggatctgctggtgaagaattgcctcctgcccctgagagagtacttcaagtatttcagccagaatagtctgcccctgggaggcagcggcggcggcgccctggtgacatttgaggacgtcgccgtgcggttcacccaggaggaatgggctctgctggatccttctcagaaaatcctgtaccgggacgtgatgagagagacataccggaatctgacctccgtgggcatcaactgggaatgttgggaccttgaagcctgcttcagaagcctgggaagaaacctgagagtgcaggtggtgaagagaaagtgcgagctgaccaacagcggcccctgcgccgagggcggcccaagcagcggcgcccctcctcccagcggcggcagcccagccggctccccaacctctaccgaggagggcacctctgagtccgccacccccgagagcggccctggcacctccaccgagcccagcgagggcagcgcacccggcagccctgccggcagccccacctccacagaggagggaaccagcaccgagcccagcgaaggcagcgccccaggcaccagcaccgagcctagtgagcaggagattaaacggatcaacaagatcagaagaagacttgtgaaagacagcaacaccaagaaggccggcaagacaggccccatgaaaaccctgctggttagagtgatgacacccgatctgagagagcggctggaaaacctgagaaagaagcctgaaaatatcccccagcccatcagcaatacatctagagccaacctgaataagctgctgaccgattacaccgaaatgaagaaggcgatcctgcatgtgtactgggaagagttccagaaggaccctgtgggcctgatgagccgggtggcccagcctgccagcaagaagatcgatcagaacaagctgaaacctgagatggacgagaagggcaacctgaccaccgccggctttgcctgctctcagtgtggccagcccctgttcgtgtacaagctggagcaggtgtctgagaagggcaaggcttacaccaactacttcggacggtgcaatgtggccgagcacgaaaagctgatcctgctggcccagctgaagcccgagaaggatagcgacgaagccgtgacatatagcctgggaaagtttgggcagagggccctggatttctacagcattcatgtgaccaaggagtccacccaccccgtgaagcccctggcccagatcgccggaaacagatacgcctccggacctgtgggaaaggccctgagcgacgcatgtatgggcacaatcgcctccttcctgtctaagtaccaggacatcatcatcgaacaccagaaggtggtgaagggcaaccagaagagactggagagcctgcgggagctggccggcaaggaaaacctggaataccctagcgtgaccctgccacctcagcctcacaccaaggagggcgttgatgcctacaacgaagtgatcgcccgggtgcgaatgtgggtgaacctgaacctgtggcagaagctgaagctaagcagagatgatgccaagcctctgctgagactgaagggattcccttcctttcctctggtcgagagacaggccaacgaagtggactggtgggacatggtgtgtaacgtgaagaagctgatcaacgagaaaaaggaggatggcaaggtgttttggcagaatctggctggctacaagagacaggaagccctgagaccatacctgagcagcgaggaagatcggaagaagggaaagaaattcgctcggtaccagctgggcgacctgctgctgcacctggaaaagaagcacggcgaggactggggaaaggtgtacgacgaggcctgggagcggattgacaagaaagtggaaggcctgagcaagcacatcaagctggaagaggaacggagaagcgaggacgcccagagcaaggccgccctgaccgactggctgcgggctaaggccagcttcgtgatcgagggcctgaaggaggccgacaaggacgagttctgcagatgcgagctgaagctgcagaagtggtacggggacctgcggggaaagcccttcgccatcgaagccgagaacagcatcctggacatcagcggcttcagcaagcagtacaactgtgccttcatctggcagaaggacggcgtgaagaagctgaacctgtacctgatcatcaactacttcaagggcggcaagctgcggttcaagaagatcaaacctgaagccttcgaagccaacagattctacaccgtgatcaacaaaaagagcggcgagatcgtgcccatggaggtgaacttcaacttcgacgaccccaacctgatcatcctgcctctggcctttggcaagagacagggcagagaattcatctggaacgacctgctgtccctggaaaccggcagcctgaagctggccaacggaagagtgatcgagaagacactgtacaacagaagaacccggcaggatgagcctgccctgttcgtggccctgaccttcgagcggcgggaggtcctggactcctccaatatcaaaccaatgaacctgatcggcgtggcaagaggcgaaaacatccccgccgtgatcgccctgaccgaccccgagggctgcccactgagccggtttaaggatagcctgggaaacccaacccacatcctgagaatcggcgagagctataaggagaagcagcggaccatccaggccaagaaggaggtggagcagcggagagccggcggctacagccggaagtacgccagcaaagccaagaatctggcagacgatatggtgagaaacaccgctagagatctgctgtactacgccgtgacccaggatgccatgctgatcttcgccaacctgagccggggcttcggccggcagggcaagcggaccttcatggccgagagacagtacacacggatggaggactggctgaccgccaagctggcctacgagggcctgagcaagacctacctgtccaagacactggcccagtacacctccaagacatgcagcaactgtgggtttaccatcaccagcgccgactacgacagggtgctggagaagctgaagaagacagcaacaggctggatgaccacaattaacggcaaggagctgaaggtggagggccagattacctactacaacagatacaagagacagaacgtagtcaaggacctgtccgtcgagctggatagactgagcgaagaatctgtgaacaacgacatctcctcctggacaaagggcagaagcggagaagctctgagcctcctgaagaaaagattctcccatagacccgtgcaggagaagttcgtgtgcctgaactgcggcttcgagacacacgcagccgagcaagccgccctgaacatcgccagatcctggctgttcctgcggagccaggagtacaagaaataccagacaaacaagacaaccggcaacaccgataagagagccttcgtcgagacctggcagtccttttaccggaagaagcttaaggaggtgtggaaacctgccgtgcggtctggcggatctggcggaggctccttccaggacctgctgagcttcaccgacgtggccatcgacttcagcgccgacgagtgcgagtgcctggagcccgcccagtggaacctgtacaaggaggtgatgctggagaactacagcaacctggtgttcctgggcctggccttcagcaagccctacctggtgaccttcctggagcagagcagcgacccctggagcatgaagaggaaggccagcgccgccatccacctgggcctgaagccccacggcggcccaagcagcggcgcccctcctcccagcggcggcagcccagccggctccccaacctctaccgaggagggcacctctgagtccgccacccccgagagcggccctggcacctccaccgagcccagcgagggcagcgcacccggcagccctgccggcagccccacctccacagaggagggaaccagcaccgagcccagcgaaggcagcgccccaggcaccagcaccgagcctagtgagcaggagattaaacggatcaacaagatcagaagaagacttgtgaaagacagcaacaccaagaaggccggcaagacaggccccatgaaaaccctgctggttagagtgatgacacccgatctgagagagcggctggaaaacctgagaaagaagcctgaaaatatcccccagcccatcagcaatacatctagagccaacctgaataagctgctgaccgattacaccgaaatgaagaaggcgatcctgcatgtgtactgggaagagttccagaaggaccctgtgggcctgatgagccgggtggcccagcctgccagcaagaagatcgatcagaacaagctgaaacctgagatggacgagaagggcaacctgaccaccgccggctttgcctgctctcagtgtggccagcccctgttcgtgtacaagctggagcaggtgtctgagaagggcaaggcttacaccaactacttcggacggtgcaatgtggccgagcacgaaaagctgatcctgctggcccagctgaagcccgagaaggatagcgacgaagccgtgacatatagcctgggaaagtttgggcagagggccctggatttctacagcattcatgtgaccaaggagtccacccaccccgtgaagcccctggcccagatcgccggaaacagatacgcctccggacctgtgggaaaggccctgagcgacgcatgtatgggcacaatcgcctccttcctgtctaagtaccaggacatcatcatcgaacaccagaaggtggtgaagggcaaccagaagagactggagagcctgcgggagctggccggcaaggaaaacctggaataccctagcgtgaccctgccacctcagcctcacaccaaggagggcgttgatgcctacaacgaagtgatcgcccgggtgcgaatgtgggtgaacctgaacctgtggcagaagctgaagctaagcagagatgatgccaagcctctgctgagactgaagggattcccttcctttcctctggtcgagagacaggccaacgaagtggactggtgggacatggtgtgtaacgtgaagaagctgatcaacgagaaaaaggaggatggcaaggtgttttggcagaatctggctggctacaagagacaggaagccctgagaccatacctgagcagcgaggaagatcggaagaagggaaagaaattcgctcggtaccagctgggcgacctgctgctgcacctggaaaagaagcacggcgaggactggggaaaggtgtacgacgaggcctgggagcggattgacaagaaagtggaaggcctgagcaagcacatcaagctggaagaggaacggagaagcgaggacgcccagagcaaggccgccctgaccgactggctgcgggctaaggccagcttcgtgatcgagggcctgaaggaggccgacaaggacgagttctgcagatgcgagctgaagctgcagaagtggtacggggacctgcggggaaagcccttcgccatcgaagccgagaacagcatcctggacatcagcggcttcagcaagcagtacaactgtgccttcatctggcagaaggacggcgtgaagaagctgaacctgtacctgatcatcaactacttcaagggcggcaagctgcggttcaagaagatcaaacctgaagccttcgaagccaacagattctacaccgtgatcaacaaaaagagcggcgagatcgtgcccatggaggtgaacttcaacttcgacgaccccaacctgatcatcctgcctctggcctttggcaagagacagggcagagaattcatctggaacgacctgctgtccctggaaaccggcagcctgaagctggccaacggaagagtgatcgagaagacactgtacaacagaagaacccggcaggatgagcctgccctgttcgtggccctgaccttcgagcggcgggaggtcctggactcctccaatatcaaaccaatgaacctgatcggcgtggcaagaggcgaaaacatccccgccgtgatcgccctgaccgaccccgagggctgcccactgagccggtttaaggatagcctgggaaacccaacccacatcctgagaatcggcgagagctataaggagaagcagcggaccatccaggccaagaaggaggtggagcagcggagagccggcggctacagccggaagtacgccagcaaagccaagaatctggcagacgatatggtgagaaacaccgctagagatctgctgtactacgccgtgacccaggatgccatgctgatcttcgccaacctgagccggggcttcggccggcagggcaagcggaccttcatggccgagagacagtacacacggatggaggactggctgaccgccaagctggcctacgagggcctgagcaagacctacctgtccaagacactggcccagtacacctccaagacatgcagcaactgtgggtttaccatcaccagcgccgactacgacagggtgctggagaagctgaagaagacagcaacaggctggatgaccacaattaacggcaaggagctgaaggtggagggccagattacctactacaacagatacaagagacagaacgtagtcaaggacctgtccgtcgagctggatagactgagcgaagaatctgtgaacaacgacatctcctcctggacaaagggcagaagcggagaagctctgagcctcctgaagaaaagattctcccatagacccgtgcaggagaagttcgtgtgcctgaactgcggcttcgagacacacgcagccgagcaagccgccctgaacatcgccagatcctggctgttcctgcggagccaggagtacaagaaataccagacaaacaagacaaccggcaacaccgataagagagccttcgtcgagacctggcagtccttttaccggaagaagcttaaggaggtgtggaaacctgccgtgcggtctggcggatctggcggaggctcctttccaggacctgctgagcttcaccgacgtggccatcgacttcagcgccgacgagtgcgagtgcctggagcccgcccagtggaacctgtacaaggaggtgatgctggagaactacagcaacctggtgttcctgggcctggccttcagcaagccctacctggtgaccttcctggagcagagcagcgacccctggagcatgaagaggaaggccagcgccgccatccacctgggcctgaagccccacggatctggctccggcagcggccccaagaaaaagagaaaagtctaagctgccttctgcggggcttgccttctggccatgcccttcttctctcccttgcacctgtacctcttggtctttgaataaagcctgagtaggaaggctagcaaaaaaaaaaaaaaaaaaaaaaaaaaaaaaaaaaaaaaaaaaaaaaaaaaaaaaaaaaaaaaaaaaaaaaaaaaaaaaaa

SEQ ID NO: 16520 - RNA, 9485 nt, synthetic construct
  source 1..9485: mol_type = other RNA
aggaaataagagagaaaagaagagtaagaagaaatataagagccaccatggcccctaagaagaagcgtaaagtgagccggatggaacgcctcgtctacgaggtgcggcagaagtgcagaaacatcgaggacatctgcatctcctgcggatctctgaacgtgaccctggagcacccactgttcatcggcggcatgtgccagaactgtaaaaactgttttctggagtgtgcctatcaatacgacgatgacggctaccagagctactgcaccatctgttgcggcggaagagaggtgctgatgtgtggaaataacaactgctgccggtgcttctgcgtggaatgcgtggacctgctggtgggccccggcgccgcccaggccgctattaaggaagatccttggaactgctacatgtgcggccacaagggcacatacggcctgctgagacggagagaggactggcctagcagactgcagatgttcttcgccaataaccacgaccaggagttcgacccccctaaggtgtaccctcccgtccccgccgagaagagaaagcccatccgggtcctgagcctgttcgatggcatcgccaccggtctgctggtgctgaaggacctgggcatccaggtggataggtacattgcctccgaggtgtgcgaggactccatcaccgtgggaatggtgcgtcatcagggcaagatcatgtacgtgggcgacgtgcggagcgtgacacagaagcatatccaggagtggggccctttcgacctggtgatcggcggcagcccttgcaatgacctgagcatcgtgaacccagcccggaagggcctgtacgagggaaccggcagactgttcttcgagttttacagactgctgcacgacgcccggcctaaggaaggcgacgaccggcccttcttttggctgttcgagaatgtggtggccatgggagtcagcgacaagcgggatattagccggttcctggagagcaaccccgtgatgatcgatgccaaggaagtgagcgccgcccaccgggccagatacttctggggcaatctgcctggcatgaacagacccctggccagcaccgtgaacgacaagctggagctgcaggagtgcctggagcacggccggatcgccaagttcagcaaggtgagaaccatcaccacccgaagcaacagcatcaaacaaggcaaggaccagcactttcctgtgttcatgaacgagaaggaggacatcctgtggtgtaccgagatggagagagtgttcgggttcccagtccactacacagatgtcagcaacatgtctagactggccagacagagactgctgggaagaagctggtccgtccctgtgatcagacacctgttcgcccctctgaaggagtacttcgcctgcgtgagcagcggcaacagcaacgccaacagccggggccccagcttctctagcggcctggtgccactgtccctgagagggagccacatgggccccatggagatctacaaaaccgtgagcgcctggaagcggcagcctgtgcgcgtgctgagcctgtttcggaatatcgataaagtcctgaaaagcctgggattcctggagagcggctctggctccggcggtggcaccctgaagtacgtggaggatgtgacaaacgtggtcagacgggatgtggagaagtggggccccttcgatctggtgtacggcagcacccaacccctgggcagctcttgtgaccggtgccctggctggtacatgtttcagttccaccggatcctgcagtacgccctgccgagacaggagtcccagcggccattcttttggattttcatggacaacttgctgctgaccgaggatgaccaggaaactaccactcggttcctgcagaccgaagccgtgaccctgcaggacgtgagaggccgggactaccagaacgccatgcgggtgtggtccaacatccctggactgaaaagcaagcacgcacctctgacccctaaagaagaggagtacctgcaggcccaggtgcggagcagaagcaagctggacgcccctaaggtggatctgctggtgaagaattgcctcctgcccctgagagagtacttcaagtatttcagccagaatagtctgcccctgggaggcagcggcggcggcgccctggtgacatttgaggacgtcgccgtgcggttcacccaggaggaatgggctctgctggatccttctcagaaaatcctgtaccgggacgtgatgagagagacataccggaatctgacctccgtgggcatcaactgggaatgttgggaccttgaagcctgcttcagaagcctgggaagaaacctgagagtgcaggtggtgaagagaaagtgcgagctgaccaacagcggcccctgcgccgagggcggcccaagcagcggcgcccctcctcccagcggcggcagcccagccggctccccaacctctaccgaggagggcacctctgagtccgccacccccgagagcggccctggcacctccaccgagcccagcgagggcagcgcacccggcagccctgccggcagccccacctccacagaggagggaaccagcaccgagcccagcgaaggcagcgccccaggcaccagcaccgagcctagtgagcaggagattaaacggatcaacaagatcagaagaagacttgtgaaagacagcaacaccaagaaggccggcaagacaggccccatgaaaaccctgctggttagagtgatgacacccgatctgagagagcggctggaaaacctgagaaagaagcctgaaaatatcccccagcccatcagcaatacatctagagccaacctgaataagctgctgaccgattacaccgaaatgaagaaggcgatcctgcatgtgtactgggaagagttccagaaggaccctgtgggcctgatgagccgggtggcccagcctgccagcaagaagatcgatcagaacaagctgaaacctgagatggacgagaagggcaacctgaccaccgccggctttgcctgctctcagtgtggccagcccctgttcgtgtacaagctggagcaggtgtctgagaagggcaaggcttacaccaactacttcggacggtgcaatgtggccgagcacgaaaagctgatcctgctggcccagctgaagcccgagaaggatagcgacgaagccgtgacatatagcctgggaaagtttgggcagagggccctggatttctacagcattcatgtgaccaaggagtccacccaccccgtgaagcccctggcccagatcgccggaaacagatacgcctccggacctgtgggaaaggccctgagcgacgcatgtatgggcacaatcgcctccttcctgtctaagtaccaggacatcatcatcgaacaccagaaggtggtgaagggcaaccagaagagactggagagcctgcgggagctggccggcaaggaaaacctggaataccctagcgtgaccctgccacctcagcctcacaccaaggagggcgttgatgcctacaacgaagtgatcgcccgggtgcgaatgtgggtgaacctgaacctgtggcagaagctgaagctaagcagagatgatgccaagcctctgctgagactgaagggattcccttcctttcctctggtcgagagacaggccaacgaagtggactggtgggacatggtgtgtaacgtgaagaagctgatcaacgagaaaaaggaggatggcaaggtgttttggcagaatctggctggctacaagagacaggaagccctgagaccatacctgagcagcgaggaagatcggaagaagggaaagaaattcgctcggtaccagctgggcgacctgctgctgcacctggaaaagaagcacggcgaggactggggaaaggtgtacgacgaggcctgggagcggattgacaagaaagtggaaggcctgagcaagcacatcaagctggaagaggaacggagaagcgaggacgcccagagcaaggccgccctgaccgactggctgcgggctaaggccagcttcgtgatcgagggcctgaaggaggccgacaaggacgagttctgcagatgcgagctgaagctgcagaagtggtacggggacctgcggggaaagcccttcgccatcgaagccgagaacagcatcctggacatcagcggcttcagcaagcagtacaactgtgccttcatctggcagaaggacggcgtgaagaagctgaacctgtacctgatcatcaactacttcaagggcggcaagctgcggttcaagaagatcaaacctgaagccttcgaagccaacagattctacaccgtgatcaacaaaaagagcggcgagatcgtgcccatggaggtgaacttcaacttcgacgaccccaacctgatcatcctgcctctggcctttggcaagagacagggcagagaattcatctggaacgacctgctgtccctggaaaccggcagcctgaagctggccaacggaagagtgatcgagaagacactgtacaacagaagaacccggcaggatgagcctgccctgttcgtggccctgaccttcgagcggcgggaggtcctggactcctccaatatcaaaccaatgaacctgatcggcgtggcaagaggcgaaaacatccccgccgtgatcgccctgaccgaccccgagggctgcccactgagccggtttaaggatagcctgggaaacccaacccacatcctgagaatcggcgagagctataaggagaagcagcggaccatccaggccaagaaggaggtggagcagcggagagccggcggctacagccggaagtacgccagcaaagccaagaatctggcagacgatatggtgagaaacaccgctagagatctgctgtactacgccgtgacccaggatgccatgctgatcttcgccaacctgagccggggcttcggccggcagggcaagcggaccttcatggccgagagacagtacacacggatggaggactggctgaccgccaagctggcctacgagggcctgagcaagacctacctgtccaagacactggcccagtacacctccaagacatgcagcaactgtgggtttaccatcaccagcgccgactacgacagggtgctggagaagctgaagaagacagcaacaggctggatgaccacaattaacggcaaggagctgaaggtggagggccagattacctactacaacagatacaagagacagaacgtagtcaaggacctgtccgtcgagctggatagactgagcgaagaatctgtgaacaacgacatctcctcctggacaaagggcagaagcggagaagctctgagcctcctgaagaaaagattctcccatagacccgtgcaggagaagttcgtgtgcctgaactgcggcttcgagacacacgcagccgagcaagccgccctgaacatcgccagatcctggctgttcctgcggagccaggagtacaagaaataccagacaaacaagacaaccggcaacaccgataagagagccttcgtcgagacctggcagtccttttaccggaagaagcttaaggaggtgtggaaacctgccgtgcggtctggcggatctggcggaggctcccccaaggtgaccgtgagcttcgaggacgtgagcgtgtacttcaccaagaccgagtggaagctgctggacctgaagcagaggaacctgtacaagcaggtgatgctggagaactacagccacctggtgagcgtgggcttcgccttcagcaagcccaacctggtgagccagctggagaggggcgagaagccctggatcagggacgacaggatggagagcgccgccaggagcagggccggcaacaggggcggcccaagcagcggcgcccctcctcccagcggcggcagcccagccggctccccaacctctaccgaggagggcacctctgagtccgccacccccgagagcggccctggcacctccaccgagcccagcgagggcagcgcacccggcagccctgccggcagccccacctccacagaggagggaaccagcaccgagcccagcgaaggcagcgccccaggcaccagcaccgagcctagtgagcaggagattaaacggatcaacaagatcagaagaagacttgtgaaagacagcaacaccaagaaggccggcaagacaggccccatgaaaaccctgctggttagagtgatgacacccgatctgagagagcggctggaaaacctgagaaagaagcctgaaaatatcccccagcccatcagcaatacatctagagccaacctgaataagctgctgaccgattacaccgaaatgaagaaggcgatcctgcatgtgtactgggaagagttccagaaggaccctgtgggcctgatgagccgggtggcccagcctgccagcaagaagatcgatcagaacaagctgaaacctgagatggacgagaagggcaacctgaccaccgccggctttgcctgctctcagtgtggccagcccctgttcgtgtacaagctggagcaggtgtctgagaagggcaaggcttacaccaactacttcggacggtgcaatgtggccgagcacgaaaagctgatcctgctggcccagctgaagcccgagaaggatagcgacgaagccgtgacatatagcctgggaaagtttgggcagagggccctggatttctacagcattcatgtgaccaaggagtccacccaccccgtgaagcccctggcccagatcgccggaaacagatacgcctccggacctgtgggaaaggccctgagcgacgcatgtatgggcacaatcgcctccttcctgtctaagtaccaggacatcatcatcgaacaccagaaggtggtgaagggcaaccagaagagactggagagcctgcgggagctggccggcaaggaaaacctggaataccctagcgtgaccctgccacctcagcctcacaccaaggagggcgttgatgcctacaacgaagtgatcgcccgggtgcgaatgtgggtgaacctgaacctgtggcagaagctgaagctaagcagagatgatgccaagcctctgctgagactgaagggattcccttcctttcctctggtcgagagacaggccaacgaagtggactggtgggacatggtgtgtaacgtgaagaagctgatcaacgagaaaaaggaggatggcaaggtgttttggcagaatctggctggctacaagagacaggaagccctgagaccatacctgagcagcgaggaagatcggaagaagggaaagaaattcgctcggtaccagctgggcgacctgctgctgcacctggaaaagaagcacggcgaggactggggaaaggtgtacgacgaggcctgggagcggattgacaagaaagtggaaggcctgagcaagcacatcaagctggaagaggaacggagaagcgaggacgcccagagcaaggccgccctgaccgactggctgcgggctaaggccagcttcgtgatcgagggcctgaaggaggccgacaaggacgagttctgcagatgcgagctgaagctgcagaagtggtacggggacctgcggggaaagcccttcgccatcgaagccgagaacagcatcctggacatcagcggcttcagcaagcagtacaactgtgccttcatctggcagaaggacggcgtgaagaagctgaacctgtacctgatcatcaactacttcaagggcggcaagctgcggttcaagaagatcaaacctgaagccttcgaagccaacagattctacaccgtgatcaacaaaaagagcggcgagatcgtgcccatggaggtgaacttcaacttcgacgaccccaacctgatcatcctgcctctggcctttggcaagagacagggcagagaattcatctggaacgacctgctgtccctggaaaccggcagcctgaagctggccaacggaagagtgatcgagaagacactgtacaacagaagaacccggcaggatgagcctgccctgttcgtggccctgaccttcgagcggcgggaggtcctggactcctccaatatcaaaccaatgaacctgatcggcgtggcaagaggcgaaaacatccccgccgtgatcgccctgaccgaccccgagggctgcccactgagccggtttaaggatagcctgggaaacccaacccacatcctgagaatcggcgagagctataaggagaagcagcggaccatccaggccaagaaggaggtggagcagcggagagccggcggctacagccggaagtacgccagcaaagccaagaatctggcagacgatatggtgagaaacaccgctagagatctgctgtactacgccgtgacccaggatgccatgctgatcttcgccaacctgagccggggcttcggccggcagggcaagcggaccttcatggccgagagacagtacacacggatggaggactggctgaccgccaagctggcctacgagggcctgagcaagacctacctgtccaagacactggcccagtacacctccaagacatgcagcaactgtgggtttaccatcaccagcgccgactacgacagggtgctggagaagctgaagaagacagcaacaggctggatgaccacaattaacggcaaggagctgaaggtggagggccagattacctactacaacagatacaagagacagaacgtagtcaaggacctgtccgtcgagctggatagactgagcgaagaatctgtgaacaacgacatctcctcctggacaaagggcagaagcggagaagctctgagcctcctgaagaaaagattctcccatagacccgtgcaggagaagttcgtgtgcctgaactgcggcttcgagacacacgcagccgagcaagccgccctgaacatcgccagatcctggctgttcctgcggagccaggagtacaagaaataccagacaaacaagacaaccggcaacaccgataagagagccttcgtcgagacctggcagtccttttaccggaagaagcttaaggaggtgtggaaacctgccgtgcggtctggcggatctggcggaggctcctcccaaggtgaccgtgagcttcgaggacgtgagcgtgtacttcaccaagaccgagtggaagctgctggacctgaagcagaggaacctgtacaagcaggtgatgctggagaactacagccacctggtgagcgtgggcttcgccttcagcaagcccaacctggtgagccagctggagaggggcgagaagccctggatcagggacgacaggatggagagcgccgccaggagcagggccggcaacaggggatctggctccggcagcggccccaagaaaaagagaaaagtctaagctgccttctgcggggcttgccttctggccatgcccttcttctctcccttgcacctgtacctcttggtctttgaataaagcctgagtaggaaggctagcaaaaaaaaaaaaaaaaaaaaaaaaaaaaaaaaaaaaaaaaaaaaaaaaaaaaaaaaaaaaaaaaaaaaaaaaaaaaaaaa

SEQ ID NO: 16521 - RNA, 9485 nt, synthetic construct
  source 1..9485: mol_type = other RNA
aggaaataagagagaaaagaagagtaagaagaaatataagagccaccatggcccctaagaagaagcgtaaagtgagccggatggaacgcctcgtctacgaggtgcggcagaagtgcagaaacatcgaggacatctgcatctcctgcggatctctgaacgtgaccctggagcacccactgttcatcggcggcatgtgccagaactgtaaaaactgttttctggagtgtgcctatcaatacgacgatgacggctaccagagctactgcaccatctgttgcggcggaagagaggtgctgatgtgtggaaataacaactgctgccggtgcttctgcgtggaatgcgtggacctgctggtgggccccggcgccgcccaggccgctattaaggaagatccttggaactgctacatgtgcggccacaagggcacatacggcctgctgagacggagagaggactggcctagcagactgcagatgttcttcgccaataaccacgaccaggagttcgacccccctaaggtgtaccctcccgtccccgccgagaagagaaagcccatccgggtcctgagcctgttcgatggcatcgccaccggtctgctggtgctgaaggacctgggcatccaggtggataggtacattgcctccgaggtgtgcgaggactccatcaccgtgggaatggtgcgtcatcagggcaagatcatgtacgtgggcgacgtgcggagcgtgacacagaagcatatccaggagtggggccctttcgacctggtgatcggcggcagcccttgcaatgacctgagcatcgtgaacccagcccggaagggcctgtacgagggaaccggcagactgttcttcgagttttacagactgctgcacgacgcccggcctaaggaaggcgacgaccggcccttcttttggctgttcgagaatgtggtggccatgggagtcagcgacaagcgggatattagccggttcctggagagcaaccccgtgatgatcgatgccaaggaagtgagcgccgcccaccgggccagatacttctggggcaatctgcctggcatgaacagacccctggccagcaccgtgaacgacaagctggagctgcaggagtgcctggagcacggccggatcgccaagttcagcaaggtgagaaccatcaccacccgaagcaacagcatcaaacaaggcaaggaccagcactttcctgtgttcatgaacgagaaggaggacatcctgtggtgtaccgagatggagagagtgttcgggttcccagtccactacacagatgtcagcaacatgtctagactggccagacagagactgctgggaagaagctggtccgtccctgtgatcagacacctgttcgcccctctgaaggagtacttcgcctgcgtgagcagcggcaacagcaacgccaacagccggggccccagcttctctagcggcctggtgccactgtccctgagagggagccacatgggccccatggagatctacaaaaccgtgagcgcctggaagcggcagcctgtgcgcgtgctgagcctgtttcggaatatcgataaagtcctgaaaagcctgggattcctggagagcggctctggctccggcggtggcaccctgaagtacgtggaggatgtgacaaacgtggtcagacgggatgtggagaagtggggccccttcgatctggtgtacggcagcacccaacccctgggcagctcttgtgaccggtgccctggctggtacatgtttcagttccaccggatcctgcagtacgccctgccgagacaggagtcccagcggccattcttttggattttcatggacaacttgctgctgaccgaggatgaccaggaaactaccactcggttcctgcagaccgaagccgtgaccctgcaggacgtgagaggccgggactaccagaacgccatgcgggtgtggtccaacatccctggactgaaaagcaagcacgcacctctgacccctaaagaagaggagtacctgcaggcccaggtgcggagcagaagcaagctggacgcccctaaggtggatctgctggtgaagaattgcctcctgcccctgagagagtacttcaagtatttcagccagaatagtctgcccctgggaggcagcggcggcggcgccctggtgacatttgaggacgtcgccgtgcggttcacccaggaggaatgggctctgctggatccttctcagaaaatcctgtaccgggacgtgatgagagagacataccggaatctgacctccgtgggcatcaactgggaatgttgggaccttgaagcctgcttcagaagcctgggaagaaacctgagagtgcaggtggtgaagagaaagtgcgagctgaccaacagcggcccctgcgccgagggcggcccaagcagcggcgcccctcctcccagcggcggcagcccagccggctccccaacctctaccgaggagggcacctctgagtccgccacccccgagagcggccctggcacctccaccgagcccagcgagggcagcgcacccggcagccctgccggcagccccacctccacagaggagggaaccagcaccgagcccagcgaaggcagcgccccaggcaccagcaccgagcctagtgagcaggagattaaacggatcaacaagatcagaagaagacttgtgaaagacagcaacaccaagaaggccggcaagacaggccccatgaaaaccctgctggttagagtgatgacacccgatctgagagagcggctggaaaacctgagaaagaagcctgaaaatatcccccagcccatcagcaatacatctagagccaacctgaataagctgctgaccgattacaccgaaatgaagaaggcgatcctgcatgtgtactgggaagagttccagaaggaccctgtgggcctgatgagccgggtggcccagcctgccagcaagaagatcgatcagaacaagctgaaacctgagatggacgagaagggcaacctgaccaccgccggctttgcctgctctcagtgtggccagcccctgttcgtgtacaagctggagcaggtgtctgagaagggcaaggcttacaccaactacttcggacggtgcaatgtggccgagcacgaaaagctgatcctgctggcccagctgaagcccgagaaggatagcgacgaagccgtgacatatagcctgggaaagtttgggcagagggccctggatttctacagcattcatgtgaccaaggagtccacccaccccgtgaagcccctggcccagatcgccggaaacagatacgcctccggacctgtgggaaaggccctgagcgacgcatgtatgggcacaatcgcctccttcctgtctaagtaccaggacatcatcatcgaacaccagaaggtggtgaagggcaaccagaagagactggagagcctgcgggagctggccggcaaggaaaacctggaataccctagcgtgaccctgccacctcagcctcacaccaaggagggcgttgatgcctacaacgaagtgatcgcccgggtgcgaatgtgggtgaacctgaacctgtggcagaagctgaagctaagcagagatgatgccaagcctctgctgagactgaagggattcccttcctttcctctggtcgagagacaggccaacgaagtggactggtgggacatggtgtgtaacgtgaagaagctgatcaacgagaaaaaggaggatggcaaggtgttttggcagaatctggctggctacaagagacaggaagccctgagaccatacctgagcagcgaggaagatcggaagaagggaaagaaattcgctcggtaccagctgggcgacctgctgctgcacctggaaaagaagcacggcgaggactggggaaaggtgtacgacgaggcctgggagcggattgacaagaaagtggaaggcctgagcaagcacatcaagctggaagaggaacggagaagcgaggacgcccagagcaaggccgccctgaccgactggctgcgggctaaggccagcttcgtgatcgagggcctgaaggaggccgacaaggacgagttctgcagatgcgagctgaagctgcagaagtggtacggggacctgcggggaaagcccttcgccatcgaagccgagaacagcatcctggacatcagcggcttcagcaagcagtacaactgtgccttcatctggcagaaggacggcgtgaagaagctgaacctgtacctgatcatcaactacttcaagggcggcaagctgcggttcaagaagatcaaacctgaagccttcgaagccaacagattctacaccgtgatcaacaaaaagagcggcgagatcgtgcccatggaggtgaacttcaacttcgacgaccccaacctgatcatcctgcctctggcctttggcaagagacagggcagagaattcatctggaacgacctgctgtccctggaaaccggcagcctgaagctggccaacggaagagtgatcgagaagacactgtacaacagaagaacccggcaggatgagcctgccctgttcgtggccctgaccttcgagcggcgggaggtcctggactcctccaatatcaaaccaatgaacctgatcggcgtggcaagaggcgaaaacatccccgccgtgatcgccctgaccgaccccgagggctgcccactgagccggtttaaggatagcctgggaaacccaacccacatcctgagaatcggcgagagctataaggagaagcagcggaccatccaggccaagaaggaggtggagcagcggagagccggcggctacagccggaagtacgccagcaaagccaagaatctggcagacgatatggtgagaaacaccgctagagatctgctgtactacgccgtgacccaggatgccatgctgatcttcgccaacctgagccggggcttcggccggcagggcaagcggaccttcatggccgagagacagtacacacggatggaggactggctgaccgccaagctggcctacgagggcctgagcaagacctacctgtccaagacactggcccagtacacctccaagacatgcagcaactgtgggtttaccatcaccagcgccgactacgacagggtgctggagaagctgaagaagacagcaacaggctggatgaccacaattaacggcaaggagctgaaggtggagggccagattacctactacaacagatacaagagacagaacgtagtcaaggacctgtccgtcgagctggatagactgagcgaagaatctgtgaacaacgacatctcctcctggacaaagggcagaagcggagaagctctgagcctcctgaagaaaagattctcccatagacccgtgcaggagaagttcgtgtgcctgaactgcggcttcgagacacacgcagccgagcaagccgccctgaacatcgccagatcctggctgttcctgcggagccaggagtacaagaaataccagacaaacaagacaaccggcaacaccgataagagagccttcgtcgagacctggcagtccttttaccggaagaagcttaaggaggtgtggaaacctgccgtgcggtctggcggatctggcggaggctccttccaccagctggtgaccttcgaggacgtggccgtgtacctgagcaaggaggagtggaagaggctgaacctggcccagagggagctgtacagggacgtgatgctggagaactacgagaacctgctgagcctgggcttccccgtgagcaagcccgacatcatcagccagctggagcagaggaaggaggcctggatcgtgcagggccccgagaagaggaagttcagccagaacgcccacagggacggcggcccaagcagcggcgcccctcctcccagcggcggcagcccagccggctccccaacctctaccgaggagggcacctctgagtccgccacccccgagagcggccctggcacctccaccgagcccagcgagggcagcgcacccggcagccctgccggcagccccacctccacagaggagggaaccagcaccgagcccagcgaaggcagcgccccaggcaccagcaccgagcctagtgagcaggagattaaacggatcaacaagatcagaagaagacttgtgaaagacagcaacaccaagaaggccggcaagacaggccccatgaaaaccctgctggttagagtgatgacacccgatctgagagagcggctggaaaacctgagaaagaagcctgaaaatatcccccagcccatcagcaatacatctagagccaacctgaataagctgctgaccgattacaccgaaatgaagaaggcgatcctgcatgtgtactgggaagagttccagaaggaccctgtgggcctgatgagccgggtggcccagcctgccagcaagaagatcgatcagaacaagctgaaacctgagatggacgagaagggcaacctgaccaccgccggctttgcctgctctcagtgtggccagcccctgttcgtgtacaagctggagcaggtgtctgagaagggcaaggcttacaccaactacttcggacggtgcaatgtggccgagcacgaaaagctgatcctgctggcccagctgaagcccgagaaggatagcgacgaagccgtgacatatagcctgggaaagtttgggcagagggccctggatttctacagcattcatgtgaccaaggagtccacccaccccgtgaagcccctggcccagatcgccggaaacagatacgcctccggacctgtgggaaaggccctgagcgacgcatgtatgggcacaatcgcctccttcctgtctaagtaccaggacatcatcatcgaacaccagaaggtggtgaagggcaaccagaagagactggagagcctgcgggagctggccggcaaggaaaacctggaataccctagcgtgaccctgccacctcagcctcacaccaaggagggcgttgatgcctacaacgaagtgatcgcccgggtgcgaatgtgggtgaacctgaacctgtggcagaagctgaagctaagcagagatgatgccaagcctctgctgagactgaagggattcccttcctttcctctggtcgagagacaggccaacgaagtggactggtgggacatggtgtgtaacgtgaagaagctgatcaacgagaaaaaggaggatggcaaggtgttttggcagaatctggctggctacaagagacaggaagccctgagaccatacctgagcagcgaggaagatcggaagaagggaaagaaattcgctcggtaccagctgggcgacctgctgctgcacctggaaaagaagcacggcgaggactggggaaaggtgtacgacgaggcctgggagcggattgacaagaaagtggaaggcctgagcaagcacatcaagctggaagaggaacggagaagcgaggacgcccagagcaaggccgccctgaccgactggctgcgggctaaggccagcttcgtgatcgagggcctgaaggaggccgacaaggacgagttctgcagatgcgagctgaagctgcagaagtggtacggggacctgcggggaaagcccttcgccatcgaagccgagaacagcatcctggacatcagcggcttcagcaagcagtacaactgtgccttcatctggcagaaggacggcgtgaagaagctgaacctgtacctgatcatcaactacttcaagggcggcaagctgcggttcaagaagatcaaacctgaagccttcgaagccaacagattctacaccgtgatcaacaaaaagagcggcgagatcgtgcccatggaggtgaacttcaacttcgacgaccccaacctgatcatcctgcctctggcctttggcaagagacagggcagagaattcatctggaacgacctgctgtccctggaaaccggcagcctgaagctggccaacggaagagtgatcgagaagacactgtacaacagaagaacccggcaggatgagcctgccctgttcgtggccctgaccttcgagcggcgggaggtcctggactcctccaatatcaaaccaatgaacctgatcggcgtggcaagaggcgaaaacatccccgccgtgatcgccctgaccgaccccgagggctgcccactgagccggtttaaggatagcctgggaaacccaacccacatcctgagaatcggcgagagctataaggagaagcagcggaccatccaggccaagaaggaggtggagcagcggagagccggcggctacagccggaagtacgccagcaaagccaagaatctggcagacgatatggtgagaaacaccgctagagatctgctgtactacgccgtgacccaggatgccatgctgatcttcgccaacctgagccggggcttcggccggcagggcaagcggaccttcatggccgagagacagtacacacggatggaggactggctgaccgccaagctggcctacgagggcctgagcaagacctacctgtccaagacactggcccagtacacctccaagacatgcagcaactgtgggtttaccatcaccagcgccgactacgacagggtgctggagaagctgaagaagacagcaacaggctggatgaccacaattaacggcaaggagctgaaggtggagggccagattacctactacaacagatacaagagacagaacgtagtcaaggacctgtccgtcgagctggatagactgagcgaagaatctgtgaacaacgacatctcctcctggacaaagggcagaagcggagaagctctgagcctcctgaagaaaagattctcccatagacccgtgcaggagaagttcgtgtgcctgaactgcggcttcgagacacacgcagccgagcaagccgccctgaacatcgccagatcctggctgttcctgcggagccaggagtacaagaaataccagacaaacaagacaaccggcaacaccgataagagagccttcgtcgagacctggcagtccttttaccggaagaagcttaaggaggtgtggaaacctgccgtgcggtctggcggatctggcggaggctcctttccaccagctggtgaccttcgaggacgtggccgtgtacctgagcaaggaggagtggaagaggctgaacctggcccagagggagctgtacagggacgtgatgctggagaactacgagaacctgctgagcctgggcttccccgtgagcaagcccgacatcatcagccagctggagcagaggaaggaggcctggatcgtgcagggccccgagaagaggaagttcagccagaacgcccacagggacggatctggctccggcagcggccccaagaaaaagagaaaagtctaagctgccttctgcggggcttgccttctggccatgcccttcttctctcccttgcacctgtacctcttggtctttgaataaagcctgagtaggaaggctagcaaaaaaaaaaaaaaaaaaaaaaaaaaaaaaaaaaaaaaaaaaaaaaaaaaaaaaaaaaaaaaaaaaaaaaaaaaaaaaaa

SEQ ID NO: 16522 - RNA, 9485 nt, synthetic construct
  source 1..9485: mol_type = other RNA
aggaaataagagagaaaagaagagtaagaagaaatataagagccaccatggcccctaagaagaagcgtaaagtgagccggatggaacgcctcgtctacgaggtgcggcagaagtgcagaaacatcgaggacatctgcatctcctgcggatctctgaacgtgaccctggagcacccactgttcatcggcggcatgtgccagaactgtaaaaactgttttctggagtgtgcctatcaatacgacgatgacggctaccagagctactgcaccatctgttgcggcggaagagaggtgctgatgtgtggaaataacaactgctgccggtgcttctgcgtggaatgcgtggacctgctggtgggccccggcgccgcccaggccgctattaaggaagatccttggaactgctacatgtgcggccacaagggcacatacggcctgctgagacggagagaggactggcctagcagactgcagatgttcttcgccaataaccacgaccaggagttcgacccccctaaggtgtaccctcccgtccccgccgagaagagaaagcccatccgggtcctgagcctgttcgatggcatcgccaccggtctgctggtgctgaaggacctgggcatccaggtggataggtacattgcctccgaggtgtgcgaggactccatcaccgtgggaatggtgcgtcatcagggcaagatcatgtacgtgggcgacgtgcggagcgtgacacagaagcatatccaggagtggggccctttcgacctggtgatcggcggcagcccttgcaatgacctgagcatcgtgaacccagcccggaagggcctgtacgagggaaccggcagactgttcttcgagttttacagactgctgcacgacgcccggcctaaggaaggcgacgaccggcccttcttttggctgttcgagaatgtggtggccatgggagtcagcgacaagcgggatattagccggttcctggagagcaaccccgtgatgatcgatgccaaggaagtgagcgccgcccaccgggccagatacttctggggcaatctgcctggcatgaacagacccctggccagcaccgtgaacgacaagctggagctgcaggagtgcctggagcacggccggatcgccaagttcagcaaggtgagaaccatcaccacccgaagcaacagcatcaaacaaggcaaggaccagcactttcctgtgttcatgaacgagaaggaggacatcctgtggtgtaccgagatggagagagtgttcgggttcccagtccactacacagatgtcagcaacatgtctagactggccagacagagactgctgggaagaagctggtccgtccctgtgatcagacacctgttcgcccctctgaaggagtacttcgcctgcgtgagcagcggcaacagcaacgccaacagccggggccccagcttctctagcggcctggtgccactgtccctgagagggagccacatgggccccatggagatctacaaaaccgtgagcgcctggaagcggcagcctgtgcgcgtgctgagcctgtttcggaatatcgataaagtcctgaaaagcctgggattcctggagagcggctctggctccggcggtggcaccctgaagtacgtggaggatgtgacaaacgtggtcagacgggatgtggagaagtggggccccttcgatctggtgtacggcagcacccaacccctgggcagctcttgtgaccggtgccctggctggtacatgtttcagttccaccggatcctgcagtacgccctgccgagacaggagtcccagcggccattcttttggattttcatggacaacttgctgctgaccgaggatgaccaggaaactaccactcggttcctgcagaccgaagccgtgaccctgcaggacgtgagaggccgggactaccagaacgccatgcgggtgtggtccaacatccctggactgaaaagcaagcacgcacctctgacccctaaagaagaggagtacctgcaggcccaggtgcggagcagaagcaagctggacgcccctaaggtggatctgctggtgaagaattgcctcctgcccctgagagagtacttcaagtatttcagccagaatagtctgcccctgggaggcagcggcggcggcgccctggtgacatttgaggacgtcgccgtgcggttcacccaggaggaatgggctctgctggatccttctcagaaaatcctgtaccgggacgtgatgagagagacataccggaatctgacctccgtgggcatcaactgggaatgttgggaccttgaagcctgcttcagaagcctgggaagaaacctgagagtgcaggtggtgaagagaaagtgcgagctgaccaacagcggcccctgcgccgagggcggcccaagcagcggcgcccctcctcccagcggcggcagcccagccggctccccaacctctaccgaggagggcacctctgagtccgccacccccgagagcggccctggcacctccaccgagcccagcgagggcagcgcacccggcagccctgccggcagccccacctccacagaggagggaaccagcaccgagcccagcgaaggcagcgccccaggcaccagcaccgagcctagtgagcaggagattaaacggatcaacaagatcagaagaagacttgtgaaagacagcaacaccaagaaggccggcaagacaggccccatgaaaaccctgctggttagagtgatgacacccgatctgagagagcggctggaaaacctgagaaagaagcctgaaaatatcccccagcccatcagcaatacatctagagccaacctgaataagctgctgaccgattacaccgaaatgaagaaggcgatcctgcatgtgtactgggaagagttccagaaggaccctgtgggcctgatgagccgggtggcccagcctgccagcaagaagatcgatcagaacaagctgaaacctgagatggacgagaagggcaacctgaccaccgccggctttgcctgctctcagtgtggccagcccctgttcgtgtacaagctggagcaggtgtctgagaagggcaaggcttacaccaactacttcggacggtgcaatgtggccgagcacgaaaagctgatcctgctggcccagctgaagcccgagaaggatagcgacgaagccgtgacatatagcctgggaaagtttgggcagagggccctggatttctacagcattcatgtgaccaaggagtccacccaccccgtgaagcccctggcccagatcgccggaaacagatacgcctccggacctgtgggaaaggccctgagcgacgcatgtatgggcacaatcgcctccttcctgtctaagtaccaggacatcatcatcgaacaccagaaggtggtgaagggcaaccagaagagactggagagcctgcgggagctggccggcaaggaaaacctggaataccctagcgtgaccctgccacctcagcctcacaccaaggagggcgttgatgcctacaacgaagtgatcgcccgggtgcgaatgtgggtgaacctgaacctgtggcagaagctgaagctaagcagagatgatgccaagcctctgctgagactgaagggattcccttcctttcctctggtcgagagacaggccaacgaagtggactggtgggacatggtgtgtaacgtgaagaagctgatcaacgagaaaaaggaggatggcaaggtgttttggcagaatctggctggctacaagagacaggaagccctgagaccatacctgagcagcgaggaagatcggaagaagggaaagaaattcgctcggtaccagctgggcgacctgctgctgcacctggaaaagaagcacggcgaggactggggaaaggtgtacgacgaggcctgggagcggattgacaagaaagtggaaggcctgagcaagcacatcaagctggaagaggaacggagaagcgaggacgcccagagcaaggccgccctgaccgactggctgcgggctaaggccagcttcgtgatcgagggcctgaaggaggccgacaaggacgagttctgcagatgcgagctgaagctgcagaagtggtacggggacctgcggggaaagcccttcgccatcgaagccgagaacagcatcctggacatcagcggcttcagcaagcagtacaactgtgccttcatctggcagaaggacggcgtgaagaagctgaacctgtacctgatcatcaactacttcaagggcggcaagctgcggttcaagaagatcaaacctgaagccttcgaagccaacagattctacaccgtgatcaacaaaaagagcggcgagatcgtgcccatggaggtgaacttcaacttcgacgaccccaacctgatcatcctgcctctggcctttggcaagagacagggcagagaattcatctggaacgacctgctgtccctggaaaccggcagcctgaagctggccaacggaagagtgatcgagaagacactgtacaacagaagaacccggcaggatgagcctgccctgttcgtggccctgaccttcgagcggcgggaggtcctggactcctccaatatcaaaccaatgaacctgatcggcgtggcaagaggcgaaaacatccccgccgtgatcgccctgaccgaccccgagggctgcccactgagccggtttaaggatagcctgggaaacccaacccacatcctgagaatcggcgagagctataaggagaagcagcggaccatccaggccaagaaggaggtggagcagcggagagccggcggctacagccggaagtacgccagcaaagccaagaatctggcagacgatatggtgagaaacaccgctagagatctgctgtactacgccgtgacccaggatgccatgctgatcttcgccaacctgagccggggcttcggccggcagggcaagcggaccttcatggccgagagacagtacacacggatggaggactggctgaccgccaagctggcctacgagggcctgagcaagacctacctgtccaagacactggcccagtacacctccaagacatgcagcaactgtgggtttaccatcaccagcgccgactacgacagggtgctggagaagctgaagaagacagcaacaggctggatgaccacaattaacggcaaggagctgaaggtggagggccagattacctactacaacagatacaagagacagaacgtagtcaaggacctgtccgtcgagctggatagactgagcgaagaatctgtgaacaacgacatctcctcctggacaaagggcagaagcggagaagctctgagcctcctgaagaaaagattctcccatagacccgtgcaggagaagttcgtgtgcctgaactgcggcttcgagacacacgcagccgagcaagccgccctgaacatcgccagatcctggctgttcctgcggagccaggagtacaagaaataccagacaaacaagacaaccggcaacaccgataagagagccttcgtcgagacctggcagtccttttaccggaagaagcttaaggaggtgtggaaacctgccgtgcggtctggcggatctggcggaggctccgccagggccagcctgagcttcgaggacgtggccgtgggcttcagctgggaggagtggcagctgctggcccccagccagaaggacctgtacagggacgtgatgctggagaactacaggaacctggtgagcgtgggctaccaggccagcaagctggacagcctgttccagagcgagcagggcggccccccctggaccgtggagggcgccgcccagagccagacctgccccgaggagatctgggagggcggcccaagcagcggcgcccctcctcccagcggcggcagcccagccggctccccaacctctaccgaggagggcacctctgagtccgccacccccgagagcggccctggcacctccaccgagcccagcgagggcagcgcacccggcagccctgccggcagccccacctccacagaggagggaaccagcaccgagcccagcgaaggcagcgccccaggcaccagcaccgagcctagtgagcaggagattaaacggatcaacaagatcagaagaagacttgtgaaagacagcaacaccaagaaggccggcaagacaggccccatgaaaaccctgctggttagagtgatgacacccgatctgagagagcggctggaaaacctgagaaagaagcctgaaaatatcccccagcccatcagcaatacatctagagccaacctgaataagctgctgaccgattacaccgaaatgaagaaggcgatcctgcatgtgtactgggaagagttccagaaggaccctgtgggcctgatgagccgggtggcccagcctgccagcaagaagatcgatcagaacaagctgaaacctgagatggacgagaagggcaacctgaccaccgccggctttgcctgctctcagtgtggccagcccctgttcgtgtacaagctggagcaggtgtctgagaagggcaaggcttacaccaactacttcggacggtgcaatgtggccgagcacgaaaagctgatcctgctggcccagctgaagcccgagaaggatagcgacgaagccgtgacatatagcctgggaaagtttgggcagagggccctggatttctacagcattcatgtgaccaaggagtccacccaccccgtgaagcccctggcccagatcgccggaaacagatacgcctccggacctgtgggaaaggccctgagcgacgcatgtatgggcacaatcgcctccttcctgtctaagtaccaggacatcatcatcgaacaccagaaggtggtgaagggcaaccagaagagactggagagcctgcgggagctggccggcaaggaaaacctggaataccctagcgtgaccctgccacctcagcctcacaccaaggagggcgttgatgcctacaacgaagtgatcgcccgggtgcgaatgtgggtgaacctgaacctgtggcagaagctgaagctaagcagagatgatgccaagcctctgctgagactgaagggattcccttcctttcctctggtcgagagacaggccaacgaagtggactggtgggacatggtgtgtaacgtgaagaagctgatcaacgagaaaaaggaggatggcaaggtgttttggcagaatctggctggctacaagagacaggaagccctgagaccatacctgagcagcgaggaagatcggaagaagggaaagaaattcgctcggtaccagctgggcgacctgctgctgcacctggaaaagaagcacggcgaggactggggaaaggtgtacgacgaggcctgggagcggattgacaagaaagtggaaggcctgagcaagcacatcaagctggaagaggaacggagaagcgaggacgcccagagcaaggccgccctgaccgactggctgcgggctaaggccagcttcgtgatcgagggcctgaaggaggccgacaaggacgagttctgcagatgcgagctgaagctgcagaagtggtacggggacctgcggggaaagcccttcgccatcgaagccgagaacagcatcctggacatcagcggcttcagcaagcagtacaactgtgccttcatctggcagaaggacggcgtgaagaagctgaacctgtacctgatcatcaactacttcaagggcggcaagctgcggttcaagaagatcaaacctgaagccttcgaagccaacagattctacaccgtgatcaacaaaaagagcggcgagatcgtgcccatggaggtgaacttcaacttcgacgaccccaacctgatcatcctgcctctggcctttggcaagagacagggcagagaattcatctggaacgacctgctgtccctggaaaccggcagcctgaagctggccaacggaagagtgatcgagaagacactgtacaacagaagaacccggcaggatgagcctgccctgttcgtggccctgaccttcgagcggcgggaggtcctggactcctccaatatcaaaccaatgaacctgatcggcgtggcaagaggcgaaaacatccccgccgtgatcgccctgaccgaccccgagggctgcccactgagccggtttaaggatagcctgggaaacccaacccacatcctgagaatcggcgagagctataaggagaagcagcggaccatccaggccaagaaggaggtggagcagcggagagccggcggctacagccggaagtacgccagcaaagccaagaatctggcagacgatatggtgagaaacaccgctagagatctgctgtactacgccgtgacccaggatgccatgctgatcttcgccaacctgagccggggcttcggccggcagggcaagcggaccttcatggccgagagacagtacacacggatggaggactggctgaccgccaagctggcctacgagggcctgagcaagacctacctgtccaagacactggcccagtacacctccaagacatgcagcaactgtgggtttaccatcaccagcgccgactacgacagggtgctggagaagctgaagaagacagcaacaggctggatgaccacaattaacggcaaggagctgaaggtggagggccagattacctactacaacagatacaagagacagaacgtagtcaaggacctgtccgtcgagctggatagactgagcgaagaatctgtgaacaacgacatctcctcctggacaaagggcagaagcggagaagctctgagcctcctgaagaaaagattctcccatagacccgtgcaggagaagttcgtgtgcctgaactgcggcttcgagacacacgcagccgagcaagccgccctgaacatcgccagatcctggctgttcctgcggagccaggagtacaagaaataccagacaaacaagacaaccggcaacaccgataagagagccttcgtcgagacctggcagtccttttaccggaagaagcttaaggaggtgtggaaacctgccgtgcggtctggcggatctggcggaggctcctgccagggccagcctgagcttcgaggacgtggccgtgggcttcagctgggaggagtggcagctgctggcccccagccagaaggacctgtacagggacgtgatgctggagaactacaggaacctggtgagcgtgggctaccaggccagcaagctggacagcctgttccagagcgagcagggcggccccccctggaccgtggagggcgccgcccagagccagacctgccccgaggagatctgggagggatctggctccggcagcggccccaagaaaaagagaaaagtctaagctgccttctgcggggcttgccttctggccatgcccttcttctctcccttgcacctgtacctcttggtctttgaataaagcctgagtaggaaggctagcaaaaaaaaaaaaaaaaaaaaaaaaaaaaaaaaaaaaaaaaaaaaaaaaaaaaaaaaaaaaaaaaaaaaaaaaaaaaaaaa

SEQ ID NO: 16523 - RNA, 9479 nt, synthetic construct
  source 1..9479: mol_type = other RNA
aggaaataagagagaaaagaagagtaagaagaaatataagagccaccatggcccctaagaagaagcgtaaagtgagccggatggaacgcctcgtctacgaggtgcggcagaagtgcagaaacatcgaggacatctgcatctcctgcggatctctgaacgtgaccctggagcacccactgttcatcggcggcatgtgccagaactgtaaaaactgttttctggagtgtgcctatcaatacgacgatgacggctaccagagctactgcaccatctgttgcggcggaagagaggtgctgatgtgtggaaataacaactgctgccggtgcttctgcgtggaatgcgtggacctgctggtgggccccggcgccgcccaggccgctattaaggaagatccttggaactgctacatgtgcggccacaagggcacatacggcctgctgagacggagagaggactggcctagcagactgcagatgttcttcgccaataaccacgaccaggagttcgacccccctaaggtgtaccctcccgtccccgccgagaagagaaagcccatccgggtcctgagcctgttcgatggcatcgccaccggtctgctggtgctgaaggacctgggcatccaggtggataggtacattgcctccgaggtgtgcgaggactccatcaccgtgggaatggtgcgtcatcagggcaagatcatgtacgtgggcgacgtgcggagcgtgacacagaagcatatccaggagtggggccctttcgacctggtgatcggcggcagcccttgcaatgacctgagcatcgtgaacccagcccggaagggcctgtacgagggaaccggcagactgttcttcgagttttacagactgctgcacgacgcccggcctaaggaaggcgacgaccggcccttcttttggctgttcgagaatgtggtggccatgggagtcagcgacaagcgggatattagccggttcctggagagcaaccccgtgatgatcgatgccaaggaagtgagcgccgcccaccgggccagatacttctggggcaatctgcctggcatgaacagacccctggccagcaccgtgaacgacaagctggagctgcaggagtgcctggagcacggccggatcgccaagttcagcaaggtgagaaccatcaccacccgaagcaacagcatcaaacaaggcaaggaccagcactttcctgtgttcatgaacgagaaggaggacatcctgtggtgtaccgagatggagagagtgttcgggttcccagtccactacacagatgtcagcaacatgtctagactggccagacagagactgctgggaagaagctggtccgtccctgtgatcagacacctgttcgcccctctgaaggagtacttcgcctgcgtgagcagcggcaacagcaacgccaacagccggggccccagcttctctagcggcctggtgccactgtccctgagagggagccacatgggccccatggagatctacaaaaccgtgagcgcctggaagcggcagcctgtgcgcgtgctgagcctgtttcggaatatcgataaagtcctgaaaagcctgggattcctggagagcggctctggctccggcggtggcaccctgaagtacgtggaggatgtgacaaacgtggtcagacgggatgtggagaagtggggccccttcgatctggtgtacggcagcacccaacccctgggcagctcttgtgaccggtgccctggctggtacatgtttcagttccaccggatcctgcagtacgccctgccgagacaggagtcccagcggccattcttttggattttcatggacaacttgctgctgaccgaggatgaccaggaaactaccactcggttcctgcagaccgaagccgtgaccctgcaggacgtgagaggccgggactaccagaacgccatgcgggtgtggtccaacatccctggactgaaaagcaagcacgcacctctgacccctaaagaagaggagtacctgcaggcccaggtgcggagcagaagcaagctggacgcccctaaggtggatctgctggtgaagaattgcctcctgcccctgagagagtacttcaagtatttcagccagaatagtctgcccctgggaggcagcggcggcggcgccctggtgacatttgaggacgtcgccgtgcggttcacccaggaggaatgggctctgctggatccttctcagaaaatcctgtaccgggacgtgatgagagagacataccggaatctgacctccgtgggcatcaactgggaatgttgggaccttgaagcctgcttcagaagcctgggaagaaacctgagagtgcaggtggtgaagagaaagtgcgagctgaccaacagcggcccctgcgccgagggcggcccaagcagcggcgcccctcctcccagcggcggcagcccagccggctccccaacctctaccgaggagggcacctctgagtccgccacccccgagagcggccctggcacctccaccgagcccagcgagggcagcgcacccggcagccctgccggcagccccacctccacagaggagggaaccagcaccgagcccagcgaaggcagcgccccaggcaccagcaccgagcctagtgagcaggagattaaacggatcaacaagatcagaagaagacttgtgaaagacagcaacaccaagaaggccggcaagacaggccccatgaaaaccctgctggttagagtgatgacacccgatctgagagagcggctggaaaacctgagaaagaagcctgaaaatatcccccagcccatcagcaatacatctagagccaacctgaataagctgctgaccgattacaccgaaatgaagaaggcgatcctgcatgtgtactgggaagagttccagaaggaccctgtgggcctgatgagccgggtggcccagcctgccagcaagaagatcgatcagaacaagctgaaacctgagatggacgagaagggcaacctgaccaccgccggctttgcctgctctcagtgtggccagcccctgttcgtgtacaagctggagcaggtgtctgagaagggcaaggcttacaccaactacttcggacggtgcaatgtggccgagcacgaaaagctgatcctgctggcccagctgaagcccgagaaggatagcgacgaagccgtgacatatagcctgggaaagtttgggcagagggccctggatttctacagcattcatgtgaccaaggagtccacccaccccgtgaagcccctggcccagatcgccggaaacagatacgcctccggacctgtgggaaaggccctgagcgacgcatgtatgggcacaatcgcctccttcctgtctaagtaccaggacatcatcatcgaacaccagaaggtggtgaagggcaaccagaagagactggagagcctgcgggagctggccggcaaggaaaacctggaataccctagcgtgaccctgccacctcagcctcacaccaaggagggcgttgatgcctacaacgaagtgatcgcccgggtgcgaatgtgggtgaacctgaacctgtggcagaagctgaagctaagcagagatgatgccaagcctctgctgagactgaagggattcccttcctttcctctggtcgagagacaggccaacgaagtggactggtgggacatggtgtgtaacgtgaagaagctgatcaacgagaaaaaggaggatggcaaggtgttttggcagaatctggctggctacaagagacaggaagccctgagaccatacctgagcagcgaggaagatcggaagaagggaaagaaattcgctcggtaccagctgggcgacctgctgctgcacctggaaaagaagcacggcgaggactggggaaaggtgtacgacgaggcctgggagcggattgacaagaaagtggaaggcctgagcaagcacatcaagctggaagaggaacggagaagcgaggacgcccagagcaaggccgccctgaccgactggctgcgggctaaggccagcttcgtgatcgagggcctgaaggaggccgacaaggacgagttctgcagatgcgagctgaagctgcagaagtggtacggggacctgcggggaaagcccttcgccatcgaagccgagaacagcatcctggacatcagcggcttcagcaagcagtacaactgtgccttcatctggcagaaggacggcgtgaagaagctgaacctgtacctgatcatcaactacttcaagggcggcaagctgcggttcaagaagatcaaacctgaagccttcgaagccaacagattctacaccgtgatcaacaaaaagagcggcgagatcgtgcccatggaggtgaacttcaacttcgacgaccccaacctgatcatcctgcctctggcctttggcaagagacagggcagagaattcatctggaacgacctgctgtccctggaaaccggcagcctgaagctggccaacggaagagtgatcgagaagacactgtacaacagaagaacccggcaggatgagcctgccctgttcgtggccctgaccttcgagcggcgggaggtcctggactcctccaatatcaaaccaatgaacctgatcggcgtggcaagaggcgaaaacatccccgccgtgatcgccctgaccgaccccgagggctgcccactgagccggtttaaggatagcctgggaaacccaacccacatcctgagaatcggcgagagctataaggagaagcagcggaccatccaggccaagaaggaggtggagcagcggagagccggcggctacagccggaagtacgccagcaaagccaagaatctggcagacgatatggtgagaaacaccgctagagatctgctgtactacgccgtgacccaggatgccatgctgatcttcgccaacctgagccggggcttcggccggcagggcaagcggaccttcatggccgagagacagtacacacggatggaggactggctgaccgccaagctggcctacgagggcctgagcaagacctacctgtccaagacactggcccagtacacctccaagacatgcagcaactgtgggtttaccatcaccagcgccgactacgacagggtgctggagaagctgaagaagacagcaacaggctggatgaccacaattaacggcaaggagctgaaggtggagggccagattacctactacaacagatacaagagacagaacgtagtcaaggacctgtccgtcgagctggatagactgagcgaagaatctgtgaacaacgacatctcctcctggacaaagggcagaagcggagaagctctgagcctcctgaagaaaagattctcccatagacccgtgcaggagaagttcgtgtgcctgaactgcggcttcgagacacacgcagccgagcaagccgccctgaacatcgccagatcctggctgttcctgcggagccaggagtacaagaaataccagacaaacaagacaaccggcaacaccgataagagagccttcgtcgagacctggcagtccttttaccggaagaagcttaaggaggtgtggaaacctgccgtgcggtctggcggatctggcggaggctccacccagcccgacgaggacctgcacctgcaggccgaggagacccagctggtgaaggagagcgtgaccttcaaggacgtggccatcgacttcaccctggaggagtggagactgatggaccccacccagagaaacctgcacaaggacgtgatgctggagaactacagaaacctggtgagcctgggcctggccgtgagcaagcccgacatgatcagccacctggagaacggcaagggcccctggggcggcccaagcagcggcgcccctcctcccagcggcggcagcccagccggctccccaacctctaccgaggagggcacctctgagtccgccacccccgagagcggccctggcacctccaccgagcccagcgagggcagcgcacccggcagccctgccggcagccccacctccacagaggagggaaccagcaccgagcccagcgaaggcagcgccccaggcaccagcaccgagcctagtgagcaggagattaaacggatcaacaagatcagaagaagacttgtgaaagacagcaacaccaagaaggccggcaagacaggccccatgaaaaccctgctggttagagtgatgacacccgatctgagagagcggctggaaaacctgagaaagaagcctgaaaatatcccccagcccatcagcaatacatctagagccaacctgaataagctgctgaccgattacaccgaaatgaagaaggcgatcctgcatgtgtactgggaagagttccagaaggaccctgtgggcctgatgagccgggtggcccagcctgccagcaagaagatcgatcagaacaagctgaaacctgagatggacgagaagggcaacctgaccaccgccggctttgcctgctctcagtgtggccagcccctgttcgtgtacaagctggagcaggtgtctgagaagggcaaggcttacaccaactacttcggacggtgcaatgtggccgagcacgaaaagctgatcctgctggcccagctgaagcccgagaaggatagcgacgaagccgtgacatatagcctgggaaagtttgggcagagggccctggatttctacagcattcatgtgaccaaggagtccacccaccccgtgaagcccctggcccagatcgccggaaacagatacgcctccggacctgtgggaaaggccctgagcgacgcatgtatgggcacaatcgcctccttcctgtctaagtaccaggacatcatcatcgaacaccagaaggtggtgaagggcaaccagaagagactggagagcctgcgggagctggccggcaaggaaaacctggaataccctagcgtgaccctgccacctcagcctcacaccaaggagggcgttgatgcctacaacgaagtgatcgcccgggtgcgaatgtgggtgaacctgaacctgtggcagaagctgaagctaagcagagatgatgccaagcctctgctgagactgaagggattcccttcctttcctctggtcgagagacaggccaacgaagtggactggtgggacatggtgtgtaacgtgaagaagctgatcaacgagaaaaaggaggatggcaaggtgttttggcagaatctggctggctacaagagacaggaagccctgagaccatacctgagcagcgaggaagatcggaagaagggaaagaaattcgctcggtaccagctgggcgacctgctgctgcacctggaaaagaagcacggcgaggactggggaaaggtgtacgacgaggcctgggagcggattgacaagaaagtggaaggcctgagcaagcacatcaagctggaagaggaacggagaagcgaggacgcccagagcaaggccgccctgaccgactggctgcgggctaaggccagcttcgtgatcgagggcctgaaggaggccgacaaggacgagttctgcagatgcgagctgaagctgcagaagtggtacggggacctgcggggaaagcccttcgccatcgaagccgagaacagcatcctggacatcagcggcttcagcaagcagtacaactgtgccttcatctggcagaaggacggcgtgaagaagctgaacctgtacctgatcatcaactacttcaagggcggcaagctgcggttcaagaagatcaaacctgaagccttcgaagccaacagattctacaccgtgatcaacaaaaagagcggcgagatcgtgcccatggaggtgaacttcaacttcgacgaccccaacctgatcatcctgcctctggcctttggcaagagacagggcagagaattcatctggaacgacctgctgtccctggaaaccggcagcctgaagctggccaacggaagagtgatcgagaagacactgtacaacagaagaacccggcaggatgagcctgccctgttcgtggccctgaccttcgagcggcgggaggtcctggactcctccaatatcaaaccaatgaacctgatcggcgtggcaagaggcgaaaacatccccgccgtgatcgccctgaccgaccccgagggctgcccactgagccggtttaaggatagcctgggaaacccaacccacatcctgagaatcggcgagagctataaggagaagcagcggaccatccaggccaagaaggaggtggagcagcggagagccggcggctacagccggaagtacgccagcaaagccaagaatctggcagacgatatggtgagaaacaccgctagagatctgctgtactacgccgtgacccaggatgccatgctgatcttcgccaacctgagccggggcttcggccggcagggcaagcggaccttcatggccgagagacagtacacacggatggaggactggctgaccgccaagctggcctacgagggcctgagcaagacctacctgtccaagacactggcccagtacacctccaagacatgcagcaactgtgggtttaccatcaccagcgccgactacgacagggtgctggagaagctgaagaagacagcaacaggctggatgaccacaattaacggcaaggagctgaaggtggagggccagattacctactacaacagatacaagagacagaacgtagtcaaggacctgtccgtcgagctggatagactgagcgaagaatctgtgaacaacgacatctcctcctggacaaagggcagaagcggagaagctctgagcctcctgaagaaaagattctcccatagacccgtgcaggagaagttcgtgtgcctgaactgcggcttcgagacacacgcagccgagcaagccgccctgaacatcgccagatcctggctgttcctgcggagccaggagtacaagaaataccagacaaacaagacaaccggcaacaccgataagagagccttcgtcgagacctggcagtccttttaccggaagaagcttaaggaggtgtggaaacctgccgtgcggtctggcggatctggcggaggctcctacccagcccgacgaggacctgcacctgcaggccgaggagacccagctggtgaaggagagcgtgaccttcaaggacgtggccatcgacttcaccctggaggagtggagactgatggaccccacccagagaaacctgcacaaggacgtgatgctggagaactacagaaacctggtgagcctgggcctggccgtgagcaagcccgacatgatcagccacctggagaacggcaagggcccctggggatctggctccggcagcggccccaagaaaaagagaaaagtctaagctgccttctgcggggcttgccttctggccatgcccttcttctctcccttgcacctgtacctcttggtctttgaataaagcctgagtaggaaggctagcaaaaaaaaaaaaaaaaaaaaaaaaaaaaaaaaaaaaaaaaaaaaaaaaaaaaaaaaaaaaaaaaaaaaaaaaaaaaaaaa

SEQ ID NO: 16524 - RNA, 9485 nt, synthetic construct
  source 1..9485: mol_type = other RNA
aggaaataagagagaaaagaagagtaagaagaaatataagagccaccatggcccctaagaagaagcgtaaagtgagccggatggaacgcctcgtctacgaggtgcggcagaagtgcagaaacatcgaggacatctgcatctcctgcggatctctgaacgtgaccctggagcacccactgttcatcggcggcatgtgccagaactgtaaaaactgttttctggagtgtgcctatcaatacgacgatgacggctaccagagctactgcaccatctgttgcggcggaagagaggtgctgatgtgtggaaataacaactgctgccggtgcttctgcgtggaatgcgtggacctgctggtgggccccggcgccgcccaggccgctattaaggaagatccttggaactgctacatgtgcggccacaagggcacatacggcctgctgagacggagagaggactggcctagcagactgcagatgttcttcgccaataaccacgaccaggagttcgacccccctaaggtgtaccctcccgtccccgccgagaagagaaagcccatccgggtcctgagcctgttcgatggcatcgccaccggtctgctggtgctgaaggacctgggcatccaggtggataggtacattgcctccgaggtgtgcgaggactccatcaccgtgggaatggtgcgtcatcagggcaagatcatgtacgtgggcgacgtgcggagcgtgacacagaagcatatccaggagtggggccctttcgacctggtgatcggcggcagcccttgcaatgacctgagcatcgtgaacccagcccggaagggcctgtacgagggaaccggcagactgttcttcgagttttacagactgctgcacgacgcccggcctaaggaaggcgacgaccggcccttcttttggctgttcgagaatgtggtggccatgggagtcagcgacaagcgggatattagccggttcctggagagcaaccccgtgatgatcgatgccaaggaagtgagcgccgcccaccgggccagatacttctggggcaatctgcctggcatgaacagacccctggccagcaccgtgaacgacaagctggagctgcaggagtgcctggagcacggccggatcgccaagttcagcaaggtgagaaccatcaccacccgaagcaacagcatcaaacaaggcaaggaccagcactttcctgtgttcatgaacgagaaggaggacatcctgtggtgtaccgagatggagagagtgttcgggttcccagtccactacacagatgtcagcaacatgtctagactggccagacagagactgctgggaagaagctggtccgtccctgtgatcagacacctgttcgcccctctgaaggagtacttcgcctgcgtgagcagcggcaacagcaacgccaacagccggggccccagcttctctagcggcctggtgccactgtccctgagagggagccacatgggccccatggagatctacaaaaccgtgagcgcctggaagcggcagcctgtgcgcgtgctgagcctgtttcggaatatcgataaagtcctgaaaagcctgggattcctggagagcggctctggctccggcggtggcaccctgaagtacgtggaggatgtgacaaacgtggtcagacgggatgtggagaagtggggccccttcgatctggtgtacggcagcacccaacccctgggcagctcttgtgaccggtgccctggctggtacatgtttcagttccaccggatcctgcagtacgccctgccgagacaggagtcccagcggccattcttttggattttcatggacaacttgctgctgaccgaggatgaccaggaaactaccactcggttcctgcagaccgaagccgtgaccctgcaggacgtgagaggccgggactaccagaacgccatgcgggtgtggtccaacatccctggactgaaaagcaagcacgcacctctgacccctaaagaagaggagtacctgcaggcccaggtgcggagcagaagcaagctggacgcccctaaggtggatctgctggtgaagaattgcctcctgcccctgagagagtacttcaagtatttcagccagaatagtctgcccctgggaggcagcggcggcggcgccctggtgacatttgaggacgtcgccgtgcggttcacccaggaggaatgggctctgctggatccttctcagaaaatcctgtaccgggacgtgatgagagagacataccggaatctgacctccgtgggcatcaactgggaatgttgggaccttgaagcctgcttcagaagcctgggaagaaacctgagagtgcaggtggtgaagagaaagtgcgagctgaccaacagcggcccctgcgccgagggcggcccaagcagcggcgcccctcctcccagcggcggcagcccagccggctccccaacctctaccgaggagggcacctctgagtccgccacccccgagagcggccctggcacctccaccgagcccagcgagggcagcgcacccggcagccctgccggcagccccacctccacagaggagggaaccagcaccgagcccagcgaaggcagcgccccaggcaccagcaccgagcctagtgagcaggagattaaacggatcaacaagatcagaagaagacttgtgaaagacagcaacaccaagaaggccggcaagacaggccccatgaaaaccctgctggttagagtgatgacacccgatctgagagagcggctggaaaacctgagaaagaagcctgaaaatatcccccagcccatcagcaatacatctagagccaacctgaataagctgctgaccgattacaccgaaatgaagaaggcgatcctgcatgtgtactgggaagagttccagaaggaccctgtgggcctgatgagccgggtggcccagcctgccagcaagaagatcgatcagaacaagctgaaacctgagatggacgagaagggcaacctgaccaccgccggctttgcctgctctcagtgtggccagcccctgttcgtgtacaagctggagcaggtgtctgagaagggcaaggcttacaccaactacttcggacggtgcaatgtggccgagcacgaaaagctgatcctgctggcccagctgaagcccgagaaggatagcgacgaagccgtgacatatagcctgggaaagtttgggcagagggccctggatttctacagcattcatgtgaccaaggagtccacccaccccgtgaagcccctggcccagatcgccggaaacagatacgcctccggacctgtgggaaaggccctgagcgacgcatgtatgggcacaatcgcctccttcctgtctaagtaccaggacatcatcatcgaacaccagaaggtggtgaagggcaaccagaagagactggagagcctgcgggagctggccggcaaggaaaacctggaataccctagcgtgaccctgccacctcagcctcacaccaaggagggcgttgatgcctacaacgaagtgatcgcccgggtgcgaatgtgggtgaacctgaacctgtggcagaagctgaagctaagcagagatgatgccaagcctctgctgagactgaagggattcccttcctttcctctggtcgagagacaggccaacgaagtggactggtgggacatggtgtgtaacgtgaagaagctgatcaacgagaaaaaggaggatggcaaggtgttttggcagaatctggctggctacaagagacaggaagccctgagaccatacctgagcagcgaggaagatcggaagaagggaaagaaattcgctcggtaccagctgggcgacctgctgctgcacctggaaaagaagcacggcgaggactggggaaaggtgtacgacgaggcctgggagcggattgacaagaaagtggaaggcctgagcaagcacatcaagctggaagaggaacggagaagcgaggacgcccagagcaaggccgccctgaccgactggctgcgggctaaggccagcttcgtgatcgagggcctgaaggaggccgacaaggacgagttctgcagatgcgagctgaagctgcagaagtggtacggggacctgcggggaaagcccttcgccatcgaagccgagaacagcatcctggacatcagcggcttcagcaagcagtacaactgtgccttcatctggcagaaggacggcgtgaagaagctgaacctgtacctgatcatcaactacttcaagggcggcaagctgcggttcaagaagatcaaacctgaagccttcgaagccaacagattctacaccgtgatcaacaaaaagagcggcgagatcgtgcccatggaggtgaacttcaacttcgacgaccccaacctgatcatcctgcctctggcctttggcaagagacagggcagagaattcatctggaacgacctgctgtccctggaaaccggcagcctgaagctggccaacggaagagtgatcgagaagacactgtacaacagaagaacccggcaggatgagcctgccctgttcgtggccctgaccttcgagcggcgggaggtcctggactcctccaatatcaaaccaatgaacctgatcggcgtggcaagaggcgaaaacatccccgccgtgatcgccctgaccgaccccgagggctgcccactgagccggtttaaggatagcctgggaaacccaacccacatcctgagaatcggcgagagctataaggagaagcagcggaccatccaggccaagaaggaggtggagcagcggagagccggcggctacagccggaagtacgccagcaaagccaagaatctggcagacgatatggtgagaaacaccgctagagatctgctgtactacgccgtgacccaggatgccatgctgatcttcgccaacctgagccggggcttcggccggcagggcaagcggaccttcatggccgagagacagtacacacggatggaggactggctgaccgccaagctggcctacgagggcctgagcaagacctacctgtccaagacactggcccagtacacctccaagacatgcagcaactgtgggtttaccatcaccagcgccgactacgacagggtgctggagaagctgaagaagacagcaacaggctggatgaccacaattaacggcaaggagctgaaggtggagggccagattacctactacaacagatacaagagacagaacgtagtcaaggacctgtccgtcgagctggatagactgagcgaagaatctgtgaacaacgacatctcctcctggacaaagggcagaagcggagaagctctgagcctcctgaagaaaagattctcccatagacccgtgcaggagaagttcgtgtgcctgaactgcggcttcgagacacacgcagccgagcaagccgccctgaacatcgccagatcctggctgttcctgcggagccaggagtacaagaaataccagacaaacaagacaaccggcaacaccgataagagagccttcgtcgagacctggcagtccttttaccggaagaagcttaaggaggtgtggaaacctgccgtgcggtctggcggatctggcggaggctccagctacaggagcaagaccatggcccagggcagcctgaccttcagcgacgtggccatcggcttcagccagcaggagtgggagtgcctggaccccgtgcagaagaccctgtacagggacgtgatgatggagaactacggcaacctggtgagcctgggccacagcatcagcaagcccaacgtgatcaccctgctggagcagggcaaggagccctggatcgtggtgagggaggagaccaggagctggggcggcccaagcagcggcgcccctcctcccagcggcggcagcccagccggctccccaacctctaccgaggagggcacctctgagtccgccacccccgagagcggccctggcacctccaccgagcccagcgagggcagcgcacccggcagccctgccggcagccccacctccacagaggagggaaccagcaccgagcccagcgaaggcagcgccccaggcaccagcaccgagcctagtgagcaggagattaaacggatcaacaagatcagaagaagacttgtgaaagacagcaacaccaagaaggccggcaagacaggccccatgaaaaccctgctggttagagtgatgacacccgatctgagagagcggctggaaaacctgagaaagaagcctgaaaatatcccccagcccatcagcaatacatctagagccaacctgaataagctgctgaccgattacaccgaaatgaagaaggcgatcctgcatgtgtactgggaagagttccagaaggaccctgtgggcctgatgagccgggtggcccagcctgccagcaagaagatcgatcagaacaagctgaaacctgagatggacgagaagggcaacctgaccaccgccggctttgcctgctctcagtgtggccagcccctgttcgtgtacaagctggagcaggtgtctgagaagggcaaggcttacaccaactacttcggacggtgcaatgtggccgagcacgaaaagctgatcctgctggcccagctgaagcccgagaaggatagcgacgaagccgtgacatatagcctgggaaagtttgggcagagggccctggatttctacagcattcatgtgaccaaggagtccacccaccccgtgaagcccctggcccagatcgccggaaacagatacgcctccggacctgtgggaaaggccctgagcgacgcatgtatgggcacaatcgcctccttcctgtctaagtaccaggacatcatcatcgaacaccagaaggtggtgaagggcaaccagaagagactggagagcctgcgggagctggccggcaaggaaaacctggaataccctagcgtgaccctgccacctcagcctcacaccaaggagggcgttgatgcctacaacgaagtgatcgcccgggtgcgaatgtgggtgaacctgaacctgtggcagaagctgaagctaagcagagatgatgccaagcctctgctgagactgaagggattcccttcctttcctctggtcgagagacaggccaacgaagtggactggtgggacatggtgtgtaacgtgaagaagctgatcaacgagaaaaaggaggatggcaaggtgttttggcagaatctggctggctacaagagacaggaagccctgagaccatacctgagcagcgaggaagatcggaagaagggaaagaaattcgctcggtaccagctgggcgacctgctgctgcacctggaaaagaagcacggcgaggactggggaaaggtgtacgacgaggcctgggagcggattgacaagaaagtggaaggcctgagcaagcacatcaagctggaagaggaacggagaagcgaggacgcccagagcaaggccgccctgaccgactggctgcgggctaaggccagcttcgtgatcgagggcctgaaggaggccgacaaggacgagttctgcagatgcgagctgaagctgcagaagtggtacggggacctgcggggaaagcccttcgccatcgaagccgagaacagcatcctggacatcagcggcttcagcaagcagtacaactgtgccttcatctggcagaaggacggcgtgaagaagctgaacctgtacctgatcatcaactacttcaagggcggcaagctgcggttcaagaagatcaaacctgaagccttcgaagccaacagattctacaccgtgatcaacaaaaagagcggcgagatcgtgcccatggaggtgaacttcaacttcgacgaccccaacctgatcatcctgcctctggcctttggcaagagacagggcagagaattcatctggaacgacctgctgtccctggaaaccggcagcctgaagctggccaacggaagagtgatcgagaagacactgtacaacagaagaacccggcaggatgagcctgccctgttcgtggccctgaccttcgagcggcgggaggtcctggactcctccaatatcaaaccaatgaacctgatcggcgtggcaagaggcgaaaacatccccgccgtgatcgccctgaccgaccccgagggctgcccactgagccggtttaaggatagcctgggaaacccaacccacatcctgagaatcggcgagagctataaggagaagcagcggaccatccaggccaagaaggaggtggagcagcggagagccggcggctacagccggaagtacgccagcaaagccaagaatctggcagacgatatggtgagaaacaccgctagagatctgctgtactacgccgtgacccaggatgccatgctgatcttcgccaacctgagccggggcttcggccggcagggcaagcggaccttcatggccgagagacagtacacacggatggaggactggctgaccgccaagctggcctacgagggcctgagcaagacctacctgtccaagacactggcccagtacacctccaagacatgcagcaactgtgggtttaccatcaccagcgccgactacgacagggtgctggagaagctgaagaagacagcaacaggctggatgaccacaattaacggcaaggagctgaaggtggagggccagattacctactacaacagatacaagagacagaacgtagtcaaggacctgtccgtcgagctggatagactgagcgaagaatctgtgaacaacgacatctcctcctggacaaagggcagaagcggagaagctctgagcctcctgaagaaaagattctcccatagacccgtgcaggagaagttcgtgtgcctgaactgcggcttcgagacacacgcagccgagcaagccgccctgaacatcgccagatcctggctgttcctgcggagccaggagtacaagaaataccagacaaacaagacaaccggcaacaccgataagagagccttcgtcgagacctggcagtccttttaccggaagaagcttaaggaggtgtggaaacctgccgtgcggtctggcggatctggcggaggctcctagctacaggagcaagaccatggcccagggcagcctgaccttcagcgacgtggccatcggcttcagccagcaggagtgggagtgcctggaccccgtgcagaagaccctgtacagggacgtgatgatggagaactacggcaacctggtgagcctgggccacagcatcagcaagcccaacgtgatcaccctgctggagcagggcaaggagccctggatcgtggtgagggaggagaccaggagctggggatctggctccggcagcggccccaagaaaaagagaaaagtctaagctgccttctgcggggcttgccttctggccatgcccttcttctctcccttgcacctgtacctcttggtctttgaataaagcctgagtaggaaggctagcaaaaaaaaaaaaaaaaaaaaaaaaaaaaaaaaaaaaaaaaaaaaaaaaaaaaaaaaaaaaaaaaaaaaaaaaaaaaaaaa

SEQ ID NO: 16525 - RNA, 9485 nt, synthetic construct
  source 1..9485: mol_type = other RNA
aggaaataagagagaaaagaagagtaagaagaaatataagagccaccatggcccctaagaagaagcgtaaagtgagccggatggaacgcctcgtctacgaggtgcggcagaagtgcagaaacatcgaggacatctgcatctcctgcggatctctgaacgtgaccctggagcacccactgttcatcggcggcatgtgccagaactgtaaaaactgttttctggagtgtgcctatcaatacgacgatgacggctaccagagctactgcaccatctgttgcggcggaagagaggtgctgatgtgtggaaataacaactgctgccggtgcttctgcgtggaatgcgtggacctgctggtgggccccggcgccgcccaggccgctattaaggaagatccttggaactgctacatgtgcggccacaagggcacatacggcctgctgagacggagagaggactggcctagcagactgcagatgttcttcgccaataaccacgaccaggagttcgacccccctaaggtgtaccctcccgtccccgccgagaagagaaagcccatccgggtcctgagcctgttcgatggcatcgccaccggtctgctggtgctgaaggacctgggcatccaggtggataggtacattgcctccgaggtgtgcgaggactccatcaccgtgggaatggtgcgtcatcagggcaagatcatgtacgtgggcgacgtgcggagcgtgacacagaagcatatccaggagtggggccctttcgacctggtgatcggcggcagcccttgcaatgacctgagcatcgtgaacccagcccggaagggcctgtacgagggaaccggcagactgttcttcgagttttacagactgctgcacgacgcccggcctaaggaaggcgacgaccggcccttcttttggctgttcgagaatgtggtggccatgggagtcagcgacaagcgggatattagccggttcctggagagcaaccccgtgatgatcgatgccaaggaagtgagcgccgcccaccgggccagatacttctggggcaatctgcctggcatgaacagacccctggccagcaccgtgaacgacaagctggagctgcaggagtgcctggagcacggccggatcgccaagttcagcaaggtgagaaccatcaccacccgaagcaacagcatcaaacaaggcaaggaccagcactttcctgtgttcatgaacgagaaggaggacatcctgtggtgtaccgagatggagagagtgttcgggttcccagtccactacacagatgtcagcaacatgtctagactggccagacagagactgctgggaagaagctggtccgtccctgtgatcagacacctgttcgcccctctgaaggagtacttcgcctgcgtgagcagcggcaacagcaacgccaacagccggggccccagcttctctagcggcctggtgccactgtccctgagagggagccacatgggccccatggagatctacaaaaccgtgagcgcctggaagcggcagcctgtgcgcgtgctgagcctgtttcggaatatcgataaagtcctgaaaagcctgggattcctggagagcggctctggctccggcggtggcaccctgaagtacgtggaggatgtgacaaacgtggtcagacgggatgtggagaagtggggccccttcgatctggtgtacggcagcacccaacccctgggcagctcttgtgaccggtgccctggctggtacatgtttcagttccaccggatcctgcagtacgccctgccgagacaggagtcccagcggccattcttttggattttcatggacaacttgctgctgaccgaggatgaccaggaaactaccactcggttcctgcagaccgaagccgtgaccctgcaggacgtgagaggccgggactaccagaacgccatgcgggtgtggtccaacatccctggactgaaaagcaagcacgcacctctgacccctaaagaagaggagtacctgcaggcccaggtgcggagcagaagcaagctggacgcccctaaggtggatctgctggtgaagaattgcctcctgcccctgagagagtacttcaagtatttcagccagaatagtctgcccctgggaggcagcggcggcggcgccctggtgacatttgaggacgtcgccgtgcggttcacccaggaggaatgggctctgctggatccttctcagaaaatcctgtaccgggacgtgatgagagagacataccggaatctgacctccgtgggcatcaactgggaatgttgggaccttgaagcctgcttcagaagcctgggaagaaacctgagagtgcaggtggtgaagagaaagtgcgagctgaccaacagcggcccctgcgccgagggcggcccaagcagcggcgcccctcctcccagcggcggcagcccagccggctccccaacctctaccgaggagggcacctctgagtccgccacccccgagagcggccctggcacctccaccgagcccagcgagggcagcgcacccggcagccctgccggcagccccacctccacagaggagggaaccagcaccgagcccagcgaaggcagcgccccaggcaccagcaccgagcctagtgagcaggagattaaacggatcaacaagatcagaagaagacttgtgaaagacagcaacaccaagaaggccggcaagacaggccccatgaaaaccctgctggttagagtgatgacacccgatctgagagagcggctggaaaacctgagaaagaagcctgaaaatatcccccagcccatcagcaatacatctagagccaacctgaataagctgctgaccgattacaccgaaatgaagaaggcgatcctgcatgtgtactgggaagagttccagaaggaccctgtgggcctgatgagccgggtggcccagcctgccagcaagaagatcgatcagaacaagctgaaacctgagatggacgagaagggcaacctgaccaccgccggctttgcctgctctcagtgtggccagcccctgttcgtgtacaagctggagcaggtgtctgagaagggcaaggcttacaccaactacttcggacggtgcaatgtggccgagcacgaaaagctgatcctgctggcccagctgaagcccgagaaggatagcgacgaagccgtgacatatagcctgggaaagtttgggcagagggccctggatttctacagcattcatgtgaccaaggagtccacccaccccgtgaagcccctggcccagatcgccggaaacagatacgcctccggacctgtgggaaaggccctgagcgacgcatgtatgggcacaatcgcctccttcctgtctaagtaccaggacatcatcatcgaacaccagaaggtggtgaagggcaaccagaagagactggagagcctgcgggagctggccggcaaggaaaacctggaataccctagcgtgaccctgccacctcagcctcacaccaaggagggcgttgatgcctacaacgaagtgatcgcccgggtgcgaatgtgggtgaacctgaacctgtggcagaagctgaagctaagcagagatgatgccaagcctctgctgagactgaagggattcccttcctttcctctggtcgagagacaggccaacgaagtggactggtgggacatggtgtgtaacgtgaagaagctgatcaacgagaaaaaggaggatggcaaggtgttttggcagaatctggctggctacaagagacaggaagccctgagaccatacctgagcagcgaggaagatcggaagaagggaaagaaattcgctcggtaccagctgggcgacctgctgctgcacctggaaaagaagcacggcgaggactggggaaaggtgtacgacgaggcctgggagcggattgacaagaaagtggaaggcctgagcaagcacatcaagctggaagaggaacggagaagcgaggacgcccagagcaaggccgccctgaccgactggctgcgggctaaggccagcttcgtgatcgagggcctgaaggaggccgacaaggacgagttctgcagatgcgagctgaagctgcagaagtggtacggggacctgcggggaaagcccttcgccatcgaagccgagaacagcatcctggacatcagcggcttcagcaagcagtacaactgtgccttcatctggcagaaggacggcgtgaagaagctgaacctgtacctgatcatcaactacttcaagggcggcaagctgcggttcaagaagatcaaacctgaagccttcgaagccaacagattctacaccgtgatcaacaaaaagagcggcgagatcgtgcccatggaggtgaacttcaacttcgacgaccccaacctgatcatcctgcctctggcctttggcaagagacagggcagagaattcatctggaacgacctgctgtccctggaaaccggcagcctgaagctggccaacggaagagtgatcgagaagacactgtacaacagaagaacccggcaggatgagcctgccctgttcgtggccctgaccttcgagcggcgggaggtcctggactcctccaatatcaaaccaatgaacctgatcggcgtggcaagaggcgaaaacatccccgccgtgatcgccctgaccgaccccgagggctgcccactgagccggtttaaggatagcctgggaaacccaacccacatcctgagaatcggcgagagctataaggagaagcagcggaccatccaggccaagaaggaggtggagcagcggagagccggcggctacagccggaagtacgccagcaaagccaagaatctggcagacgatatggtgagaaacaccgctagagatctgctgtactacgccgtgacccaggatgccatgctgatcttcgccaacctgagccggggcttcggccggcagggcaagcggaccttcatggccgagagacagtacacacggatggaggactggctgaccgccaagctggcctacgagggcctgagcaagacctacctgtccaagacactggcccagtacacctccaagacatgcagcaactgtgggtttaccatcaccagcgccgactacgacagggtgctggagaagctgaagaagacagcaacaggctggatgaccacaattaacggcaaggagctgaaggtggagggccagattacctactacaacagatacaagagacagaacgtagtcaaggacctgtccgtcgagctggatagactgagcgaagaatctgtgaacaacgacatctcctcctggacaaagggcagaagcggagaagctctgagcctcctgaagaaaagattctcccatagacccgtgcaggagaagttcgtgtgcctgaactgcggcttcgagacacacgcagccgagcaagccgccctgaacatcgccagatcctggctgttcctgcggagccaggagtacaagaaataccagacaaacaagacaaccggcaacaccgataagagagccttcgtcgagacctggcagtccttttaccggaagaagcttaaggaggtgtggaaacctgccgtgcggtctggcggatctggcggaggctccgaggaggtgcccgtggtgttcgaggacgtggccgtgtacttcaccagggaggagtggggcaccctggacaagaggcagaaggagctgtacagggacgtgatgaggatgaactacgagctgctggccagcctgggccccgccgccgccaagcccgccctgatcagcaagctggagaggagggccgccccctggatccaggaccccaacggccccaagtggggcaagggcaggccccccggcaagggcggcccaagcagcggcgcccctcctcccagcggcggcagcccagccggctccccaacctctaccgaggagggcacctctgagtccgccacccccgagagcggccctggcacctccaccgagcccagcgagggcagcgcacccggcagccctgccggcagccccacctccacagaggagggaaccagcaccgagcccagcgaaggcagcgccccaggcaccagcaccgagcctagtgagcaggagattaaacggatcaacaagatcagaagaagacttgtgaaagacagcaacaccaagaaggccggcaagacaggccccatgaaaaccctgctggttagagtgatgacacccgatctgagagagcggctggaaaacctgagaaagaagcctgaaaatatcccccagcccatcagcaatacatctagagccaacctgaataagctgctgaccgattacaccgaaatgaagaaggcgatcctgcatgtgtactgggaagagttccagaaggaccctgtgggcctgatgagccgggtggcccagcctgccagcaagaagatcgatcagaacaagctgaaacctgagatggacgagaagggcaacctgaccaccgccggctttgcctgctctcagtgtggccagcccctgttcgtgtacaagctggagcaggtgtctgagaagggcaaggcttacaccaactacttcggacggtgcaatgtggccgagcacgaaaagctgatcctgctggcccagctgaagcccgagaaggatagcgacgaagccgtgacatatagcctgggaaagtttgggcagagggccctggatttctacagcattcatgtgaccaaggagtccacccaccccgtgaagcccctggcccagatcgccggaaacagatacgcctccggacctgtgggaaaggccctgagcgacgcatgtatgggcacaatcgcctccttcctgtctaagtaccaggacatcatcatcgaacaccagaaggtggtgaagggcaaccagaagagactggagagcctgcgggagctggccggcaaggaaaacctggaataccctagcgtgaccctgccacctcagcctcacaccaaggagggcgttgatgcctacaacgaagtgatcgcccgggtgcgaatgtgggtgaacctgaacctgtggcagaagctgaagctaagcagagatgatgccaagcctctgctgagactgaagggattcccttcctttcctctggtcgagagacaggccaacgaagtggactggtgggacatggtgtgtaacgtgaagaagctgatcaacgagaaaaaggaggatggcaaggtgttttggcagaatctggctggctacaagagacaggaagccctgagaccatacctgagcagcgaggaagatcggaagaagggaaagaaattcgctcggtaccagctgggcgacctgctgctgcacctggaaaagaagcacggcgaggactggggaaaggtgtacgacgaggcctgggagcggattgacaagaaagtggaaggcctgagcaagcacatcaagctggaagaggaacggagaagcgaggacgcccagagcaaggccgccctgaccgactggctgcgggctaaggccagcttcgtgatcgagggcctgaaggaggccgacaaggacgagttctgcagatgcgagctgaagctgcagaagtggtacggggacctgcggggaaagcccttcgccatcgaagccgagaacagcatcctggacatcagcggcttcagcaagcagtacaactgtgccttcatctggcagaaggacggcgtgaagaagctgaacctgtacctgatcatcaactacttcaagggcggcaagctgcggttcaagaagatcaaacctgaagccttcgaagccaacagattctacaccgtgatcaacaaaaagagcggcgagatcgtgcccatggaggtgaacttcaacttcgacgaccccaacctgatcatcctgcctctggcctttggcaagagacagggcagagaattcatctggaacgacctgctgtccctggaaaccggcagcctgaagctggccaacggaagagtgatcgagaagacactgtacaacagaagaacccggcaggatgagcctgccctgttcgtggccctgaccttcgagcggcgggaggtcctggactcctccaatatcaaaccaatgaacctgatcggcgtggcaagaggcgaaaacatccccgccgtgatcgccctgaccgaccccgagggctgcccactgagccggtttaaggatagcctgggaaacccaacccacatcctgagaatcggcgagagctataaggagaagcagcggaccatccaggccaagaaggaggtggagcagcggagagccggcggctacagccggaagtacgccagcaaagccaagaatctggcagacgatatggtgagaaacaccgctagagatctgctgtactacgccgtgacccaggatgccatgctgatcttcgccaacctgagccggggcttcggccggcagggcaagcggaccttcatggccgagagacagtacacacggatggaggactggctgaccgccaagctggcctacgagggcctgagcaagacctacctgtccaagacactggcccagtacacctccaagacatgcagcaactgtgggtttaccatcaccagcgccgactacgacagggtgctggagaagctgaagaagacagcaacaggctggatgaccacaattaacggcaaggagctgaaggtggagggccagattacctactacaacagatacaagagacagaacgtagtcaaggacctgtccgtcgagctggatagactgagcgaagaatctgtgaacaacgacatctcctcctggacaaagggcagaagcggagaagctctgagcctcctgaagaaaagattctcccatagacccgtgcaggagaagttcgtgtgcctgaactgcggcttcgagacacacgcagccgagcaagccgccctgaacatcgccagatcctggctgttcctgcggagccaggagtacaagaaataccagacaaacaagacaaccggcaacaccgataagagagccttcgtcgagacctggcagtccttttaccggaagaagcttaaggaggtgtggaaacctgccgtgcggtctggcggatctggcggaggctcctgaggaggtgcccgtggtgttcgaggacgtggccgtgtacttcaccagggaggagtggggcaccctggacaagaggcagaaggagctgtacagggacgtgatgaggatgaactacgagctgctggccagcctgggccccgccgccgccaagcccgccctgatcagcaagctggagaggagggccgccccctggatccaggaccccaacggccccaagtggggcaagggcaggccccccggcaagggatctggctccggcagcggccccaagaaaaagagaaaagtctaagctgccttctgcggggcttgccttctggccatgcccttcttctctcccttgcacctgtacctcttggtctttgaataaagcctgagtaggaaggctagcaaaaaaaaaaaaaaaaaaaaaaaaaaaaaaaaaaaaaaaaaaaaaaaaaaaaaaaaaaaaaaaaaaaaaaaaaaaaaaaa

SEQ ID NO: 16526 - RNA, 9485 nt, synthetic construct
  source 1..9485: mol_type = other RNA
aggaaataagagagaaaagaagagtaagaagaaatataagagccaccatggcccctaagaagaagcgtaaagtgagccggatggaacgcctcgtctacgaggtgcggcagaagtgcagaaacatcgaggacatctgcatctcctgcggatctctgaacgtgaccctggagcacccactgttcatcggcggcatgtgccagaactgtaaaaactgttttctggagtgtgcctatcaatacgacgatgacggctaccagagctactgcaccatctgttgcggcggaagagaggtgctgatgtgtggaaataacaactgctgccggtgcttctgcgtggaatgcgtggacctgctggtgggccccggcgccgcccaggccgctattaaggaagatccttggaactgctacatgtgcggccacaagggcacatacggcctgctgagacggagagaggactggcctagcagactgcagatgttcttcgccaataaccacgaccaggagttcgacccccctaaggtgtaccctcccgtccccgccgagaagagaaagcccatccgggtcctgagcctgttcgatggcatcgccaccggtctgctggtgctgaaggacctgggcatccaggtggataggtacattgcctccgaggtgtgcgaggactccatcaccgtgggaatggtgcgtcatcagggcaagatcatgtacgtgggcgacgtgcggagcgtgacacagaagcatatccaggagtggggccctttcgacctggtgatcggcggcagcccttgcaatgacctgagcatcgtgaacccagcccggaagggcctgtacgagggaaccggcagactgttcttcgagttttacagactgctgcacgacgcccggcctaaggaaggcgacgaccggcccttcttttggctgttcgagaatgtggtggccatgggagtcagcgacaagcgggatattagccggttcctggagagcaaccccgtgatgatcgatgccaaggaagtgagcgccgcccaccgggccagatacttctggggcaatctgcctggcatgaacagacccctggccagcaccgtgaacgacaagctggagctgcaggagtgcctggagcacggccggatcgccaagttcagcaaggtgagaaccatcaccacccgaagcaacagcatcaaacaaggcaaggaccagcactttcctgtgttcatgaacgagaaggaggacatcctgtggtgtaccgagatggagagagtgttcgggttcccagtccactacacagatgtcagcaacatgtctagactggccagacagagactgctgggaagaagctggtccgtccctgtgatcagacacctgttcgcccctctgaaggagtacttcgcctgcgtgagcagcggcaacagcaacgccaacagccggggccccagcttctctagcggcctggtgccactgtccctgagagggagccacatgggccccatggagatctacaaaaccgtgagcgcctggaagcggcagcctgtgcgcgtgctgagcctgtttcggaatatcgataaagtcctgaaaagcctgggattcctggagagcggctctggctccggcggtggcaccctgaagtacgtggaggatgtgacaaacgtggtcagacgggatgtggagaagtggggccccttcgatctggtgtacggcagcacccaacccctgggcagctcttgtgaccggtgccctggctggtacatgtttcagttccaccggatcctgcagtacgccctgccgagacaggagtcccagcggccattcttttggattttcatggacaacttgctgctgaccgaggatgaccaggaaactaccactcggttcctgcagaccgaagccgtgaccctgcaggacgtgagaggccgggactaccagaacgccatgcgggtgtggtccaacatccctggactgaaaagcaagcacgcacctctgacccctaaagaagaggagtacctgcaggcccaggtgcggagcagaagcaagctggacgcccctaaggtggatctgctggtgaagaattgcctcctgcccctgagagagtacttcaagtatttcagccagaatagtctgcccctgggaggcagcggcggcggcgccctggtgacatttgaggacgtcgccgtgcggttcacccaggaggaatgggctctgctggatccttctcagaaaatcctgtaccgggacgtgatgagagagacataccggaatctgacctccgtgggcatcaactgggaatgttgggaccttgaagcctgcttcagaagcctgggaagaaacctgagagtgcaggtggtgaagagaaagtgcgagctgaccaacagcggcccctgcgccgagggcggcccaagcagcggcgcccctcctcccagcggcggcagcccagccggctccccaacctctaccgaggagggcacctctgagtccgccacccccgagagcggccctggcacctccaccgagcccagcgagggcagcgcacccggcagccctgccggcagccccacctccacagaggagggaaccagcaccgagcccagcgaaggcagcgccccaggcaccagcaccgagcctagtgagcaggagattaaacggatcaacaagatcagaagaagacttgtgaaagacagcaacaccaagaaggccggcaagacaggccccatgaaaaccctgctggttagagtgatgacacccgatctgagagagcggctggaaaacctgagaaagaagcctgaaaatatcccccagcccatcagcaatacatctagagccaacctgaataagctgctgaccgattacaccgaaatgaagaaggcgatcctgcatgtgtactgggaagagttccagaaggaccctgtgggcctgatgagccgggtggcccagcctgccagcaagaagatcgatcagaacaagctgaaacctgagatggacgagaagggcaacctgaccaccgccggctttgcctgctctcagtgtggccagcccctgttcgtgtacaagctggagcaggtgtctgagaagggcaaggcttacaccaactacttcggacggtgcaatgtggccgagcacgaaaagctgatcctgctggcccagctgaagcccgagaaggatagcgacgaagccgtgacatatagcctgggaaagtttgggcagagggccctggatttctacagcattcatgtgaccaaggagtccacccaccccgtgaagcccctggcccagatcgccggaaacagatacgcctccggacctgtgggaaaggccctgagcgacgcatgtatgggcacaatcgcctccttcctgtctaagtaccaggacatcatcatcgaacaccagaaggtggtgaagggcaaccagaagagactggagagcctgcgggagctggccggcaaggaaaacctggaataccctagcgtgaccctgccacctcagcctcacaccaaggagggcgttgatgcctacaacgaagtgatcgcccgggtgcgaatgtgggtgaacctgaacctgtggcagaagctgaagctaagcagagatgatgccaagcctctgctgagactgaagggattcccttcctttcctctggtcgagagacaggccaacgaagtggactggtgggacatggtgtgtaacgtgaagaagctgatcaacgagaaaaaggaggatggcaaggtgttttggcagaatctggctggctacaagagacaggaagccctgagaccatacctgagcagcgaggaagatcggaagaagggaaagaaattcgctcggtaccagctgggcgacctgctgctgcacctggaaaagaagcacggcgaggactggggaaaggtgtacgacgaggcctgggagcggattgacaagaaagtggaaggcctgagcaagcacatcaagctggaagaggaacggagaagcgaggacgcccagagcaaggccgccctgaccgactggctgcgggctaaggccagcttcgtgatcgagggcctgaaggaggccgacaaggacgagttctgcagatgcgagctgaagctgcagaagtggtacggggacctgcggggaaagcccttcgccatcgaagccgagaacagcatcctggacatcagcggcttcagcaagcagtacaactgtgccttcatctggcagaaggacggcgtgaagaagctgaacctgtacctgatcatcaactacttcaagggcggcaagctgcggttcaagaagatcaaacctgaagccttcgaagccaacagattctacaccgtgatcaacaaaaagagcggcgagatcgtgcccatggaggtgaacttcaacttcgacgaccccaacctgatcatcctgcctctggcctttggcaagagacagggcagagaattcatctggaacgacctgctgtccctggaaaccggcagcctgaagctggccaacggaagagtgatcgagaagacactgtacaacagaagaacccggcaggatgagcctgccctgttcgtggccctgaccttcgagcggcgggaggtcctggactcctccaatatcaaaccaatgaacctgatcggcgtggcaagaggcgaaaacatccccgccgtgatcgccctgaccgaccccgagggctgcccactgagccggtttaaggatagcctgggaaacccaacccacatcctgagaatcggcgagagctataaggagaagcagcggaccatccaggccaagaaggaggtggagcagcggagagccggcggctacagccggaagtacgccagcaaagccaagaatctggcagacgatatggtgagaaacaccgctagagatctgctgtactacgccgtgacccaggatgccatgctgatcttcgccaacctgagccggggcttcggccggcagggcaagcggaccttcatggccgagagacagtacacacggatggaggactggctgaccgccaagctggcctacgagggcctgagcaagacctacctgtccaagacactggcccagtacacctccaagacatgcagcaactgtgggtttaccatcaccagcgccgactacgacagggtgctggagaagctgaagaagacagcaacaggctggatgaccacaattaacggcaaggagctgaaggtggagggccagattacctactacaacagatacaagagacagaacgtagtcaaggacctgtccgtcgagctggatagactgagcgaagaatctgtgaacaacgacatctcctcctggacaaagggcagaagcggagaagctctgagcctcctgaagaaaagattctcccatagacccgtgcaggagaagttcgtgtgcctgaactgcggcttcgagacacacgcagccgagcaagccgccctgaacatcgccagatcctggctgttcctgcggagccaggagtacaagaaataccagacaaacaagacaaccggcaacaccgataagagagccttcgtcgagacctggcagtccttttaccggaagaagcttaaggaggtgtggaaacctgccgtgcggtctggcggatctggcggaggctccatgatcgagagccagatcagcttcgaggacgtggccgtggacttcaccctggaggagtggcagctgctgaaccccacccagaagaacctgtacagggacgtgatgctggagaactacagcaacctggccttcctgggctaccagatcatcaagcccgacgccgtgttccagctggagcaggaggagcagtggatcaccgacgaggagatcctgaaccacagctgccccgaggaggtgtggctgggcggcccaagcagcggcgcccctcctcccagcggcggcagcccagccggctccccaacctctaccgaggagggcacctctgagtccgccacccccgagagcggccctggcacctccaccgagcccagcgagggcagcgcacccggcagccctgccggcagccccacctccacagaggagggaaccagcaccgagcccagcgaaggcagcgccccaggcaccagcaccgagcctagtgagcaggagattaaacggatcaacaagatcagaagaagacttgtgaaagacagcaacaccaagaaggccggcaagacaggccccatgaaaaccctgctggttagagtgatgacacccgatctgagagagcggctggaaaacctgagaaagaagcctgaaaatatcccccagcccatcagcaatacatctagagccaacctgaataagctgctgaccgattacaccgaaatgaagaaggcgatcctgcatgtgtactgggaagagttccagaaggaccctgtgggcctgatgagccgggtggcccagcctgccagcaagaagatcgatcagaacaagctgaaacctgagatggacgagaagggcaacctgaccaccgccggctttgcctgctctcagtgtggccagcccctgttcgtgtacaagctggagcaggtgtctgagaagggcaaggcttacaccaactacttcggacggtgcaatgtggccgagcacgaaaagctgatcctgctggcccagctgaagcccgagaaggatagcgacgaagccgtgacatatagcctgggaaagtttgggcagagggccctggatttctacagcattcatgtgaccaaggagtccacccaccccgtgaagcccctggcccagatcgccggaaacagatacgcctccggacctgtgggaaaggccctgagcgacgcatgtatgggcacaatcgcctccttcctgtctaagtaccaggacatcatcatcgaacaccagaaggtggtgaagggcaaccagaagagactggagagcctgcgggagctggccggcaaggaaaacctggaataccctagcgtgaccctgccacctcagcctcacaccaaggagggcgttgatgcctacaacgaagtgatcgcccgggtgcgaatgtgggtgaacctgaacctgtggcagaagctgaagctaagcagagatgatgccaagcctctgctgagactgaagggattcccttcctttcctctggtcgagagacaggccaacgaagtggactggtgggacatggtgtgtaacgtgaagaagctgatcaacgagaaaaaggaggatggcaaggtgttttggcagaatctggctggctacaagagacaggaagccctgagaccatacctgagcagcgaggaagatcggaagaagggaaagaaattcgctcggtaccagctgggcgacctgctgctgcacctggaaaagaagcacggcgaggactggggaaaggtgtacgacgaggcctgggagcggattgacaagaaagtggaaggcctgagcaagcacatcaagctggaagaggaacggagaagcgaggacgcccagagcaaggccgccctgaccgactggctgcgggctaaggccagcttcgtgatcgagggcctgaaggaggccgacaaggacgagttctgcagatgcgagctgaagctgcagaagtggtacggggacctgcggggaaagcccttcgccatcgaagccgagaacagcatcctggacatcagcggcttcagcaagcagtacaactgtgccttcatctggcagaaggacggcgtgaagaagctgaacctgtacctgatcatcaactacttcaagggcggcaagctgcggttcaagaagatcaaacctgaagccttcgaagccaacagattctacaccgtgatcaacaaaaagagcggcgagatcgtgcccatggaggtgaacttcaacttcgacgaccccaacctgatcatcctgcctctggcctttggcaagagacagggcagagaattcatctggaacgacctgctgtccctggaaaccggcagcctgaagctggccaacggaagagtgatcgagaagacactgtacaacagaagaacccggcaggatgagcctgccctgttcgtggccctgaccttcgagcggcgggaggtcctggactcctccaatatcaaaccaatgaacctgatcggcgtggcaagaggcgaaaacatccccgccgtgatcgccctgaccgaccccgagggctgcccactgagccggtttaaggatagcctgggaaacccaacccacatcctgagaatcggcgagagctataaggagaagcagcggaccatccaggccaagaaggaggtggagcagcggagagccggcggctacagccggaagtacgccagcaaagccaagaatctggcagacgatatggtgagaaacaccgctagagatctgctgtactacgccgtgacccaggatgccatgctgatcttcgccaacctgagccggggcttcggccggcagggcaagcggaccttcatggccgagagacagtacacacggatggaggactggctgaccgccaagctggcctacgagggcctgagcaagacctacctgtccaagacactggcccagtacacctccaagacatgcagcaactgtgggtttaccatcaccagcgccgactacgacagggtgctggagaagctgaagaagacagcaacaggctggatgaccacaattaacggcaaggagctgaaggtggagggccagattacctactacaacagatacaagagacagaacgtagtcaaggacctgtccgtcgagctggatagactgagcgaagaatctgtgaacaacgacatctcctcctggacaaagggcagaagcggagaagctctgagcctcctgaagaaaagattctcccatagacccgtgcaggagaagttcgtgtgcctgaactgcggcttcgagacacacgcagccgagcaagccgccctgaacatcgccagatcctggctgttcctgcggagccaggagtacaagaaataccagacaaacaagacaaccggcaacaccgataagagagccttcgtcgagacctggcagtccttttaccggaagaagcttaaggaggtgtggaaacctgccgtgcggtctggcggatctggcggaggctcctatgatcgagagccagatcagcttcgaggacgtggccgtggacttcaccctggaggagtggcagctgctgaaccccacccagaagaacctgtacagggacgtgatgctggagaactacagcaacctggccttcctgggctaccagatcatcaagcccgacgccgtgttccagctggagcaggaggagcagtggatcaccgacgaggagatcctgaaccacagctgccccgaggaggtgtggctgggatctggctccggcagcggccccaagaaaaagagaaaagtctaagctgccttctgcggggcttgccttctggccatgcccttcttctctcccttgcacctgtacctcttggtctttgaataaagcctgagtaggaaggctagcaaaaaaaaaaaaaaaaaaaaaaaaaaaaaaaaaaaaaaaaaaaaaaaaaaaaaaaaaaaaaaaaaaaaaaaaaaaaaaaa

SEQ ID NO: 16527 - RNA, 9485 nt, synthetic construct
  source 1..9485: mol_type = other RNA
aggaaataagagagaaaagaagagtaagaagaaatataagagccaccatggcccctaagaagaagcgtaaagtgagccggatggaacgcctcgtctacgaggtgcggcagaagtgcagaaacatcgaggacatctgcatctcctgcggatctctgaacgtgaccctggagcacccactgttcatcggcggcatgtgccagaactgtaaaaactgttttctggagtgtgcctatcaatacgacgatgacggctaccagagctactgcaccatctgttgcggcggaagagaggtgctgatgtgtggaaataacaactgctgccggtgcttctgcgtggaatgcgtggacctgctggtgggccccggcgccgcccaggccgctattaaggaagatccttggaactgctacatgtgcggccacaagggcacatacggcctgctgagacggagagaggactggcctagcagactgcagatgttcttcgccaataaccacgaccaggagttcgacccccctaaggtgtaccctcccgtccccgccgagaagagaaagcccatccgggtcctgagcctgttcgatggcatcgccaccggtctgctggtgctgaaggacctgggcatccaggtggataggtacattgcctccgaggtgtgcgaggactccatcaccgtgggaatggtgcgtcatcagggcaagatcatgtacgtgggcgacgtgcggagcgtgacacagaagcatatccaggagtggggccctttcgacctggtgatcggcggcagcccttgcaatgacctgagcatcgtgaacccagcccggaagggcctgtacgagggaaccggcagactgttcttcgagttttacagactgctgcacgacgcccggcctaaggaaggcgacgaccggcccttcttttggctgttcgagaatgtggtggccatgggagtcagcgacaagcgggatattagccggttcctggagagcaaccccgtgatgatcgatgccaaggaagtgagcgccgcccaccgggccagatacttctggggcaatctgcctggcatgaacagacccctggccagcaccgtgaacgacaagctggagctgcaggagtgcctggagcacggccggatcgccaagttcagcaaggtgagaaccatcaccacccgaagcaacagcatcaaacaaggcaaggaccagcactttcctgtgttcatgaacgagaaggaggacatcctgtggtgtaccgagatggagagagtgttcgggttcccagtccactacacagatgtcagcaacatgtctagactggccagacagagactgctgggaagaagctggtccgtccctgtgatcagacacctgttcgcccctctgaaggagtacttcgcctgcgtgagcagcggcaacagcaacgccaacagccggggccccagcttctctagcggcctggtgccactgtccctgagagggagccacatgggccccatggagatctacaaaaccgtgagcgcctggaagcggcagcctgtgcgcgtgctgagcctgtttcggaatatcgataaagtcctgaaaagcctgggattcctggagagcggctctggctccggcggtggcaccctgaagtacgtggaggatgtgacaaacgtggtcagacgggatgtggagaagtggggccccttcgatctggtgtacggcagcacccaacccctgggcagctcttgtgaccggtgccctggctggtacatgtttcagttccaccggatcctgcagtacgccctgccgagacaggagtcccagcggccattcttttggattttcatggacaacttgctgctgaccgaggatgaccaggaaactaccactcggttcctgcagaccgaagccgtgaccctgcaggacgtgagaggccgggactaccagaacgccatgcgggtgtggtccaacatccctggactgaaaagcaagcacgcacctctgacccctaaagaagaggagtacctgcaggcccaggtgcggagcagaagcaagctggacgcccctaaggtggatctgctggtgaagaattgcctcctgcccctgagagagtacttcaagtatttcagccagaatagtctgcccctgggaggcagcggcggcggcgccctggtgacatttgaggacgtcgccgtgcggttcacccaggaggaatgggctctgctggatccttctcagaaaatcctgtaccgggacgtgatgagagagacataccggaatctgacctccgtgggcatcaactgggaatgttgggaccttgaagcctgcttcagaagcctgggaagaaacctgagagtgcaggtggtgaagagaaagtgcgagctgaccaacagcggcccctgcgccgagggcggcccaagcagcggcgcccctcctcccagcggcggcagcccagccggctccccaacctctaccgaggagggcacctctgagtccgccacccccgagagcggccctggcacctccaccgagcccagcgagggcagcgcacccggcagccctgccggcagccccacctccacagaggagggaaccagcaccgagcccagcgaaggcagcgccccaggcaccagcaccgagcctagtgagcaggagattaaacggatcaacaagatcagaagaagacttgtgaaagacagcaacaccaagaaggccggcaagacaggccccatgaaaaccctgctggttagagtgatgacacccgatctgagagagcggctggaaaacctgagaaagaagcctgaaaatatcccccagcccatcagcaatacatctagagccaacctgaataagctgctgaccgattacaccgaaatgaagaaggcgatcctgcatgtgtactgggaagagttccagaaggaccctgtgggcctgatgagccgggtggcccagcctgccagcaagaagatcgatcagaacaagctgaaacctgagatggacgagaagggcaacctgaccaccgccggctttgcctgctctcagtgtggccagcccctgttcgtgtacaagctggagcaggtgtctgagaagggcaaggcttacaccaactacttcggacggtgcaatgtggccgagcacgaaaagctgatcctgctggcccagctgaagcccgagaaggatagcgacgaagccgtgacatatagcctgggaaagtttgggcagagggccctggatttctacagcattcatgtgaccaaggagtccacccaccccgtgaagcccctggcccagatcgccggaaacagatacgcctccggacctgtgggaaaggccctgagcgacgcatgtatgggcacaatcgcctccttcctgtctaagtaccaggacatcatcatcgaacaccagaaggtggtgaagggcaaccagaagagactggagagcctgcgggagctggccggcaaggaaaacctggaataccctagcgtgaccctgccacctcagcctcacaccaaggagggcgttgatgcctacaacgaagtgatcgcccgggtgcgaatgtgggtgaacctgaacctgtggcagaagctgaagctaagcagagatgatgccaagcctctgctgagactgaagggattcccttcctttcctctggtcgagagacaggccaacgaagtggactggtgggacatggtgtgtaacgtgaagaagctgatcaacgagaaaaaggaggatggcaaggtgttttggcagaatctggctggctacaagagacaggaagccctgagaccatacctgagcagcgaggaagatcggaagaagggaaagaaattcgctcggtaccagctgggcgacctgctgctgcacctggaaaagaagcacggcgaggactggggaaaggtgtacgacgaggcctgggagcggattgacaagaaagtggaaggcctgagcaagcacatcaagctggaagaggaacggagaagcgaggacgcccagagcaaggccgccctgaccgactggctgcgggctaaggccagcttcgtgatcgagggcctgaaggaggccgacaaggacgagttctgcagatgcgagctgaagctgcagaagtggtacggggacctgcggggaaagcccttcgccatcgaagccgagaacagcatcctggacatcagcggcttcagcaagcagtacaactgtgccttcatctggcagaaggacggcgtgaagaagctgaacctgtacctgatcatcaactacttcaagggcggcaagctgcggttcaagaagatcaaacctgaagccttcgaagccaacagattctacaccgtgatcaacaaaaagagcggcgagatcgtgcccatggaggtgaacttcaacttcgacgaccccaacctgatcatcctgcctctggcctttggcaagagacagggcagagaattcatctggaacgacctgctgtccctggaaaccggcagcctgaagctggccaacggaagagtgatcgagaagacactgtacaacagaagaacccggcaggatgagcctgccctgttcgtggccctgaccttcgagcggcgggaggtcctggactcctccaatatcaaaccaatgaacctgatcggcgtggcaagaggcgaaaacatccccgccgtgatcgccctgaccgaccccgagggctgcccactgagccggtttaaggatagcctgggaaacccaacccacatcctgagaatcggcgagagctataaggagaagcagcggaccatccaggccaagaaggaggtggagcagcggagagccggcggctacagccggaagtacgccagcaaagccaagaatctggcagacgatatggtgagaaacaccgctagagatctgctgtactacgccgtgacccaggatgccatgctgatcttcgccaacctgagccggggcttcggccggcagggcaagcggaccttcatggccgagagacagtacacacggatggaggactggctgaccgccaagctggcctacgagggcctgagcaagacctacctgtccaagacactggcccagtacacctccaagacatgcagcaactgtgggtttaccatcaccagcgccgactacgacagggtgctggagaagctgaagaagacagcaacaggctggatgaccacaattaacggcaaggagctgaaggtggagggccagattacctactacaacagatacaagagacagaacgtagtcaaggacctgtccgtcgagctggatagactgagcgaagaatctgtgaacaacgacatctcctcctggacaaagggcagaagcggagaagctctgagcctcctgaagaaaagattctcccatagacccgtgcaggagaagttcgtgtgcctgaactgcggcttcgagacacacgcagccgagcaagccgccctgaacatcgccagatcctggctgttcctgcggagccaggagtacaagaaataccagacaaacaagacaaccggcaacaccgataagagagccttcgtcgagacctggcagtccttttaccggaagaagcttaaggaggtgtggaaacctgccgtgcggtctggcggatctggcggaggctcccagatgcccgtgaagttcgaggacatcgccgtgagcttcagccaggaggagtgggagtacctggacgaggagcagaaggagctgtacagggaggtgatgaaggagaactaccagaccctgatcagcctgggcaccggcagccccagcatcacccccgacatcatcagccacatcgagaggggcgaggagccctacatcagggaggagcccggcagcgaggagagggagcccggcaggagcagcggcggcccaagcagcggcgcccctcctcccagcggcggcagcccagccggctccccaacctctaccgaggagggcacctctgagtccgccacccccgagagcggccctggcacctccaccgagcccagcgagggcagcgcacccggcagccctgccggcagccccacctccacagaggagggaaccagcaccgagcccagcgaaggcagcgccccaggcaccagcaccgagcctagtgagcaggagattaaacggatcaacaagatcagaagaagacttgtgaaagacagcaacaccaagaaggccggcaagacaggccccatgaaaaccctgctggttagagtgatgacacccgatctgagagagcggctggaaaacctgagaaagaagcctgaaaatatcccccagcccatcagcaatacatctagagccaacctgaataagctgctgaccgattacaccgaaatgaagaaggcgatcctgcatgtgtactgggaagagttccagaaggaccctgtgggcctgatgagccgggtggcccagcctgccagcaagaagatcgatcagaacaagctgaaacctgagatggacgagaagggcaacctgaccaccgccggctttgcctgctctcagtgtggccagcccctgttcgtgtacaagctggagcaggtgtctgagaagggcaaggcttacaccaactacttcggacggtgcaatgtggccgagcacgaaaagctgatcctgctggcccagctgaagcccgagaaggatagcgacgaagccgtgacatatagcctgggaaagtttgggcagagggccctggatttctacagcattcatgtgaccaaggagtccacccaccccgtgaagcccctggcccagatcgccggaaacagatacgcctccggacctgtgggaaaggccctgagcgacgcatgtatgggcacaatcgcctccttcctgtctaagtaccaggacatcatcatcgaacaccagaaggtggtgaagggcaaccagaagagactggagagcctgcgggagctggccggcaaggaaaacctggaataccctagcgtgaccctgccacctcagcctcacaccaaggagggcgttgatgcctacaacgaagtgatcgcccgggtgcgaatgtgggtgaacctgaacctgtggcagaagctgaagctaagcagagatgatgccaagcctctgctgagactgaagggattcccttcctttcctctggtcgagagacaggccaacgaagtggactggtgggacatggtgtgtaacgtgaagaagctgatcaacgagaaaaaggaggatggcaaggtgttttggcagaatctggctggctacaagagacaggaagccctgagaccatacctgagcagcgaggaagatcggaagaagggaaagaaattcgctcggtaccagctgggcgacctgctgctgcacctggaaaagaagcacggcgaggactggggaaaggtgtacgacgaggcctgggagcggattgacaagaaagtggaaggcctgagcaagcacatcaagctggaagaggaacggagaagcgaggacgcccagagcaaggccgccctgaccgactggctgcgggctaaggccagcttcgtgatcgagggcctgaaggaggccgacaaggacgagttctgcagatgcgagctgaagctgcagaagtggtacggggacctgcggggaaagcccttcgccatcgaagccgagaacagcatcctggacatcagcggcttcagcaagcagtacaactgtgccttcatctggcagaaggacggcgtgaagaagctgaacctgtacctgatcatcaactacttcaagggcggcaagctgcggttcaagaagatcaaacctgaagccttcgaagccaacagattctacaccgtgatcaacaaaaagagcggcgagatcgtgcccatggaggtgaacttcaacttcgacgaccccaacctgatcatcctgcctctggcctttggcaagagacagggcagagaattcatctggaacgacctgctgtccctggaaaccggcagcctgaagctggccaacggaagagtgatcgagaagacactgtacaacagaagaacccggcaggatgagcctgccctgttcgtggccctgaccttcgagcggcgggaggtcctggactcctccaatatcaaaccaatgaacctgatcggcgtggcaagaggcgaaaacatccccgccgtgatcgccctgaccgaccccgagggctgcccactgagccggtttaaggatagcctgggaaacccaacccacatcctgagaatcggcgagagctataaggagaagcagcggaccatccaggccaagaaggaggtggagcagcggagagccggcggctacagccggaagtacgccagcaaagccaagaatctggcagacgatatggtgagaaacaccgctagagatctgctgtactacgccgtgacccaggatgccatgctgatcttcgccaacctgagccggggcttcggccggcagggcaagcggaccttcatggccgagagacagtacacacggatggaggactggctgaccgccaagctggcctacgagggcctgagcaagacctacctgtccaagacactggcccagtacacctccaagacatgcagcaactgtgggtttaccatcaccagcgccgactacgacagggtgctggagaagctgaagaagacagcaacaggctggatgaccacaattaacggcaaggagctgaaggtggagggccagattacctactacaacagatacaagagacagaacgtagtcaaggacctgtccgtcgagctggatagactgagcgaagaatctgtgaacaacgacatctcctcctggacaaagggcagaagcggagaagctctgagcctcctgaagaaaagattctcccatagacccgtgcaggagaagttcgtgtgcctgaactgcggcttcgagacacacgcagccgagcaagccgccctgaacatcgccagatcctggctgttcctgcggagccaggagtacaagaaataccagacaaacaagacaaccggcaacaccgataagagagccttcgtcgagacctggcagtccttttaccggaagaagcttaaggaggtgtggaaacctgccgtgcggtctggcggatctggcggaggctcctcagatgcccgtgaagttcgaggacatcgccgtgagcttcagccaggaggagtgggagtacctggacgaggagcagaaggagctgtacagggaggtgatgaaggagaactaccagaccctgatcagcctgggcaccggcagccccagcatcacccccgacatcatcagccacatcgagaggggcgaggagccctacatcagggaggagcccggcagcgaggagagggagcccggcaggagcagcggatctggctccggcagcggccccaagaaaaagagaaaagtctaagctgccttctgcggggcttgccttctggccatgcccttcttctctcccttgcacctgtacctcttggtctttgaataaagcctgagtaggaaggctagcaaaaaaaaaaaaaaaaaaaaaaaaaaaaaaaaaaaaaaaaaaaaaaaaaaaaaaaaaaaaaaaaaaaaaaaaaaaaaaaa

SEQ ID NO: 16528 - RNA, 9485 nt, synthetic construct
  source 1..9485: mol_type = other RNA
aggaaataagagagaaaagaagagtaagaagaaatataagagccaccatggcccctaagaagaagcgtaaagtgagccggatggaacgcctcgtctacgaggtgcggcagaagtgcagaaacatcgaggacatctgcatctcctgcggatctctgaacgtgaccctggagcacccactgttcatcggcggcatgtgccagaactgtaaaaactgttttctggagtgtgcctatcaatacgacgatgacggctaccagagctactgcaccatctgttgcggcggaagagaggtgctgatgtgtggaaataacaactgctgccggtgcttctgcgtggaatgcgtggacctgctggtgggccccggcgccgcccaggccgctattaaggaagatccttggaactgctacatgtgcggccacaagggcacatacggcctgctgagacggagagaggactggcctagcagactgcagatgttcttcgccaataaccacgaccaggagttcgacccccctaaggtgtaccctcccgtccccgccgagaagagaaagcccatccgggtcctgagcctgttcgatggcatcgccaccggtctgctggtgctgaaggacctgggcatccaggtggataggtacattgcctccgaggtgtgcgaggactccatcaccgtgggaatggtgcgtcatcagggcaagatcatgtacgtgggcgacgtgcggagcgtgacacagaagcatatccaggagtggggccctttcgacctggtgatcggcggcagcccttgcaatgacctgagcatcgtgaacccagcccggaagggcctgtacgagggaaccggcagactgttcttcgagttttacagactgctgcacgacgcccggcctaaggaaggcgacgaccggcccttcttttggctgttcgagaatgtggtggccatgggagtcagcgacaagcgggatattagccggttcctggagagcaaccccgtgatgatcgatgccaaggaagtgagcgccgcccaccgggccagatacttctggggcaatctgcctggcatgaacagacccctggccagcaccgtgaacgacaagctggagctgcaggagtgcctggagcacggccggatcgccaagttcagcaaggtgagaaccatcaccacccgaagcaacagcatcaaacaaggcaaggaccagcactttcctgtgttcatgaacgagaaggaggacatcctgtggtgtaccgagatggagagagtgttcgggttcccagtccactacacagatgtcagcaacatgtctagactggccagacagagactgctgggaagaagctggtccgtccctgtgatcagacacctgttcgcccctctgaaggagtacttcgcctgcgtgagcagcggcaacagcaacgccaacagccggggccccagcttctctagcggcctggtgccactgtccctgagagggagccacatgggccccatggagatctacaaaaccgtgagcgcctggaagcggcagcctgtgcgcgtgctgagcctgtttcggaatatcgataaagtcctgaaaagcctgggattcctggagagcggctctggctccggcggtggcaccctgaagtacgtggaggatgtgacaaacgtggtcagacgggatgtggagaagtggggccccttcgatctggtgtacggcagcacccaacccctgggcagctcttgtgaccggtgccctggctggtacatgtttcagttccaccggatcctgcagtacgccctgccgagacaggagtcccagcggccattcttttggattttcatggacaacttgctgctgaccgaggatgaccaggaaactaccactcggttcctgcagaccgaagccgtgaccctgcaggacgtgagaggccgggactaccagaacgccatgcgggtgtggtccaacatccctggactgaaaagcaagcacgcacctctgacccctaaagaagaggagtacctgcaggcccaggtgcggagcagaagcaagctggacgcccctaaggtggatctgctggtgaagaattgcctcctgcccctgagagagtacttcaagtatttcagccagaatagtctgcccctgggaggcagcggcggcggcgccctggtgacatttgaggacgtcgccgtgcggttcacccaggaggaatgggctctgctggatccttctcagaaaatcctgtaccgggacgtgatgagagagacataccggaatctgacctccgtgggcatcaactgggaatgttgggaccttgaagcctgcttcagaagcctgggaagaaacctgagagtgcaggtggtgaagagaaagtgcgagctgaccaacagcggcccctgcgccgagggcggcccaagcagcggcgcccctcctcccagcggcggcagcccagccggctccccaacctctaccgaggagggcacctctgagtccgccacccccgagagcggccctggcacctccaccgagcccagcgagggcagcgcacccggcagccctgccggcagccccacctccacagaggagggaaccagcaccgagcccagcgaaggcagcgccccaggcaccagcaccgagcctagtgagcaggagattaaacggatcaacaagatcagaagaagacttgtgaaagacagcaacaccaagaaggccggcaagacaggccccatgaaaaccctgctggttagagtgatgacacccgatctgagagagcggctggaaaacctgagaaagaagcctgaaaatatcccccagcccatcagcaatacatctagagccaacctgaataagctgctgaccgattacaccgaaatgaagaaggcgatcctgcatgtgtactgggaagagttccagaaggaccctgtgggcctgatgagccgggtggcccagcctgccagcaagaagatcgatcagaacaagctgaaacctgagatggacgagaagggcaacctgaccaccgccggctttgcctgctctcagtgtggccagcccctgttcgtgtacaagctggagcaggtgtctgagaagggcaaggcttacaccaactacttcggacggtgcaatgtggccgagcacgaaaagctgatcctgctggcccagctgaagcccgagaaggatagcgacgaagccgtgacatatagcctgggaaagtttgggcagagggccctggatttctacagcattcatgtgaccaaggagtccacccaccccgtgaagcccctggcccagatcgccggaaacagatacgcctccggacctgtgggaaaggccctgagcgacgcatgtatgggcacaatcgcctccttcctgtctaagtaccaggacatcatcatcgaacaccagaaggtggtgaagggcaaccagaagagactggagagcctgcgggagctggccggcaaggaaaacctggaataccctagcgtgaccctgccacctcagcctcacaccaaggagggcgttgatgcctacaacgaagtgatcgcccgggtgcgaatgtgggtgaacctgaacctgtggcagaagctgaagctaagcagagatgatgccaagcctctgctgagactgaagggattcccttcctttcctctggtcgagagacaggccaacgaagtggactggtgggacatggtgtgtaacgtgaagaagctgatcaacgagaaaaaggaggatggcaaggtgttttggcagaatctggctggctacaagagacaggaagccctgagaccatacctgagcagcgaggaagatcggaagaagggaaagaaattcgctcggtaccagctgggcgacctgctgctgcacctggaaaagaagcacggcgaggactggggaaaggtgtacgacgaggcctgggagcggattgacaagaaagtggaaggcctgagcaagcacatcaagctggaagaggaacggagaagcgaggacgcccagagcaaggccgccctgaccgactggctgcgggctaaggccagcttcgtgatcgagggcctgaaggaggccgacaaggacgagttctgcagatgcgagctgaagctgcagaagtggtacggggacctgcggggaaagcccttcgccatcgaagccgagaacagcatcctggacatcagcggcttcagcaagcagtacaactgtgccttcatctggcagaaggacggcgtgaagaagctgaacctgtacctgatcatcaactacttcaagggcggcaagctgcggttcaagaagatcaaacctgaagccttcgaagccaacagattctacaccgtgatcaacaaaaagagcggcgagatcgtgcccatggaggtgaacttcaacttcgacgaccccaacctgatcatcctgcctctggcctttggcaagagacagggcagagaattcatctggaacgacctgctgtccctggaaaccggcagcctgaagctggccaacggaagagtgatcgagaagacactgtacaacagaagaacccggcaggatgagcctgccctgttcgtggccctgaccttcgagcggcgggaggtcctggactcctccaatatcaaaccaatgaacctgatcggcgtggcaagaggcgaaaacatccccgccgtgatcgccctgaccgaccccgagggctgcccactgagccggtttaaggatagcctgggaaacccaacccacatcctgagaatcggcgagagctataaggagaagcagcggaccatccaggccaagaaggaggtggagcagcggagagccggcggctacagccggaagtacgccagcaaagccaagaatctggcagacgatatggtgagaaacaccgctagagatctgctgtactacgccgtgacccaggatgccatgctgatcttcgccaacctgagccggggcttcggccggcagggcaagcggaccttcatggccgagagacagtacacacggatggaggactggctgaccgccaagctggcctacgagggcctgagcaagacctacctgtccaagacactggcccagtacacctccaagacatgcagcaactgtgggtttaccatcaccagcgccgactacgacagggtgctggagaagctgaagaagacagcaacaggctggatgaccacaattaacggcaaggagctgaaggtggagggccagattacctactacaacagatacaagagacagaacgtagtcaaggacctgtccgtcgagctggatagactgagcgaagaatctgtgaacaacgacatctcctcctggacaaagggcagaagcggagaagctctgagcctcctgaagaaaagattctcccatagacccgtgcaggagaagttcgtgtgcctgaactgcggcttcgagacacacgcagccgagcaagccgccctgaacatcgccagatcctggctgttcctgcggagccaggagtacaagaaataccagacaaacaagacaaccggcaacaccgataagagagccttcgtcgagacctggcagtccttttaccggaagaagcttaaggaggtgtggaaacctgccgtgcggtctggcggatctggcggaggctcccaccaggaggtggtgaccttcgaggacgtggccgtgtacttcacccagaccgagtgggccggcctgagccccgcccagagggccctgtacaggagcgtgatgctggagatctacggcaacctgaccagcctgggctaccccgtgcccaagcccgccctggtgagcctgctggagaggggcgacctgccctggggcctggagacccaggacgacccccccgcccagggcaccaagcacatctgcggcggcccaagcagcggcgcccctcctcccagcggcggcagcccagccggctccccaacctctaccgaggagggcacctctgagtccgccacccccgagagcggccctggcacctccaccgagcccagcgagggcagcgcacccggcagccctgccggcagccccacctccacagaggagggaaccagcaccgagcccagcgaaggcagcgccccaggcaccagcaccgagcctagtgagcaggagattaaacggatcaacaagatcagaagaagacttgtgaaagacagcaacaccaagaaggccggcaagacaggccccatgaaaaccctgctggttagagtgatgacacccgatctgagagagcggctggaaaacctgagaaagaagcctgaaaatatcccccagcccatcagcaatacatctagagccaacctgaataagctgctgaccgattacaccgaaatgaagaaggcgatcctgcatgtgtactgggaagagttccagaaggaccctgtgggcctgatgagccgggtggcccagcctgccagcaagaagatcgatcagaacaagctgaaacctgagatggacgagaagggcaacctgaccaccgccggctttgcctgctctcagtgtggccagcccctgttcgtgtacaagctggagcaggtgtctgagaagggcaaggcttacaccaactacttcggacggtgcaatgtggccgagcacgaaaagctgatcctgctggcccagctgaagcccgagaaggatagcgacgaagccgtgacatatagcctgggaaagtttgggcagagggccctggatttctacagcattcatgtgaccaaggagtccacccaccccgtgaagcccctggcccagatcgccggaaacagatacgcctccggacctgtgggaaaggccctgagcgacgcatgtatgggcacaatcgcctccttcctgtctaagtaccaggacatcatcatcgaacaccagaaggtggtgaagggcaaccagaagagactggagagcctgcgggagctggccggcaaggaaaacctggaataccctagcgtgaccctgccacctcagcctcacaccaaggagggcgttgatgcctacaacgaagtgatcgcccgggtgcgaatgtgggtgaacctgaacctgtggcagaagctgaagctaagcagagatgatgccaagcctctgctgagactgaagggattcccttcctttcctctggtcgagagacaggccaacgaagtggactggtgggacatggtgtgtaacgtgaagaagctgatcaacgagaaaaaggaggatggcaaggtgttttggcagaatctggctggctacaagagacaggaagccctgagaccatacctgagcagcgaggaagatcggaagaagggaaagaaattcgctcggtaccagctgggcgacctgctgctgcacctggaaaagaagcacggcgaggactggggaaaggtgtacgacgaggcctgggagcggattgacaagaaagtggaaggcctgagcaagcacatcaagctggaagaggaacggagaagcgaggacgcccagagcaaggccgccctgaccgactggctgcgggctaaggccagcttcgtgatcgagggcctgaaggaggccgacaaggacgagttctgcagatgcgagctgaagctgcagaagtggtacggggacctgcggggaaagcccttcgccatcgaagccgagaacagcatcctggacatcagcggcttcagcaagcagtacaactgtgccttcatctggcagaaggacggcgtgaagaagctgaacctgtacctgatcatcaactacttcaagggcggcaagctgcggttcaagaagatcaaacctgaagccttcgaagccaacagattctacaccgtgatcaacaaaaagagcggcgagatcgtgcccatggaggtgaacttcaacttcgacgaccccaacctgatcatcctgcctctggcctttggcaagagacagggcagagaattcatctggaacgacctgctgtccctggaaaccggcagcctgaagctggccaacggaagagtgatcgagaagacactgtacaacagaagaacccggcaggatgagcctgccctgttcgtggccctgaccttcgagcggcgggaggtcctggactcctccaatatcaaaccaatgaacctgatcggcgtggcaagaggcgaaaacatccccgccgtgatcgccctgaccgaccccgagggctgcccactgagccggtttaaggatagcctgggaaacccaacccacatcctgagaatcggcgagagctataaggagaagcagcggaccatccaggccaagaaggaggtggagcagcggagagccggcggctacagccggaagtacgccagcaaagccaagaatctggcagacgatatggtgagaaacaccgctagagatctgctgtactacgccgtgacccaggatgccatgctgatcttcgccaacctgagccggggcttcggccggcagggcaagcggaccttcatggccgagagacagtacacacggatggaggactggctgaccgccaagctggcctacgagggcctgagcaagacctacctgtccaagacactggcccagtacacctccaagacatgcagcaactgtgggtttaccatcaccagcgccgactacgacagggtgctggagaagctgaagaagacagcaacaggctggatgaccacaattaacggcaaggagctgaaggtggagggccagattacctactacaacagatacaagagacagaacgtagtcaaggacctgtccgtcgagctggatagactgagcgaagaatctgtgaacaacgacatctcctcctggacaaagggcagaagcggagaagctctgagcctcctgaagaaaagattctcccatagacccgtgcaggagaagttcgtgtgcctgaactgcggcttcgagacacacgcagccgagcaagccgccctgaacatcgccagatcctggctgttcctgcggagccaggagtacaagaaataccagacaaacaagacaaccggcaacaccgataagagagccttcgtcgagacctggcagtccttttaccggaagaagcttaaggaggtgtggaaacctgccgtgcggtctggcggatctggcggaggctcctcaccaggaggtggtgaccttcgaggacgtggccgtgtacttcacccagaccgagtgggccggcctgagccccgcccagagggccctgtacaggagcgtgatgctggagatctacggcaacctgaccagcctgggctaccccgtgcccaagcccgccctggtgagcctgctggagaggggcgacctgccctggggcctggagacccaggacgacccccccgcccagggcaccaagcacatctgcggatctggctccggcagcggccccaagaaaaagagaaaagtctaagctgccttctgcggggcttgccttctggccatgcccttcttctctcccttgcacctgtacctcttggtctttgaataaagcctgagtaggaaggctagcaaaaaaaaaaaaaaaaaaaaaaaaaaaaaaaaaaaaaaaaaaaaaaaaaaaaaaaaaaaaaaaaaaaaaaaaaaaaaaaa

SEQ ID NO: 16529 - RNA, 9485 nt, synthetic construct
  source 1..9485: mol_type = other RNA
aggaaataagagagaaaagaagagtaagaagaaatataagagccaccatggcccctaagaagaagcgtaaagtgagccggatggaacgcctcgtctacgaggtgcggcagaagtgcagaaacatcgaggacatctgcatctcctgcggatctctgaacgtgaccctggagcacccactgttcatcggcggcatgtgccagaactgtaaaaactgttttctggagtgtgcctatcaatacgacgatgacggctaccagagctactgcaccatctgttgcggcggaagagaggtgctgatgtgtggaaataacaactgctgccggtgcttctgcgtggaatgcgtggacctgctggtgggccccggcgccgcccaggccgctattaaggaagatccttggaactgctacatgtgcggccacaagggcacatacggcctgctgagacggagagaggactggcctagcagactgcagatgttcttcgccaataaccacgaccaggagttcgacccccctaaggtgtaccctcccgtccccgccgagaagagaaagcccatccgggtcctgagcctgttcgatggcatcgccaccggtctgctggtgctgaaggacctgggcatccaggtggataggtacattgcctccgaggtgtgcgaggactccatcaccgtgggaatggtgcgtcatcagggcaagatcatgtacgtgggcgacgtgcggagcgtgacacagaagcatatccaggagtggggccctttcgacctggtgatcggcggcagcccttgcaatgacctgagcatcgtgaacccagcccggaagggcctgtacgagggaaccggcagactgttcttcgagttttacagactgctgcacgacgcccggcctaaggaaggcgacgaccggcccttcttttggctgttcgagaatgtggtggccatgggagtcagcgacaagcgggatattagccggttcctggagagcaaccccgtgatgatcgatgccaaggaagtgagcgccgcccaccgggccagatacttctggggcaatctgcctggcatgaacagacccctggccagcaccgtgaacgacaagctggagctgcaggagtgcctggagcacggccggatcgccaagttcagcaaggtgagaaccatcaccacccgaagcaacagcatcaaacaaggcaaggaccagcactttcctgtgttcatgaacgagaaggaggacatcctgtggtgtaccgagatggagagagtgttcgggttcccagtccactacacagatgtcagcaacatgtctagactggccagacagagactgctgggaagaagctggtccgtccctgtgatcagacacctgttcgcccctctgaaggagtacttcgcctgcgtgagcagcggcaacagcaacgccaacagccggggccccagcttctctagcggcctggtgccactgtccctgagagggagccacatgggccccatggagatctacaaaaccgtgagcgcctggaagcggcagcctgtgcgcgtgctgagcctgtttcggaatatcgataaagtcctgaaaagcctgggattcctggagagcggctctggctccggcggtggcaccctgaagtacgtggaggatgtgacaaacgtggtcagacgggatgtggagaagtggggccccttcgatctggtgtacggcagcacccaacccctgggcagctcttgtgaccggtgccctggctggtacatgtttcagttccaccggatcctgcagtacgccctgccgagacaggagtcccagcggccattcttttggattttcatggacaacttgctgctgaccgaggatgaccaggaaactaccactcggttcctgcagaccgaagccgtgaccctgcaggacgtgagaggccgggactaccagaacgccatgcgggtgtggtccaacatccctggactgaaaagcaagcacgcacctctgacccctaaagaagaggagtacctgcaggcccaggtgcggagcagaagcaagctggacgcccctaaggtggatctgctggtgaagaattgcctcctgcccctgagagagtacttcaagtatttcagccagaatagtctgcccctgggaggcagcggcggcggcgccctggtgacatttgaggacgtcgccgtgcggttcacccaggaggaatgggctctgctggatccttctcagaaaatcctgtaccgggacgtgatgagagagacataccggaatctgacctccgtgggcatcaactgggaatgttgggaccttgaagcctgcttcagaagcctgggaagaaacctgagagtgcaggtggtgaagagaaagtgcgagctgaccaacagcggcccctgcgccgagggcggcccaagcagcggcgcccctcctcccagcggcggcagcccagccggctccccaacctctaccgaggagggcacctctgagtccgccacccccgagagcggccctggcacctccaccgagcccagcgagggcagcgcacccggcagccctgccggcagccccacctccacagaggagggaaccagcaccgagcccagcgaaggcagcgccccaggcaccagcaccgagcctagtgagcaggagattaaacggatcaacaagatcagaagaagacttgtgaaagacagcaacaccaagaaggccggcaagacaggccccatgaaaaccctgctggttagagtgatgacacccgatctgagagagcggctggaaaacctgagaaagaagcctgaaaatatcccccagcccatcagcaatacatctagagccaacctgaataagctgctgaccgattacaccgaaatgaagaaggcgatcctgcatgtgtactgggaagagttccagaaggaccctgtgggcctgatgagccgggtggcccagcctgccagcaagaagatcgatcagaacaagctgaaacctgagatggacgagaagggcaacctgaccaccgccggctttgcctgctctcagtgtggccagcccctgttcgtgtacaagctggagcaggtgtctgagaagggcaaggcttacaccaactacttcggacggtgcaatgtggccgagcacgaaaagctgatcctgctggcccagctgaagcccgagaaggatagcgacgaagccgtgacatatagcctgggaaagtttgggcagagggccctggatttctacagcattcatgtgaccaaggagtccacccaccccgtgaagcccctggcccagatcgccggaaacagatacgcctccggacctgtgggaaaggccctgagcgacgcatgtatgggcacaatcgcctccttcctgtctaagtaccaggacatcatcatcgaacaccagaaggtggtgaagggcaaccagaagagactggagagcctgcgggagctggccggcaaggaaaacctggaataccctagcgtgaccctgccacctcagcctcacaccaaggagggcgttgatgcctacaacgaagtgatcgcccgggtgcgaatgtgggtgaacctgaacctgtggcagaagctgaagctaagcagagatgatgccaagcctctgctgagactgaagggattcccttcctttcctctggtcgagagacaggccaacgaagtggactggtgggacatggtgtgtaacgtgaagaagctgatcaacgagaaaaaggaggatggcaaggtgttttggcagaatctggctggctacaagagacaggaagccctgagaccatacctgagcagcgaggaagatcggaagaagggaaagaaattcgctcggtaccagctgggcgacctgctgctgcacctggaaaagaagcacggcgaggactggggaaaggtgtacgacgaggcctgggagcggattgacaagaaagtggaaggcctgagcaagcacatcaagctggaagaggaacggagaagcgaggacgcccagagcaaggccgccctgaccgactggctgcgggctaaggccagcttcgtgatcgagggcctgaaggaggccgacaaggacgagttctgcagatgcgagctgaagctgcagaagtggtacggggacctgcggggaaagcccttcgccatcgaagccgagaacagcatcctggacatcagcggcttcagcaagcagtacaactgtgccttcatctggcagaaggacggcgtgaagaagctgaacctgtacctgatcatcaactacttcaagggcggcaagctgcggttcaagaagatcaaacctgaagccttcgaagccaacagattctacaccgtgatcaacaaaaagagcggcgagatcgtgcccatggaggtgaacttcaacttcgacgaccccaacctgatcatcctgcctctggcctttggcaagagacagggcagagaattcatctggaacgacctgctgtccctggaaaccggcagcctgaagctggccaacggaagagtgatcgagaagacactgtacaacagaagaacccggcaggatgagcctgccctgttcgtggccctgaccttcgagcggcgggaggtcctggactcctccaatatcaaaccaatgaacctgatcggcgtggcaagaggcgaaaacatccccgccgtgatcgccctgaccgaccccgagggctgcccactgagccggtttaaggatagcctgggaaacccaacccacatcctgagaatcggcgagagctataaggagaagcagcggaccatccaggccaagaaggaggtggagcagcggagagccggcggctacagccggaagtacgccagcaaagccaagaatctggcagacgatatggtgagaaacaccgctagagatctgctgtactacgccgtgacccaggatgccatgctgatcttcgccaacctgagccggggcttcggccggcagggcaagcggaccttcatggccgagagacagtacacacggatggaggactggctgaccgccaagctggcctacgagggcctgagcaagacctacctgtccaagacactggcccagtacacctccaagacatgcagcaactgtgggtttaccatcaccagcgccgactacgacagggtgctggagaagctgaagaagacagcaacaggctggatgaccacaattaacggcaaggagctgaaggtggagggccagattacctactacaacagatacaagagacagaacgtagtcaaggacctgtccgtcgagctggatagactgagcgaagaatctgtgaacaacgacatctcctcctggacaaagggcagaagcggagaagctctgagcctcctgaagaaaagattctcccatagacccgtgcaggagaagttcgtgtgcctgaactgcggcttcgagacacacgcagccgagcaagccgccctgaacatcgccagatcctggctgttcctgcggagccaggagtacaagaaataccagacaaacaagacaaccggcaacaccgataagagagccttcgtcgagacctggcagtccttttaccggaagaagcttaaggaggtgtggaaacctgccgtgcggtctggcggatctggcggaggctccagcctggagagcgacctgttcagggacgtggccgtggtgttcagccaggaggagtgggagcagctggtgcccacccagagggacctgtacagggacgtgatgctggagacctacaacaacctggtgagcctgggcctggccatcagcaagcccgacgtgatcagcttcctggagcagggcaaggagccctggatggtggagaaggccgccaccggcggcctgtgccccgtgctggagagcaggggcggcccaagcagcggcgcccctcctcccagcggcggcagcccagccggctccccaacctctaccgaggagggcacctctgagtccgccacccccgagagcggccctggcacctccaccgagcccagcgagggcagcgcacccggcagccctgccggcagccccacctccacagaggagggaaccagcaccgagcccagcgaaggcagcgccccaggcaccagcaccgagcctagtgagcaggagattaaacggatcaacaagatcagaagaagacttgtgaaagacagcaacaccaagaaggccggcaagacaggccccatgaaaaccctgctggttagagtgatgacacccgatctgagagagcggctggaaaacctgagaaagaagcctgaaaatatcccccagcccatcagcaatacatctagagccaacctgaataagctgctgaccgattacaccgaaatgaagaaggcgatcctgcatgtgtactgggaagagttccagaaggaccctgtgggcctgatgagccgggtggcccagcctgccagcaagaagatcgatcagaacaagctgaaacctgagatggacgagaagggcaacctgaccaccgccggctttgcctgctctcagtgtggccagcccctgttcgtgtacaagctggagcaggtgtctgagaagggcaaggcttacaccaactacttcggacggtgcaatgtggccgagcacgaaaagctgatcctgctggcccagctgaagcccgagaaggatagcgacgaagccgtgacatatagcctgggaaagtttgggcagagggccctggatttctacagcattcatgtgaccaaggagtccacccaccccgtgaagcccctggcccagatcgccggaaacagatacgcctccggacctgtgggaaaggccctgagcgacgcatgtatgggcacaatcgcctccttcctgtctaagtaccaggacatcatcatcgaacaccagaaggtggtgaagggcaaccagaagagactggagagcctgcgggagctggccggcaaggaaaacctggaataccctagcgtgaccctgccacctcagcctcacaccaaggagggcgttgatgcctacaacgaagtgatcgcccgggtgcgaatgtgggtgaacctgaacctgtggcagaagctgaagctaagcagagatgatgccaagcctctgctgagactgaagggattcccttcctttcctctggtcgagagacaggccaacgaagtggactggtgggacatggtgtgtaacgtgaagaagctgatcaacgagaaaaaggaggatggcaaggtgttttggcagaatctggctggctacaagagacaggaagccctgagaccatacctgagcagcgaggaagatcggaagaagggaaagaaattcgctcggtaccagctgggcgacctgctgctgcacctggaaaagaagcacggcgaggactggggaaaggtgtacgacgaggcctgggagcggattgacaagaaagtggaaggcctgagcaagcacatcaagctggaagaggaacggagaagcgaggacgcccagagcaaggccgccctgaccgactggctgcgggctaaggccagcttcgtgatcgagggcctgaaggaggccgacaaggacgagttctgcagatgcgagctgaagctgcagaagtggtacggggacctgcggggaaagcccttcgccatcgaagccgagaacagcatcctggacatcagcggcttcagcaagcagtacaactgtgccttcatctggcagaaggacggcgtgaagaagctgaacctgtacctgatcatcaactacttcaagggcggcaagctgcggttcaagaagatcaaacctgaagccttcgaagccaacagattctacaccgtgatcaacaaaaagagcggcgagatcgtgcccatggaggtgaacttcaacttcgacgaccccaacctgatcatcctgcctctggcctttggcaagagacagggcagagaattcatctggaacgacctgctgtccctggaaaccggcagcctgaagctggccaacggaagagtgatcgagaagacactgtacaacagaagaacccggcaggatgagcctgccctgttcgtggccctgaccttcgagcggcgggaggtcctggactcctccaatatcaaaccaatgaacctgatcggcgtggcaagaggcgaaaacatccccgccgtgatcgccctgaccgaccccgagggctgcccactgagccggtttaaggatagcctgggaaacccaacccacatcctgagaatcggcgagagctataaggagaagcagcggaccatccaggccaagaaggaggtggagcagcggagagccggcggctacagccggaagtacgccagcaaagccaagaatctggcagacgatatggtgagaaacaccgctagagatctgctgtactacgccgtgacccaggatgccatgctgatcttcgccaacctgagccggggcttcggccggcagggcaagcggaccttcatggccgagagacagtacacacggatggaggactggctgaccgccaagctggcctacgagggcctgagcaagacctacctgtccaagacactggcccagtacacctccaagacatgcagcaactgtgggtttaccatcaccagcgccgactacgacagggtgctggagaagctgaagaagacagcaacaggctggatgaccacaattaacggcaaggagctgaaggtggagggccagattacctactacaacagatacaagagacagaacgtagtcaaggacctgtccgtcgagctggatagactgagcgaagaatctgtgaacaacgacatctcctcctggacaaagggcagaagcggagaagctctgagcctcctgaagaaaagattctcccatagacccgtgcaggagaagttcgtgtgcctgaactgcggcttcgagacacacgcagccgagcaagccgccctgaacatcgccagatcctggctgttcctgcggagccaggagtacaagaaataccagacaaacaagacaaccggcaacaccgataagagagccttcgtcgagacctggcagtccttttaccggaagaagcttaaggaggtgtggaaacctgccgtgcggtctggcggatctggcggaggctcctagcctggagagcgacctgttcagggacgtggccgtggtgttcagccaggaggagtgggagcagctggtgcccacccagagggacctgtacagggacgtgatgctggagacctacaacaacctggtgagcctgggcctggccatcagcaagcccgacgtgatcagcttcctggagcagggcaaggagccctggatggtggagaaggccgccaccggcggcctgtgccccgtgctggagagcaggggatctggctccggcagcggccccaagaaaaagagaaaagtctaagctgccttctgcggggcttgccttctggccatgcccttcttctctcccttgcacctgtacctcttggtctttgaataaagcctgagtaggaaggctagcaaaaaaaaaaaaaaaaaaaaaaaaaaaaaaaaaaaaaaaaaaaaaaaaaaaaaaaaaaaaaaaaaaaaaaaaaaaaaaaa

SEQ ID NO: 16530 - RNA, 9485 nt, synthetic construct
  source 1..9485: mol_type = other RNA
aggaaataagagagaaaagaagagtaagaagaaatataagagccaccatggcccctaagaagaagcgtaaagtgagccggatggaacgcctcgtctacgaggtgcggcagaagtgcagaaacatcgaggacatctgcatctcctgcggatctctgaacgtgaccctggagcacccactgttcatcggcggcatgtgccagaactgtaaaaactgttttctggagtgtgcctatcaatacgacgatgacggctaccagagctactgcaccatctgttgcggcggaagagaggtgctgatgtgtggaaataacaactgctgccggtgcttctgcgtggaatgcgtggacctgctggtgggccccggcgccgcccaggccgctattaaggaagatccttggaactgctacatgtgcggccacaagggcacatacggcctgctgagacggagagaggactggcctagcagactgcagatgttcttcgccaataaccacgaccaggagttcgacccccctaaggtgtaccctcccgtccccgccgagaagagaaagcccatccgggtcctgagcctgttcgatggcatcgccaccggtctgctggtgctgaaggacctgggcatccaggtggataggtacattgcctccgaggtgtgcgaggactccatcaccgtgggaatggtgcgtcatcagggcaagatcatgtacgtgggcgacgtgcggagcgtgacacagaagcatatccaggagtggggccctttcgacctggtgatcggcggcagcccttgcaatgacctgagcatcgtgaacccagcccggaagggcctgtacgagggaaccggcagactgttcttcgagttttacagactgctgcacgacgcccggcctaaggaaggcgacgaccggcccttcttttggctgttcgagaatgtggtggccatgggagtcagcgacaagcgggatattagccggttcctggagagcaaccccgtgatgatcgatgccaaggaagtgagcgccgcccaccgggccagatacttctggggcaatctgcctggcatgaacagacccctggccagcaccgtgaacgacaagctggagctgcaggagtgcctggagcacggccggatcgccaagttcagcaaggtgagaaccatcaccacccgaagcaacagcatcaaacaaggcaaggaccagcactttcctgtgttcatgaacgagaaggaggacatcctgtggtgtaccgagatggagagagtgttcgggttcccagtccactacacagatgtcagcaacatgtctagactggccagacagagactgctgggaagaagctggtccgtccctgtgatcagacacctgttcgcccctctgaaggagtacttcgcctgcgtgagcagcggcaacagcaacgccaacagccggggccccagcttctctagcggcctggtgccactgtccctgagagggagccacatgggccccatggagatctacaaaaccgtgagcgcctggaagcggcagcctgtgcgcgtgctgagcctgtttcggaatatcgataaagtcctgaaaagcctgggattcctggagagcggctctggctccggcggtggcaccctgaagtacgtggaggatgtgacaaacgtggtcagacgggatgtggagaagtggggccccttcgatctggtgtacggcagcacccaacccctgggcagctcttgtgaccggtgccctggctggtacatgtttcagttccaccggatcctgcagtacgccctgccgagacaggagtcccagcggccattcttttggattttcatggacaacttgctgctgaccgaggatgaccaggaaactaccactcggttcctgcagaccgaagccgtgaccctgcaggacgtgagaggccgggactaccagaacgccatgcgggtgtggtccaacatccctggactgaaaagcaagcacgcacctctgacccctaaagaagaggagtacctgcaggcccaggtgcggagcagaagcaagctggacgcccctaaggtggatctgctggtgaagaattgcctcctgcccctgagagagtacttcaagtatttcagccagaatagtctgcccctgggaggcagcggcggcggcgccctggtgacatttgaggacgtcgccgtgcggttcacccaggaggaatgggctctgctggatccttctcagaaaatcctgtaccgggacgtgatgagagagacataccggaatctgacctccgtgggcatcaactgggaatgttgggaccttgaagcctgcttcagaagcctgggaagaaacctgagagtgcaggtggtgaagagaaagtgcgagctgaccaacagcggcccctgcgccgagggcggcccaagcagcggcgcccctcctcccagcggcggcagcccagccggctccccaacctctaccgaggagggcacctctgagtccgccacccccgagagcggccctggcacctccaccgagcccagcgagggcagcgcacccggcagccctgccggcagccccacctccacagaggagggaaccagcaccgagcccagcgaaggcagcgccccaggcaccagcaccgagcctagtgagcaggagattaaacggatcaacaagatcagaagaagacttgtgaaagacagcaacaccaagaaggccggcaagacaggccccatgaaaaccctgctggttagagtgatgacacccgatctgagagagcggctggaaaacctgagaaagaagcctgaaaatatcccccagcccatcagcaatacatctagagccaacctgaataagctgctgaccgattacaccgaaatgaagaaggcgatcctgcatgtgtactgggaagagttccagaaggaccctgtgggcctgatgagccgggtggcccagcctgccagcaagaagatcgatcagaacaagctgaaacctgagatggacgagaagggcaacctgaccaccgccggctttgcctgctctcagtgtggccagcccctgttcgtgtacaagctggagcaggtgtctgagaagggcaaggcttacaccaactacttcggacggtgcaatgtggccgagcacgaaaagctgatcctgctggcccagctgaagcccgagaaggatagcgacgaagccgtgacatatagcctgggaaagtttgggcagagggccctggatttctacagcattcatgtgaccaaggagtccacccaccccgtgaagcccctggcccagatcgccggaaacagatacgcctccggacctgtgggaaaggccctgagcgacgcatgtatgggcacaatcgcctccttcctgtctaagtaccaggacatcatcatcgaacaccagaaggtggtgaagggcaaccagaagagactggagagcctgcgggagctggccggcaaggaaaacctggaataccctagcgtgaccctgccacctcagcctcacaccaaggagggcgttgatgcctacaacgaagtgatcgcccgggtgcgaatgtgggtgaacctgaacctgtggcagaagctgaagctaagcagagatgatgccaagcctctgctgagactgaagggattcccttcctttcctctggtcgagagacaggccaacgaagtggactggtgggacatggtgtgtaacgtgaagaagctgatcaacgagaaaaaggaggatggcaaggtgttttggcagaatctggctggctacaagagacaggaagccctgagaccatacctgagcagcgaggaagatcggaagaagggaaagaaattcgctcggtaccagctgggcgacctgctgctgcacctggaaaagaagcacggcgaggactggggaaaggtgtacgacgaggcctgggagcggattgacaagaaagtggaaggcctgagcaagcacatcaagctggaagaggaacggagaagcgaggacgcccagagcaaggccgccctgaccgactggctgcgggctaaggccagcttcgtgatcgagggcctgaaggaggccgacaaggacgagttctgcagatgcgagctgaagctgcagaagtggtacggggacctgcggggaaagcccttcgccatcgaagccgagaacagcatcctggacatcagcggcttcagcaagcagtacaactgtgccttcatctggcagaaggacggcgtgaagaagctgaacctgtacctgatcatcaactacttcaagggcggcaagctgcggttcaagaagatcaaacctgaagccttcgaagccaacagattctacaccgtgatcaacaaaaagagcggcgagatcgtgcccatggaggtgaacttcaacttcgacgaccccaacctgatcatcctgcctctggcctttggcaagagacagggcagagaattcatctggaacgacctgctgtccctggaaaccggcagcctgaagctggccaacggaagagtgatcgagaagacactgtacaacagaagaacccggcaggatgagcctgccctgttcgtggccctgaccttcgagcggcgggaggtcctggactcctccaatatcaaaccaatgaacctgatcggcgtggcaagaggcgaaaacatccccgccgtgatcgccctgaccgaccccgagggctgcccactgagccggtttaaggatagcctgggaaacccaacccacatcctgagaatcggcgagagctataaggagaagcagcggaccatccaggccaagaaggaggtggagcagcggagagccggcggctacagccggaagtacgccagcaaagccaagaatctggcagacgatatggtgagaaacaccgctagagatctgctgtactacgccgtgacccaggatgccatgctgatcttcgccaacctgagccggggcttcggccggcagggcaagcggaccttcatggccgagagacagtacacacggatggaggactggctgaccgccaagctggcctacgagggcctgagcaagacctacctgtccaagacactggcccagtacacctccaagacatgcagcaactgtgggtttaccatcaccagcgccgactacgacagggtgctggagaagctgaagaagacagcaacaggctggatgaccacaattaacggcaaggagctgaaggtggagggccagattacctactacaacagatacaagagacagaacgtagtcaaggacctgtccgtcgagctggatagactgagcgaagaatctgtgaacaacgacatctcctcctggacaaagggcagaagcggagaagctctgagcctcctgaagaaaagattctcccatagacccgtgcaggagaagttcgtgtgcctgaactgcggcttcgagacacacgcagccgagcaagccgccctgaacatcgccagatcctggctgttcctgcggagccaggagtacaagaaataccagacaaacaagacaaccggcaacaccgataagagagccttcgtcgagacctggcagtccttttaccggaagaagcttaaggaggtgtggaaacctgccgtgcggtctggcggatctggcggaggctcccaggccggcagcgacctgttcagggacgtggccgtggtgttcagccaggaggagtgggagcagctggcccccacccagagggacctgtacagggacgtgatgctggagacctacagcaacctggtgagcctgggcctggccgtgagcaagcccgacgtgatcagcttcctggagcagggcaaggagccctggaccgtggagggcgtggccaccggcggcctgtgccccgtgctgaagagcaggggcggcccaagcagcggcgcccctcctcccagcggcggcagcccagccggctccccaacctctaccgaggagggcacctctgagtccgccacccccgagagcggccctggcacctccaccgagcccagcgagggcagcgcacccggcagccctgccggcagccccacctccacagaggagggaaccagcaccgagcccagcgaaggcagcgccccaggcaccagcaccgagcctagtgagcaggagattaaacggatcaacaagatcagaagaagacttgtgaaagacagcaacaccaagaaggccggcaagacaggccccatgaaaaccctgctggttagagtgatgacacccgatctgagagagcggctggaaaacctgagaaagaagcctgaaaatatcccccagcccatcagcaatacatctagagccaacctgaataagctgctgaccgattacaccgaaatgaagaaggcgatcctgcatgtgtactgggaagagttccagaaggaccctgtgggcctgatgagccgggtggcccagcctgccagcaagaagatcgatcagaacaagctgaaacctgagatggacgagaagggcaacctgaccaccgccggctttgcctgctctcagtgtggccagcccctgttcgtgtacaagctggagcaggtgtctgagaagggcaaggcttacaccaactacttcggacggtgcaatgtggccgagcacgaaaagctgatcctgctggcccagctgaagcccgagaaggatagcgacgaagccgtgacatatagcctgggaaagtttgggcagagggccctggatttctacagcattcatgtgaccaaggagtccacccaccccgtgaagcccctggcccagatcgccggaaacagatacgcctccggacctgtgggaaaggccctgagcgacgcatgtatgggcacaatcgcctccttcctgtctaagtaccaggacatcatcatcgaacaccagaaggtggtgaagggcaaccagaagagactggagagcctgcgggagctggccggcaaggaaaacctggaataccctagcgtgaccctgccacctcagcctcacaccaaggagggcgttgatgcctacaacgaagtgatcgcccgggtgcgaatgtgggtgaacctgaacctgtggcagaagctgaagctaagcagagatgatgccaagcctctgctgagactgaagggattcccttcctttcctctggtcgagagacaggccaacgaagtggactggtgggacatggtgtgtaacgtgaagaagctgatcaacgagaaaaaggaggatggcaaggtgttttggcagaatctggctggctacaagagacaggaagccctgagaccatacctgagcagcgaggaagatcggaagaagggaaagaaattcgctcggtaccagctgggcgacctgctgctgcacctggaaaagaagcacggcgaggactggggaaaggtgtacgacgaggcctgggagcggattgacaagaaagtggaaggcctgagcaagcacatcaagctggaagaggaacggagaagcgaggacgcccagagcaaggccgccctgaccgactggctgcgggctaaggccagcttcgtgatcgagggcctgaaggaggccgacaaggacgagttctgcagatgcgagctgaagctgcagaagtggtacggggacctgcggggaaagcccttcgccatcgaagccgagaacagcatcctggacatcagcggcttcagcaagcagtacaactgtgccttcatctggcagaaggacggcgtgaagaagctgaacctgtacctgatcatcaactacttcaagggcggcaagctgcggttcaagaagatcaaacctgaagccttcgaagccaacagattctacaccgtgatcaacaaaaagagcggcgagatcgtgcccatggaggtgaacttcaacttcgacgaccccaacctgatcatcctgcctctggcctttggcaagagacagggcagagaattcatctggaacgacctgctgtccctggaaaccggcagcctgaagctggccaacggaagagtgatcgagaagacactgtacaacagaagaacccggcaggatgagcctgccctgttcgtggccctgaccttcgagcggcgggaggtcctggactcctccaatatcaaaccaatgaacctgatcggcgtggcaagaggcgaaaacatccccgccgtgatcgccctgaccgaccccgagggctgcccactgagccggtttaaggatagcctgggaaacccaacccacatcctgagaatcggcgagagctataaggagaagcagcggaccatccaggccaagaaggaggtggagcagcggagagccggcggctacagccggaagtacgccagcaaagccaagaatctggcagacgatatggtgagaaacaccgctagagatctgctgtactacgccgtgacccaggatgccatgctgatcttcgccaacctgagccggggcttcggccggcagggcaagcggaccttcatggccgagagacagtacacacggatggaggactggctgaccgccaagctggcctacgagggcctgagcaagacctacctgtccaagacactggcccagtacacctccaagacatgcagcaactgtgggtttaccatcaccagcgccgactacgacagggtgctggagaagctgaagaagacagcaacaggctggatgaccacaattaacggcaaggagctgaaggtggagggccagattacctactacaacagatacaagagacagaacgtagtcaaggacctgtccgtcgagctggatagactgagcgaagaatctgtgaacaacgacatctcctcctggacaaagggcagaagcggagaagctctgagcctcctgaagaaaagattctcccatagacccgtgcaggagaagttcgtgtgcctgaactgcggcttcgagacacacgcagccgagcaagccgccctgaacatcgccagatcctggctgttcctgcggagccaggagtacaagaaataccagacaaacaagacaaccggcaacaccgataagagagccttcgtcgagacctggcagtccttttaccggaagaagcttaaggaggtgtggaaacctgccgtgcggtctggcggatctggcggaggctcctcaggccggcagcgacctgttcagggacgtggccgtggtgttcagccaggaggagtgggagcagctggcccccacccagagggacctgtacagggacgtgatgctggagacctacagcaacctggtgagcctgggcctggccgtgagcaagcccgacgtgatcagcttcctggagcagggcaaggagccctggaccgtggagggcgtggccaccggcggcctgtgccccgtgctgaagagcaggggatctggctccggcagcggccccaagaaaaagagaaaagtctaagctgccttctgcggggcttgccttctggccatgcccttcttctctcccttgcacctgtacctcttggtctttgaataaagcctgagtaggaaggctagcaaaaaaaaaaaaaaaaaaaaaaaaaaaaaaaaaaaaaaaaaaaaaaaaaaaaaaaaaaaaaaaaaaaaaaaaaaaaaaaa

SEQ ID NO: 16531 - RNA, 9485 nt, synthetic construct
  source 1..9485: mol_type = other RNA
aggaaataagagagaaaagaagagtaagaagaaatataagagccaccatggcccctaagaagaagcgtaaagtgagccggatggaacgcctcgtctacgaggtgcggcagaagtgcagaaacatcgaggacatctgcatctcctgcggatctctgaacgtgaccctggagcacccactgttcatcggcggcatgtgccagaactgtaaaaactgttttctggagtgtgcctatcaatacgacgatgacggctaccagagctactgcaccatctgttgcggcggaagagaggtgctgatgtgtggaaataacaactgctgccggtgcttctgcgtggaatgcgtggacctgctggtgggccccggcgccgcccaggccgctattaaggaagatccttggaactgctacatgtgcggccacaagggcacatacggcctgctgagacggagagaggactggcctagcagactgcagatgttcttcgccaataaccacgaccaggagttcgacccccctaaggtgtaccctcccgtccccgccgagaagagaaagcccatccgggtcctgagcctgttcgatggcatcgccaccggtctgctggtgctgaaggacctgggcatccaggtggataggtacattgcctccgaggtgtgcgaggactccatcaccgtgggaatggtgcgtcatcagggcaagatcatgtacgtgggcgacgtgcggagcgtgacacagaagcatatccaggagtggggccctttcgacctggtgatcggcggcagcccttgcaatgacctgagcatcgtgaacccagcccggaagggcctgtacgagggaaccggcagactgttcttcgagttttacagactgctgcacgacgcccggcctaaggaaggcgacgaccggcccttcttttggctgttcgagaatgtggtggccatgggagtcagcgacaagcgggatattagccggttcctggagagcaaccccgtgatgatcgatgccaaggaagtgagcgccgcccaccgggccagatacttctggggcaatctgcctggcatgaacagacccctggccagcaccgtgaacgacaagctggagctgcaggagtgcctggagcacggccggatcgccaagttcagcaaggtgagaaccatcaccacccgaagcaacagcatcaaacaaggcaaggaccagcactttcctgtgttcatgaacgagaaggaggacatcctgtggtgtaccgagatggagagagtgttcgggttcccagtccactacacagatgtcagcaacatgtctagactggccagacagagactgctgggaagaagctggtccgtccctgtgatcagacacctgttcgcccctctgaaggagtacttcgcctgcgtgagcagcggcaacagcaacgccaacagccggggccccagcttctctagcggcctggtgccactgtccctgagagggagccacatgggccccatggagatctacaaaaccgtgagcgcctggaagcggcagcctgtgcgcgtgctgagcctgtttcggaatatcgataaagtcctgaaaagcctgggattcctggagagcggctctggctccggcggtggcaccctgaagtacgtggaggatgtgacaaacgtggtcagacgggatgtggagaagtggggccccttcgatctggtgtacggcagcacccaacccctgggcagctcttgtgaccggtgccctggctggtacatgtttcagttccaccggatcctgcagtacgccctgccgagacaggagtcccagcggccattcttttggattttcatggacaacttgctgctgaccgaggatgaccaggaaactaccactcggttcctgcagaccgaagccgtgaccctgcaggacgtgagaggccgggactaccagaacgccatgcgggtgtggtccaacatccctggactgaaaagcaagcacgcacctctgacccctaaagaagaggagtacctgcaggcccaggtgcggagcagaagcaagctggacgcccctaaggtggatctgctggtgaagaattgcctcctgcccctgagagagtacttcaagtatttcagccagaatagtctgcccctgggaggcagcggcggcggcgccctggtgacatttgaggacgtcgccgtgcggttcacccaggaggaatgggctctgctggatccttctcagaaaatcctgtaccgggacgtgatgagagagacataccggaatctgacctccgtgggcatcaactgggaatgttgggaccttgaagcctgcttcagaagcctgggaagaaacctgagagtgcaggtggtgaagagaaagtgcgagctgaccaacagcggcccctgcgccgagggcggcccaagcagcggcgcccctcctcccagcggcggcagcccagccggctccccaacctctaccgaggagggcacctctgagtccgccacccccgagagcggccctggcacctccaccgagcccagcgagggcagcgcacccggcagccctgccggcagccccacctccacagaggagggaaccagcaccgagcccagcgaaggcagcgccccaggcaccagcaccgagcctagtgagcaggagattaaacggatcaacaagatcagaagaagacttgtgaaagacagcaacaccaagaaggccggcaagacaggccccatgaaaaccctgctggttagagtgatgacacccgatctgagagagcggctggaaaacctgagaaagaagcctgaaaatatcccccagcccatcagcaatacatctagagccaacctgaataagctgctgaccgattacaccgaaatgaagaaggcgatcctgcatgtgtactgggaagagttccagaaggaccctgtgggcctgatgagccgggtggcccagcctgccagcaagaagatcgatcagaacaagctgaaacctgagatggacgagaagggcaacctgaccaccgccggctttgcctgctctcagtgtggccagcccctgttcgtgtacaagctggagcaggtgtctgagaagggcaaggcttacaccaactacttcggacggtgcaatgtggccgagcacgaaaagctgatcctgctggcccagctgaagcccgagaaggatagcgacgaagccgtgacatatagcctgggaaagtttgggcagagggccctggatttctacagcattcatgtgaccaaggagtccacccaccccgtgaagcccctggcccagatcgccggaaacagatacgcctccggacctgtgggaaaggccctgagcgacgcatgtatgggcacaatcgcctccttcctgtctaagtaccaggacatcatcatcgaacaccagaaggtggtgaagggcaaccagaagagactggagagcctgcgggagctggccggcaaggaaaacctggaataccctagcgtgaccctgccacctcagcctcacaccaaggagggcgttgatgcctacaacgaagtgatcgcccgggtgcgaatgtgggtgaacctgaacctgtggcagaagctgaagctaagcagagatgatgccaagcctctgctgagactgaagggattcccttcctttcctctggtcgagagacaggccaacgaagtggactggtgggacatggtgtgtaacgtgaagaagctgatcaacgagaaaaaggaggatggcaaggtgttttggcagaatctggctggctacaagagacaggaagccctgagaccatacctgagcagcgaggaagatcggaagaagggaaagaaattcgctcggtaccagctgggcgacctgctgctgcacctggaaaagaagcacggcgaggactggggaaaggtgtacgacgaggcctgggagcggattgacaagaaagtggaaggcctgagcaagcacatcaagctggaagaggaacggagaagcgaggacgcccagagcaaggccgccctgaccgactggctgcgggctaaggccagcttcgtgatcgagggcctgaaggaggccgacaaggacgagttctgcagatgcgagctgaagctgcagaagtggtacggggacctgcggggaaagcccttcgccatcgaagccgagaacagcatcctggacatcagcggcttcagcaagcagtacaactgtgccttcatctggcagaaggacggcgtgaagaagctgaacctgtacctgatcatcaactacttcaagggcggcaagctgcggttcaagaagatcaaacctgaagccttcgaagccaacagattctacaccgtgatcaacaaaaagagcggcgagatcgtgcccatggaggtgaacttcaacttcgacgaccccaacctgatcatcctgcctctggcctttggcaagagacagggcagagaattcatctggaacgacctgctgtccctggaaaccggcagcctgaagctggccaacggaagagtgatcgagaagacactgtacaacagaagaacccggcaggatgagcctgccctgttcgtggccctgaccttcgagcggcgggaggtcctggactcctccaatatcaaaccaatgaacctgatcggcgtggcaagaggcgaaaacatccccgccgtgatcgccctgaccgaccccgagggctgcccactgagccggtttaaggatagcctgggaaacccaacccacatcctgagaatcggcgagagctataaggagaagcagcggaccatccaggccaagaaggaggtggagcagcggagagccggcggctacagccggaagtacgccagcaaagccaagaatctggcagacgatatggtgagaaacaccgctagagatctgctgtactacgccgtgacccaggatgccatgctgatcttcgccaacctgagccggggcttcggccggcagggcaagcggaccttcatggccgagagacagtacacacggatggaggactggctgaccgccaagctggcctacgagggcctgagcaagacctacctgtccaagacactggcccagtacacctccaagacatgcagcaactgtgggtttaccatcaccagcgccgactacgacagggtgctggagaagctgaagaagacagcaacaggctggatgaccacaattaacggcaaggagctgaaggtggagggccagattacctactacaacagatacaagagacagaacgtagtcaaggacctgtccgtcgagctggatagactgagcgaagaatctgtgaacaacgacatctcctcctggacaaagggcagaagcggagaagctctgagcctcctgaagaaaagattctcccatagacccgtgcaggagaagttcgtgtgcctgaactgcggcttcgagacacacgcagccgagcaagccgccctgaacatcgccagatcctggctgttcctgcggagccaggagtacaagaaataccagacaaacaagacaaccggcaacaccgataagagagccttcgtcgagacctggcagtccttttaccggaagaagcttaaggaggtgtggaaacctgccgtgcggtctggcggatctggcggaggctccagccaggagcccgtgaccttcgccgacgtggccgtggtgttcacccccgaggagtgggtgttcctggacagcacccagaggagcctgtacagggacgtgatgctggagaactacaggaacctggccagcgtggccggcgaccagctgaggaagcccaacgccagcagcgacctggagcagaggggcgagcagtggaacaccgagaggggcgtgatcagcgacacctgccccgagccccagctgggcggcccaagcagcggcgcccctcctcccagcggcggcagcccagccggctccccaacctctaccgaggagggcacctctgagtccgccacccccgagagcggccctggcacctccaccgagcccagcgagggcagcgcacccggcagccctgccggcagccccacctccacagaggagggaaccagcaccgagcccagcgaaggcagcgccccaggcaccagcaccgagcctagtgagcaggagattaaacggatcaacaagatcagaagaagacttgtgaaagacagcaacaccaagaaggccggcaagacaggccccatgaaaaccctgctggttagagtgatgacacccgatctgagagagcggctggaaaacctgagaaagaagcctgaaaatatcccccagcccatcagcaatacatctagagccaacctgaataagctgctgaccgattacaccgaaatgaagaaggcgatcctgcatgtgtactgggaagagttccagaaggaccctgtgggcctgatgagccgggtggcccagcctgccagcaagaagatcgatcagaacaagctgaaacctgagatggacgagaagggcaacctgaccaccgccggctttgcctgctctcagtgtggccagcccctgttcgtgtacaagctggagcaggtgtctgagaagggcaaggcttacaccaactacttcggacggtgcaatgtggccgagcacgaaaagctgatcctgctggcccagctgaagcccgagaaggatagcgacgaagccgtgacatatagcctgggaaagtttgggcagagggccctggatttctacagcattcatgtgaccaaggagtccacccaccccgtgaagcccctggcccagatcgccggaaacagatacgcctccggacctgtgggaaaggccctgagcgacgcatgtatgggcacaatcgcctccttcctgtctaagtaccaggacatcatcatcgaacaccagaaggtggtgaagggcaaccagaagagactggagagcctgcgggagctggccggcaaggaaaacctggaataccctagcgtgaccctgccacctcagcctcacaccaaggagggcgttgatgcctacaacgaagtgatcgcccgggtgcgaatgtgggtgaacctgaacctgtggcagaagctgaagctaagcagagatgatgccaagcctctgctgagactgaagggattcccttcctttcctctggtcgagagacaggccaacgaagtggactggtgggacatggtgtgtaacgtgaagaagctgatcaacgagaaaaaggaggatggcaaggtgttttggcagaatctggctggctacaagagacaggaagccctgagaccatacctgagcagcgaggaagatcggaagaagggaaagaaattcgctcggtaccagctgggcgacctgctgctgcacctggaaaagaagcacggcgaggactggggaaaggtgtacgacgaggcctgggagcggattgacaagaaagtggaaggcctgagcaagcacatcaagctggaagaggaacggagaagcgaggacgcccagagcaaggccgccctgaccgactggctgcgggctaaggccagcttcgtgatcgagggcctgaaggaggccgacaaggacgagttctgcagatgcgagctgaagctgcagaagtggtacggggacctgcggggaaagcccttcgccatcgaagccgagaacagcatcctggacatcagcggcttcagcaagcagtacaactgtgccttcatctggcagaaggacggcgtgaagaagctgaacctgtacctgatcatcaactacttcaagggcggcaagctgcggttcaagaagatcaaacctgaagccttcgaagccaacagattctacaccgtgatcaacaaaaagagcggcgagatcgtgcccatggaggtgaacttcaacttcgacgaccccaacctgatcatcctgcctctggcctttggcaagagacagggcagagaattcatctggaacgacctgctgtccctggaaaccggcagcctgaagctggccaacggaagagtgatcgagaagacactgtacaacagaagaacccggcaggatgagcctgccctgttcgtggccctgaccttcgagcggcgggaggtcctggactcctccaatatcaaaccaatgaacctgatcggcgtggcaagaggcgaaaacatccccgccgtgatcgccctgaccgaccccgagggctgcccactgagccggtttaaggatagcctgggaaacccaacccacatcctgagaatcggcgagagctataaggagaagcagcggaccatccaggccaagaaggaggtggagcagcggagagccggcggctacagccggaagtacgccagcaaagccaagaatctggcagacgatatggtgagaaacaccgctagagatctgctgtactacgccgtgacccaggatgccatgctgatcttcgccaacctgagccggggcttcggccggcagggcaagcggaccttcatggccgagagacagtacacacggatggaggactggctgaccgccaagctggcctacgagggcctgagcaagacctacctgtccaagacactggcccagtacacctccaagacatgcagcaactgtgggtttaccatcaccagcgccgactacgacagggtgctggagaagctgaagaagacagcaacaggctggatgaccacaattaacggcaaggagctgaaggtggagggccagattacctactacaacagatacaagagacagaacgtagtcaaggacctgtccgtcgagctggatagactgagcgaagaatctgtgaacaacgacatctcctcctggacaaagggcagaagcggagaagctctgagcctcctgaagaaaagattctcccatagacccgtgcaggagaagttcgtgtgcctgaactgcggcttcgagacacacgcagccgagcaagccgccctgaacatcgccagatcctggctgttcctgcggagccaggagtacaagaaataccagacaaacaagacaaccggcaacaccgataagagagccttcgtcgagacctggcagtccttttaccggaagaagcttaaggaggtgtggaaacctgccgtgcggtctggcggatctggcggaggctcctagccaggagcccgtgaccttcgccgacgtggccgtggtgttcacccccgaggagtgggtgttcctggacagcacccagaggagcctgtacagggacgtgatgctggagaactacaggaacctggccagcgtggccggcgaccagctgaggaagcccaacgccagcagcgacctggagcagaggggcgagcagtggaacaccgagaggggcgtgatcagcgacacctgccccgagccccagctgggatctggctccggcagcggccccaagaaaaagagaaaagtctaagctgccttctgcggggcttgccttctggccatgcccttcttctctcccttgcacctgtacctcttggtctttgaataaagcctgagtaggaaggctagcaaaaaaaaaaaaaaaaaaaaaaaaaaaaaaaaaaaaaaaaaaaaaaaaaaaaaaaaaaaaaaaaaaaaaaaaaaaaaaaa

SEQ ID NO: 16532 - RNA, 9485 nt, synthetic construct
  source 1..9485: mol_type = other RNA
aggaaataagagagaaaagaagagtaagaagaaatataagagccaccatggcccctaagaagaagcgtaaagtgagccggatggaacgcctcgtctacgaggtgcggcagaagtgcagaaacatcgaggacatctgcatctcctgcggatctctgaacgtgaccctggagcacccactgttcatcggcggcatgtgccagaactgtaaaaactgttttctggagtgtgcctatcaatacgacgatgacggctaccagagctactgcaccatctgttgcggcggaagagaggtgctgatgtgtggaaataacaactgctgccggtgcttctgcgtggaatgcgtggacctgctggtgggccccggcgccgcccaggccgctattaaggaagatccttggaactgctacatgtgcggccacaagggcacatacggcctgctgagacggagagaggactggcctagcagactgcagatgttcttcgccaataaccacgaccaggagttcgacccccctaaggtgtaccctcccgtccccgccgagaagagaaagcccatccgggtcctgagcctgttcgatggcatcgccaccggtctgctggtgctgaaggacctgggcatccaggtggataggtacattgcctccgaggtgtgcgaggactccatcaccgtgggaatggtgcgtcatcagggcaagatcatgtacgtgggcgacgtgcggagcgtgacacagaagcatatccaggagtggggccctttcgacctggtgatcggcggcagcccttgcaatgacctgagcatcgtgaacccagcccggaagggcctgtacgagggaaccggcagactgttcttcgagttttacagactgctgcacgacgcccggcctaaggaaggcgacgaccggcccttcttttggctgttcgagaatgtggtggccatgggagtcagcgacaagcgggatattagccggttcctggagagcaaccccgtgatgatcgatgccaaggaagtgagcgccgcccaccgggccagatacttctggggcaatctgcctggcatgaacagacccctggccagcaccgtgaacgacaagctggagctgcaggagtgcctggagcacggccggatcgccaagttcagcaaggtgagaaccatcaccacccgaagcaacagcatcaaacaaggcaaggaccagcactttcctgtgttcatgaacgagaaggaggacatcctgtggtgtaccgagatggagagagtgttcgggttcccagtccactacacagatgtcagcaacatgtctagactggccagacagagactgctgggaagaagctggtccgtccctgtgatcagacacctgttcgcccctctgaaggagtacttcgcctgcgtgagcagcggcaacagcaacgccaacagccggggccccagcttctctagcggcctggtgccactgtccctgagagggagccacatgggccccatggagatctacaaaaccgtgagcgcctggaagcggcagcctgtgcgcgtgctgagcctgtttcggaatatcgataaagtcctgaaaagcctgggattcctggagagcggctctggctccggcggtggcaccctgaagtacgtggaggatgtgacaaacgtggtcagacgggatgtggagaagtggggccccttcgatctggtgtacggcagcacccaacccctgggcagctcttgtgaccggtgccctggctggtacatgtttcagttccaccggatcctgcagtacgccctgccgagacaggagtcccagcggccattcttttggattttcatggacaacttgctgctgaccgaggatgaccaggaaactaccactcggttcctgcagaccgaagccgtgaccctgcaggacgtgagaggccgggactaccagaacgccatgcgggtgtggtccaacatccctggactgaaaagcaagcacgcacctctgacccctaaagaagaggagtacctgcaggcccaggtgcggagcagaagcaagctggacgcccctaaggtggatctgctggtgaagaattgcctcctgcccctgagagagtacttcaagtatttcagccagaatagtctgcccctgggaggcagcggcggcggcgccctggtgacatttgaggacgtcgccgtgcggttcacccaggaggaatgggctctgctggatccttctcagaaaatcctgtaccgggacgtgatgagagagacataccggaatctgacctccgtgggcatcaactgggaatgttgggaccttgaagcctgcttcagaagcctgggaagaaacctgagagtgcaggtggtgaagagaaagtgcgagctgaccaacagcggcccctgcgccgagggcggcccaagcagcggcgcccctcctcccagcggcggcagcccagccggctccccaacctctaccgaggagggcacctctgagtccgccacccccgagagcggccctggcacctccaccgagcccagcgagggcagcgcacccggcagccctgccggcagccccacctccacagaggagggaaccagcaccgagcccagcgaaggcagcgccccaggcaccagcaccgagcctagtgagcaggagattaaacggatcaacaagatcagaagaagacttgtgaaagacagcaacaccaagaaggccggcaagacaggccccatgaaaaccctgctggttagagtgatgacacccgatctgagagagcggctggaaaacctgagaaagaagcctgaaaatatcccccagcccatcagcaatacatctagagccaacctgaataagctgctgaccgattacaccgaaatgaagaaggcgatcctgcatgtgtactgggaagagttccagaaggaccctgtgggcctgatgagccgggtggcccagcctgccagcaagaagatcgatcagaacaagctgaaacctgagatggacgagaagggcaacctgaccaccgccggctttgcctgctctcagtgtggccagcccctgttcgtgtacaagctggagcaggtgtctgagaagggcaaggcttacaccaactacttcggacggtgcaatgtggccgagcacgaaaagctgatcctgctggcccagctgaagcccgagaaggatagcgacgaagccgtgacatatagcctgggaaagtttgggcagagggccctggatttctacagcattcatgtgaccaaggagtccacccaccccgtgaagcccctggcccagatcgccggaaacagatacgcctccggacctgtgggaaaggccctgagcgacgcatgtatgggcacaatcgcctccttcctgtctaagtaccaggacatcatcatcgaacaccagaaggtggtgaagggcaaccagaagagactggagagcctgcgggagctggccggcaaggaaaacctggaataccctagcgtgaccctgccacctcagcctcacaccaaggagggcgttgatgcctacaacgaagtgatcgcccgggtgcgaatgtgggtgaacctgaacctgtggcagaagctgaagctaagcagagatgatgccaagcctctgctgagactgaagggattcccttcctttcctctggtcgagagacaggccaacgaagtggactggtgggacatggtgtgtaacgtgaagaagctgatcaacgagaaaaaggaggatggcaaggtgttttggcagaatctggctggctacaagagacaggaagccctgagaccatacctgagcagcgaggaagatcggaagaagggaaagaaattcgctcggtaccagctgggcgacctgctgctgcacctggaaaagaagcacggcgaggactggggaaaggtgtacgacgaggcctgggagcggattgacaagaaagtggaaggcctgagcaagcacatcaagctggaagaggaacggagaagcgaggacgcccagagcaaggccgccctgaccgactggctgcgggctaaggccagcttcgtgatcgagggcctgaaggaggccgacaaggacgagttctgcagatgcgagctgaagctgcagaagtggtacggggacctgcggggaaagcccttcgccatcgaagccgagaacagcatcctggacatcagcggcttcagcaagcagtacaactgtgccttcatctggcagaaggacggcgtgaagaagctgaacctgtacctgatcatcaactacttcaagggcggcaagctgcggttcaagaagatcaaacctgaagccttcgaagccaacagattctacaccgtgatcaacaaaaagagcggcgagatcgtgcccatggaggtgaacttcaacttcgacgaccccaacctgatcatcctgcctctggcctttggcaagagacagggcagagaattcatctggaacgacctgctgtccctggaaaccggcagcctgaagctggccaacggaagagtgatcgagaagacactgtacaacagaagaacccggcaggatgagcctgccctgttcgtggccctgaccttcgagcggcgggaggtcctggactcctccaatatcaaaccaatgaacctgatcggcgtggcaagaggcgaaaacatccccgccgtgatcgccctgaccgaccccgagggctgcccactgagccggtttaaggatagcctgggaaacccaacccacatcctgagaatcggcgagagctataaggagaagcagcggaccatccaggccaagaaggaggtggagcagcggagagccggcggctacagccggaagtacgccagcaaagccaagaatctggcagacgatatggtgagaaacaccgctagagatctgctgtactacgccgtgacccaggatgccatgctgatcttcgccaacctgagccggggcttcggccggcagggcaagcggaccttcatggccgagagacagtacacacggatggaggactggctgaccgccaagctggcctacgagggcctgagcaagacctacctgtccaagacactggcccagtacacctccaagacatgcagcaactgtgggtttaccatcaccagcgccgactacgacagggtgctggagaagctgaagaagacagcaacaggctggatgaccacaattaacggcaaggagctgaaggtggagggccagattacctactacaacagatacaagagacagaacgtagtcaaggacctgtccgtcgagctggatagactgagcgaagaatctgtgaacaacgacatctcctcctggacaaagggcagaagcggagaagctctgagcctcctgaagaaaagattctcccatagacccgtgcaggagaagttcgtgtgcctgaactgcggcttcgagacacacgcagccgagcaagccgccctgaacatcgccagatcctggctgttcctgcggagccaggagtacaagaaataccagacaaacaagacaaccggcaacaccgataagagagccttcgtcgagacctggcagtccttttaccggaagaagcttaaggaggtgtggaaacctgccgtgcggtctggcggatctggcggaggctcccccctgaccttcgaggacgtggccctgtacttcagcgaggaggagtggctgatcatggaccccaaccagaggaccctgtacctggacgtgatgcaggagctgtacgagaacgtgaccagcctgggcctgaagctgaagaacgacaccggcaacgacccccccgtgagcctgcccaccctggagatccagcccagcggctgcgaggtggtgaggaaggccaccatgaaggacgccgagaccaccggcggcccaagcagcggcgcccctcctcccagcggcggcagcccagccggctccccaacctctaccgaggagggcacctctgagtccgccacccccgagagcggccctggcacctccaccgagcccagcgagggcagcgcacccggcagccctgccggcagccccacctccacagaggagggaaccagcaccgagcccagcgaaggcagcgccccaggcaccagcaccgagcctagtgagcaggagattaaacggatcaacaagatcagaagaagacttgtgaaagacagcaacaccaagaaggccggcaagacaggccccatgaaaaccctgctggttagagtgatgacacccgatctgagagagcggctggaaaacctgagaaagaagcctgaaaatatcccccagcccatcagcaatacatctagagccaacctgaataagctgctgaccgattacaccgaaatgaagaaggcgatcctgcatgtgtactgggaagagttccagaaggaccctgtgggcctgatgagccgggtggcccagcctgccagcaagaagatcgatcagaacaagctgaaacctgagatggacgagaagggcaacctgaccaccgccggctttgcctgctctcagtgtggccagcccctgttcgtgtacaagctggagcaggtgtctgagaagggcaaggcttacaccaactacttcggacggtgcaatgtggccgagcacgaaaagctgatcctgctggcccagctgaagcccgagaaggatagcgacgaagccgtgacatatagcctgggaaagtttgggcagagggccctggatttctacagcattcatgtgaccaaggagtccacccaccccgtgaagcccctggcccagatcgccggaaacagatacgcctccggacctgtgggaaaggccctgagcgacgcatgtatgggcacaatcgcctccttcctgtctaagtaccaggacatcatcatcgaacaccagaaggtggtgaagggcaaccagaagagactggagagcctgcgggagctggccggcaaggaaaacctggaataccctagcgtgaccctgccacctcagcctcacaccaaggagggcgttgatgcctacaacgaagtgatcgcccgggtgcgaatgtgggtgaacctgaacctgtggcagaagctgaagctaagcagagatgatgccaagcctctgctgagactgaagggattcccttcctttcctctggtcgagagacaggccaacgaagtggactggtgggacatggtgtgtaacgtgaagaagctgatcaacgagaaaaaggaggatggcaaggtgttttggcagaatctggctggctacaagagacaggaagccctgagaccatacctgagcagcgaggaagatcggaagaagggaaagaaattcgctcggtaccagctgggcgacctgctgctgcacctggaaaagaagcacggcgaggactggggaaaggtgtacgacgaggcctgggagcggattgacaagaaagtggaaggcctgagcaagcacatcaagctggaagaggaacggagaagcgaggacgcccagagcaaggccgccctgaccgactggctgcgggctaaggccagcttcgtgatcgagggcctgaaggaggccgacaaggacgagttctgcagatgcgagctgaagctgcagaagtggtacggggacctgcggggaaagcccttcgccatcgaagccgagaacagcatcctggacatcagcggcttcagcaagcagtacaactgtgccttcatctggcagaaggacggcgtgaagaagctgaacctgtacctgatcatcaactacttcaagggcggcaagctgcggttcaagaagatcaaacctgaagccttcgaagccaacagattctacaccgtgatcaacaaaaagagcggcgagatcgtgcccatggaggtgaacttcaacttcgacgaccccaacctgatcatcctgcctctggcctttggcaagagacagggcagagaattcatctggaacgacctgctgtccctggaaaccggcagcctgaagctggccaacggaagagtgatcgagaagacactgtacaacagaagaacccggcaggatgagcctgccctgttcgtggccctgaccttcgagcggcgggaggtcctggactcctccaatatcaaaccaatgaacctgatcggcgtggcaagaggcgaaaacatccccgccgtgatcgccctgaccgaccccgagggctgcccactgagccggtttaaggatagcctgggaaacccaacccacatcctgagaatcggcgagagctataaggagaagcagcggaccatccaggccaagaaggaggtggagcagcggagagccggcggctacagccggaagtacgccagcaaagccaagaatctggcagacgatatggtgagaaacaccgctagagatctgctgtactacgccgtgacccaggatgccatgctgatcttcgccaacctgagccggggcttcggccggcagggcaagcggaccttcatggccgagagacagtacacacggatggaggactggctgaccgccaagctggcctacgagggcctgagcaagacctacctgtccaagacactggcccagtacacctccaagacatgcagcaactgtgggtttaccatcaccagcgccgactacgacagggtgctggagaagctgaagaagacagcaacaggctggatgaccacaattaacggcaaggagctgaaggtggagggccagattacctactacaacagatacaagagacagaacgtagtcaaggacctgtccgtcgagctggatagactgagcgaagaatctgtgaacaacgacatctcctcctggacaaagggcagaagcggagaagctctgagcctcctgaagaaaagattctcccatagacccgtgcaggagaagttcgtgtgcctgaactgcggcttcgagacacacgcagccgagcaagccgccctgaacatcgccagatcctggctgttcctgcggagccaggagtacaagaaataccagacaaacaagacaaccggcaacaccgataagagagccttcgtcgagacctggcagtccttttaccggaagaagcttaaggaggtgtggaaacctgccgtgcggtctggcggatctggcggaggctcctcccctgaccttcgaggacgtggccctgtacttcagcgaggaggagtggctgatcatggaccccaaccagaggaccctgtacctggacgtgatgcaggagctgtacgagaacgtgaccagcctgggcctgaagctgaagaacgacaccggcaacgacccccccgtgagcctgcccaccctggagatccagcccagcggctgcgaggtggtgaggaaggccaccatgaaggacgccgagaccaccggatctggctccggcagcggccccaagaaaaagagaaaagtctaagctgccttctgcggggcttgccttctggccatgcccttcttctctcccttgcacctgtacctcttggtctttgaataaagcctgagtaggaaggctagcaaaaaaaaaaaaaaaaaaaaaaaaaaaaaaaaaaaaaaaaaaaaaaaaaaaaaaaaaaaaaaaaaaaaaaaaaaaaaaaa

SEQ ID NO: 16533 - RNA, 9485 nt, synthetic construct
  source 1..9485: mol_type = other RNA
aggaaataagagagaaaagaagagtaagaagaaatataagagccaccatggcccctaagaagaagcgtaaagtgagccggatggaacgcctcgtctacgaggtgcggcagaagtgcagaaacatcgaggacatctgcatctcctgcggatctctgaacgtgaccctggagcacccactgttcatcggcggcatgtgccagaactgtaaaaactgttttctggagtgtgcctatcaatacgacgatgacggctaccagagctactgcaccatctgttgcggcggaagagaggtgctgatgtgtggaaataacaactgctgccggtgcttctgcgtggaatgcgtggacctgctggtgggccccggcgccgcccaggccgctattaaggaagatccttggaactgctacatgtgcggccacaagggcacatacggcctgctgagacggagagaggactggcctagcagactgcagatgttcttcgccaataaccacgaccaggagttcgacccccctaaggtgtaccctcccgtccccgccgagaagagaaagcccatccgggtcctgagcctgttcgatggcatcgccaccggtctgctggtgctgaaggacctgggcatccaggtggataggtacattgcctccgaggtgtgcgaggactccatcaccgtgggaatggtgcgtcatcagggcaagatcatgtacgtgggcgacgtgcggagcgtgacacagaagcatatccaggagtggggccctttcgacctggtgatcggcggcagcccttgcaatgacctgagcatcgtgaacccagcccggaagggcctgtacgagggaaccggcagactgttcttcgagttttacagactgctgcacgacgcccggcctaaggaaggcgacgaccggcccttcttttggctgttcgagaatgtggtggccatgggagtcagcgacaagcgggatattagccggttcctggagagcaaccccgtgatgatcgatgccaaggaagtgagcgccgcccaccgggccagatacttctggggcaatctgcctggcatgaacagacccctggccagcaccgtgaacgacaagctggagctgcaggagtgcctggagcacggccggatcgccaagttcagcaaggtgagaaccatcaccacccgaagcaacagcatcaaacaaggcaaggaccagcactttcctgtgttcatgaacgagaaggaggacatcctgtggtgtaccgagatggagagagtgttcgggttcccagtccactacacagatgtcagcaacatgtctagactggccagacagagactgctgggaagaagctggtccgtccctgtgatcagacacctgttcgcccctctgaaggagtacttcgcctgcgtgagcagcggcaacagcaacgccaacagccggggccccagcttctctagcggcctggtgccactgtccctgagagggagccacatgggccccatggagatctacaaaaccgtgagcgcctggaagcggcagcctgtgcgcgtgctgagcctgtttcggaatatcgataaagtcctgaaaagcctgggattcctggagagcggctctggctccggcggtggcaccctgaagtacgtggaggatgtgacaaacgtggtcagacgggatgtggagaagtggggccccttcgatctggtgtacggcagcacccaacccctgggcagctcttgtgaccggtgccctggctggtacatgtttcagttccaccggatcctgcagtacgccctgccgagacaggagtcccagcggccattcttttggattttcatggacaacttgctgctgaccgaggatgaccaggaaactaccactcggttcctgcagaccgaagccgtgaccctgcaggacgtgagaggccgggactaccagaacgccatgcgggtgtggtccaacatccctggactgaaaagcaagcacgcacctctgacccctaaagaagaggagtacctgcaggcccaggtgcggagcagaagcaagctggacgcccctaaggtggatctgctggtgaagaattgcctcctgcccctgagagagtacttcaagtatttcagccagaatagtctgcccctgggaggcagcggcggcggcgccctggtgacatttgaggacgtcgccgtgcggttcacccaggaggaatgggctctgctggatccttctcagaaaatcctgtaccgggacgtgatgagagagacataccggaatctgacctccgtgggcatcaactgggaatgttgggaccttgaagcctgcttcagaagcctgggaagaaacctgagagtgcaggtggtgaagagaaagtgcgagctgaccaacagcggcccctgcgccgagggcggcccaagcagcggcgcccctcctcccagcggcggcagcccagccggctccccaacctctaccgaggagggcacctctgagtccgccacccccgagagcggccctggcacctccaccgagcccagcgagggcagcgcacccggcagccctgccggcagccccacctccacagaggagggaaccagcaccgagcccagcgaaggcagcgccccaggcaccagcaccgagcctagtgagcaggagattaaacggatcaacaagatcagaagaagacttgtgaaagacagcaacaccaagaaggccggcaagacaggccccatgaaaaccctgctggttagagtgatgacacccgatctgagagagcggctggaaaacctgagaaagaagcctgaaaatatcccccagcccatcagcaatacatctagagccaacctgaataagctgctgaccgattacaccgaaatgaagaaggcgatcctgcatgtgtactgggaagagttccagaaggaccctgtgggcctgatgagccgggtggcccagcctgccagcaagaagatcgatcagaacaagctgaaacctgagatggacgagaagggcaacctgaccaccgccggctttgcctgctctcagtgtggccagcccctgttcgtgtacaagctggagcaggtgtctgagaagggcaaggcttacaccaactacttcggacggtgcaatgtggccgagcacgaaaagctgatcctgctggcccagctgaagcccgagaaggatagcgacgaagccgtgacatatagcctgggaaagtttgggcagagggccctggatttctacagcattcatgtgaccaaggagtccacccaccccgtgaagcccctggcccagatcgccggaaacagatacgcctccggacctgtgggaaaggccctgagcgacgcatgtatgggcacaatcgcctccttcctgtctaagtaccaggacatcatcatcgaacaccagaaggtggtgaagggcaaccagaagagactggagagcctgcgggagctggccggcaaggaaaacctggaataccctagcgtgaccctgccacctcagcctcacaccaaggagggcgttgatgcctacaacgaagtgatcgcccgggtgcgaatgtgggtgaacctgaacctgtggcagaagctgaagctaagcagagatgatgccaagcctctgctgagactgaagggattcccttcctttcctctggtcgagagacaggccaacgaagtggactggtgggacatggtgtgtaacgtgaagaagctgatcaacgagaaaaaggaggatggcaaggtgttttggcagaatctggctggctacaagagacaggaagccctgagaccatacctgagcagcgaggaagatcggaagaagggaaagaaattcgctcggtaccagctgggcgacctgctgctgcacctggaaaagaagcacggcgaggactggggaaaggtgtacgacgaggcctgggagcggattgacaagaaagtggaaggcctgagcaagcacatcaagctggaagaggaacggagaagcgaggacgcccagagcaaggccgccctgaccgactggctgcgggctaaggccagcttcgtgatcgagggcctgaaggaggccgacaaggacgagttctgcagatgcgagctgaagctgcagaagtggtacggggacctgcggggaaagcccttcgccatcgaagccgagaacagcatcctggacatcagcggcttcagcaagcagtacaactgtgccttcatctggcagaaggacggcgtgaagaagctgaacctgtacctgatcatcaactacttcaagggcggcaagctgcggttcaagaagatcaaacctgaagccttcgaagccaacagattctacaccgtgatcaacaaaaagagcggcgagatcgtgcccatggaggtgaacttcaacttcgacgaccccaacctgatcatcctgcctctggcctttggcaagagacagggcagagaattcatctggaacgacctgctgtccctggaaaccggcagcctgaagctggccaacggaagagtgatcgagaagacactgtacaacagaagaacccggcaggatgagcctgccctgttcgtggccctgaccttcgagcggcgggaggtcctggactcctccaatatcaaaccaatgaacctgatcggcgtggcaagaggcgaaaacatccccgccgtgatcgccctgaccgaccccgagggctgcccactgagccggtttaaggatagcctgggaaacccaacccacatcctgagaatcggcgagagctataaggagaagcagcggaccatccaggccaagaaggaggtggagcagcggagagccggcggctacagccggaagtacgccagcaaagccaagaatctggcagacgatatggtgagaaacaccgctagagatctgctgtactacgccgtgacccaggatgccatgctgatcttcgccaacctgagccggggcttcggccggcagggcaagcggaccttcatggccgagagacagtacacacggatggaggactggctgaccgccaagctggcctacgagggcctgagcaagacctacctgtccaagacactggcccagtacacctccaagacatgcagcaactgtgggtttaccatcaccagcgccgactacgacagggtgctggagaagctgaagaagacagcaacaggctggatgaccacaattaacggcaaggagctgaaggtggagggccagattacctactacaacagatacaagagacagaacgtagtcaaggacctgtccgtcgagctggatagactgagcgaagaatctgtgaacaacgacatctcctcctggacaaagggcagaagcggagaagctctgagcctcctgaagaaaagattctcccatagacccgtgcaggagaagttcgtgtgcctgaactgcggcttcgagacacacgcagccgagcaagccgccctgaacatcgccagatcctggctgttcctgcggagccaggagtacaagaaataccagacaaacaagacaaccggcaacaccgataagagagccttcgtcgagacctggcagtccttttaccggaagaagcttaaggaggtgtggaaacctgccgtgcggtctggcggatctggcggaggctccagcaggaagcccgtgagcttcgccgacgtggccgtgtacttcagccccgaggagtggggctgcctgaggcccgtgcagagggccctgtacagggacgtgatgagggagacctacggccacctgggcgccctgggcttccaggacaccaagcccgccctgatcagctggatggaggaggaggccgagctgtggggcagcgacgccagggaccccgagctgggcgagtgcctgagcgaggacaccggcggcccaagcagcggcgcccctcctcccagcggcggcagcccagccggctccccaacctctaccgaggagggcacctctgagtccgccacccccgagagcggccctggcacctccaccgagcccagcgagggcagcgcacccggcagccctgccggcagccccacctccacagaggagggaaccagcaccgagcccagcgaaggcagcgccccaggcaccagcaccgagcctagtgagcaggagattaaacggatcaacaagatcagaagaagacttgtgaaagacagcaacaccaagaaggccggcaagacaggccccatgaaaaccctgctggttagagtgatgacacccgatctgagagagcggctggaaaacctgagaaagaagcctgaaaatatcccccagcccatcagcaatacatctagagccaacctgaataagctgctgaccgattacaccgaaatgaagaaggcgatcctgcatgtgtactgggaagagttccagaaggaccctgtgggcctgatgagccgggtggcccagcctgccagcaagaagatcgatcagaacaagctgaaacctgagatggacgagaagggcaacctgaccaccgccggctttgcctgctctcagtgtggccagcccctgttcgtgtacaagctggagcaggtgtctgagaagggcaaggcttacaccaactacttcggacggtgcaatgtggccgagcacgaaaagctgatcctgctggcccagctgaagcccgagaaggatagcgacgaagccgtgacatatagcctgggaaagtttgggcagagggccctggatttctacagcattcatgtgaccaaggagtccacccaccccgtgaagcccctggcccagatcgccggaaacagatacgcctccggacctgtgggaaaggccctgagcgacgcatgtatgggcacaatcgcctccttcctgtctaagtaccaggacatcatcatcgaacaccagaaggtggtgaagggcaaccagaagagactggagagcctgcgggagctggccggcaaggaaaacctggaataccctagcgtgaccctgccacctcagcctcacaccaaggagggcgttgatgcctacaacgaagtgatcgcccgggtgcgaatgtgggtgaacctgaacctgtggcagaagctgaagctaagcagagatgatgccaagcctctgctgagactgaagggattcccttcctttcctctggtcgagagacaggccaacgaagtggactggtgggacatggtgtgtaacgtgaagaagctgatcaacgagaaaaaggaggatggcaaggtgttttggcagaatctggctggctacaagagacaggaagccctgagaccatacctgagcagcgaggaagatcggaagaagggaaagaaattcgctcggtaccagctgggcgacctgctgctgcacctggaaaagaagcacggcgaggactggggaaaggtgtacgacgaggcctgggagcggattgacaagaaagtggaaggcctgagcaagcacatcaagctggaagaggaacggagaagcgaggacgcccagagcaaggccgccctgaccgactggctgcgggctaaggccagcttcgtgatcgagggcctgaaggaggccgacaaggacgagttctgcagatgcgagctgaagctgcagaagtggtacggggacctgcggggaaagcccttcgccatcgaagccgagaacagcatcctggacatcagcggcttcagcaagcagtacaactgtgccttcatctggcagaaggacggcgtgaagaagctgaacctgtacctgatcatcaactacttcaagggcggcaagctgcggttcaagaagatcaaacctgaagccttcgaagccaacagattctacaccgtgatcaacaaaaagagcggcgagatcgtgcccatggaggtgaacttcaacttcgacgaccccaacctgatcatcctgcctctggcctttggcaagagacagggcagagaattcatctggaacgacctgctgtccctggaaaccggcagcctgaagctggccaacggaagagtgatcgagaagacactgtacaacagaagaacccggcaggatgagcctgccctgttcgtggccctgaccttcgagcggcgggaggtcctggactcctccaatatcaaaccaatgaacctgatcggcgtggcaagaggcgaaaacatccccgccgtgatcgccctgaccgaccccgagggctgcccactgagccggtttaaggatagcctgggaaacccaacccacatcctgagaatcggcgagagctataaggagaagcagcggaccatccaggccaagaaggaggtggagcagcggagagccggcggctacagccggaagtacgccagcaaagccaagaatctggcagacgatatggtgagaaacaccgctagagatctgctgtactacgccgtgacccaggatgccatgctgatcttcgccaacctgagccggggcttcggccggcagggcaagcggaccttcatggccgagagacagtacacacggatggaggactggctgaccgccaagctggcctacgagggcctgagcaagacctacctgtccaagacactggcccagtacacctccaagacatgcagcaactgtgggtttaccatcaccagcgccgactacgacagggtgctggagaagctgaagaagacagcaacaggctggatgaccacaattaacggcaaggagctgaaggtggagggccagattacctactacaacagatacaagagacagaacgtagtcaaggacctgtccgtcgagctggatagactgagcgaagaatctgtgaacaacgacatctcctcctggacaaagggcagaagcggagaagctctgagcctcctgaagaaaagattctcccatagacccgtgcaggagaagttcgtgtgcctgaactgcggcttcgagacacacgcagccgagcaagccgccctgaacatcgccagatcctggctgttcctgcggagccaggagtacaagaaataccagacaaacaagacaaccggcaacaccgataagagagccttcgtcgagacctggcagtccttttaccggaagaagcttaaggaggtgtggaaacctgccgtgcggtctggcggatctggcggaggctcctagcaggaagcccgtgagcttcgccgacgtggccgtgtacttcagccccgaggagtggggctgcctgaggcccgtgcagagggccctgtacagggacgtgatgagggagacctacggccacctgggcgccctgggcttccaggacaccaagcccgccctgatcagctggatggaggaggaggccgagctgtggggcagcgacgccagggaccccgagctgggcgagtgcctgagcgaggacaccggatctggctccggcagcggccccaagaaaaagagaaaagtctaagctgccttctgcggggcttgccttctggccatgcccttcttctctcccttgcacctgtacctcttggtctttgaataaagcctgagtaggaaggctagcaaaaaaaaaaaaaaaaaaaaaaaaaaaaaaaaaaaaaaaaaaaaaaaaaaaaaaaaaaaaaaaaaaaaaaaaaaaaaaaa

SEQ ID NO: 16534 - RNA, 9485 nt, synthetic construct
  source 1..9485: mol_type = other RNA
aggaaataagagagaaaagaagagtaagaagaaatataagagccaccatggcccctaagaagaagcgtaaagtgagccggatggaacgcctcgtctacgaggtgcggcagaagtgcagaaacatcgaggacatctgcatctcctgcggatctctgaacgtgaccctggagcacccactgttcatcggcggcatgtgccagaactgtaaaaactgttttctggagtgtgcctatcaatacgacgatgacggctaccagagctactgcaccatctgttgcggcggaagagaggtgctgatgtgtggaaataacaactgctgccggtgcttctgcgtggaatgcgtggacctgctggtgggccccggcgccgcccaggccgctattaaggaagatccttggaactgctacatgtgcggccacaagggcacatacggcctgctgagacggagagaggactggcctagcagactgcagatgttcttcgccaataaccacgaccaggagttcgacccccctaaggtgtaccctcccgtccccgccgagaagagaaagcccatccgggtcctgagcctgttcgatggcatcgccaccggtctgctggtgctgaaggacctgggcatccaggtggataggtacattgcctccgaggtgtgcgaggactccatcaccgtgggaatggtgcgtcatcagggcaagatcatgtacgtgggcgacgtgcggagcgtgacacagaagcatatccaggagtggggccctttcgacctggtgatcggcggcagcccttgcaatgacctgagcatcgtgaacccagcccggaagggcctgtacgagggaaccggcagactgttcttcgagttttacagactgctgcacgacgcccggcctaaggaaggcgacgaccggcccttcttttggctgttcgagaatgtggtggccatgggagtcagcgacaagcgggatattagccggttcctggagagcaaccccgtgatgatcgatgccaaggaagtgagcgccgcccaccgggccagatacttctggggcaatctgcctggcatgaacagacccctggccagcaccgtgaacgacaagctggagctgcaggagtgcctggagcacggccggatcgccaagttcagcaaggtgagaaccatcaccacccgaagcaacagcatcaaacaaggcaaggaccagcactttcctgtgttcatgaacgagaaggaggacatcctgtggtgtaccgagatggagagagtgttcgggttcccagtccactacacagatgtcagcaacatgtctagactggccagacagagactgctgggaagaagctggtccgtccctgtgatcagacacctgttcgcccctctgaaggagtacttcgcctgcgtgagcagcggcaacagcaacgccaacagccggggccccagcttctctagcggcctggtgccactgtccctgagagggagccacatgggccccatggagatctacaaaaccgtgagcgcctggaagcggcagcctgtgcgcgtgctgagcctgtttcggaatatcgataaagtcctgaaaagcctgggattcctggagagcggctctggctccggcggtggcaccctgaagtacgtggaggatgtgacaaacgtggtcagacgggatgtggagaagtggggccccttcgatctggtgtacggcagcacccaacccctgggcagctcttgtgaccggtgccctggctggtacatgtttcagttccaccggatcctgcagtacgccctgccgagacaggagtcccagcggccattcttttggattttcatggacaacttgctgctgaccgaggatgaccaggaaactaccactcggttcctgcagaccgaagccgtgaccctgcaggacgtgagaggccgggactaccagaacgccatgcgggtgtggtccaacatccctggactgaaaagcaagcacgcacctctgacccctaaagaagaggagtacctgcaggcccaggtgcggagcagaagcaagctggacgcccctaaggtggatctgctggtgaagaattgcctcctgcccctgagagagtacttcaagtatttcagccagaatagtctgcccctgggaggcagcggcggcggcgccctggtgacatttgaggacgtcgccgtgcggttcacccaggaggaatgggctctgctggatccttctcagaaaatcctgtaccgggacgtgatgagagagacataccggaatctgacctccgtgggcatcaactgggaatgttgggaccttgaagcctgcttcagaagcctgggaagaaacctgagagtgcaggtggtgaagagaaagtgcgagctgaccaacagcggcccctgcgccgagggcggcccaagcagcggcgcccctcctcccagcggcggcagcccagccggctccccaacctctaccgaggagggcacctctgagtccgccacccccgagagcggccctggcacctccaccgagcccagcgagggcagcgcacccggcagccctgccggcagccccacctccacagaggagggaaccagcaccgagcccagcgaaggcagcgccccaggcaccagcaccgagcctagtgagcaggagattaaacggatcaacaagatcagaagaagacttgtgaaagacagcaacaccaagaaggccggcaagacaggccccatgaaaaccctgctggttagagtgatgacacccgatctgagagagcggctggaaaacctgagaaagaagcctgaaaatatcccccagcccatcagcaatacatctagagccaacctgaataagctgctgaccgattacaccgaaatgaagaaggcgatcctgcatgtgtactgggaagagttccagaaggaccctgtgggcctgatgagccgggtggcccagcctgccagcaagaagatcgatcagaacaagctgaaacctgagatggacgagaagggcaacctgaccaccgccggctttgcctgctctcagtgtggccagcccctgttcgtgtacaagctggagcaggtgtctgagaagggcaaggcttacaccaactacttcggacggtgcaatgtggccgagcacgaaaagctgatcctgctggcccagctgaagcccgagaaggatagcgacgaagccgtgacatatagcctgggaaagtttgggcagagggccctggatttctacagcattcatgtgaccaaggagtccacccaccccgtgaagcccctggcccagatcgccggaaacagatacgcctccggacctgtgggaaaggccctgagcgacgcatgtatgggcacaatcgcctccttcctgtctaagtaccaggacatcatcatcgaacaccagaaggtggtgaagggcaaccagaagagactggagagcctgcgggagctggccggcaaggaaaacctggaataccctagcgtgaccctgccacctcagcctcacaccaaggagggcgttgatgcctacaacgaagtgatcgcccgggtgcgaatgtgggtgaacctgaacctgtggcagaagctgaagctaagcagagatgatgccaagcctctgctgagactgaagggattcccttcctttcctctggtcgagagacaggccaacgaagtggactggtgggacatggtgtgtaacgtgaagaagctgatcaacgagaaaaaggaggatggcaaggtgttttggcagaatctggctggctacaagagacaggaagccctgagaccatacctgagcagcgaggaagatcggaagaagggaaagaaattcgctcggtaccagctgggcgacctgctgctgcacctggaaaagaagcacggcgaggactggggaaaggtgtacgacgaggcctgggagcggattgacaagaaagtggaaggcctgagcaagcacatcaagctggaagaggaacggagaagcgaggacgcccagagcaaggccgccctgaccgactggctgcgggctaaggccagcttcgtgatcgagggcctgaaggaggccgacaaggacgagttctgcagatgcgagctgaagctgcagaagtggtacggggacctgcggggaaagcccttcgccatcgaagccgagaacagcatcctggacatcagcggcttcagcaagcagtacaactgtgccttcatctggcagaaggacggcgtgaagaagctgaacctgtacctgatcatcaactacttcaagggcggcaagctgcggttcaagaagatcaaacctgaagccttcgaagccaacagattctacaccgtgatcaacaaaaagagcggcgagatcgtgcccatggaggtgaacttcaacttcgacgaccccaacctgatcatcctgcctctggcctttggcaagagacagggcagagaattcatctggaacgacctgctgtccctggaaaccggcagcctgaagctggccaacggaagagtgatcgagaagacactgtacaacagaagaacccggcaggatgagcctgccctgttcgtggccctgaccttcgagcggcgggaggtcctggactcctccaatatcaaaccaatgaacctgatcggcgtggcaagaggcgaaaacatccccgccgtgatcgccctgaccgaccccgagggctgcccactgagccggtttaaggatagcctgggaaacccaacccacatcctgagaatcggcgagagctataaggagaagcagcggaccatccaggccaagaaggaggtggagcagcggagagccggcggctacagccggaagtacgccagcaaagccaagaatctggcagacgatatggtgagaaacaccgctagagatctgctgtactacgccgtgacccaggatgccatgctgatcttcgccaacctgagccggggcttcggccggcagggcaagcggaccttcatggccgagagacagtacacacggatggaggactggctgaccgccaagctggcctacgagggcctgagcaagacctacctgtccaagacactggcccagtacacctccaagacatgcagcaactgtgggtttaccatcaccagcgccgactacgacagggtgctggagaagctgaagaagacagcaacaggctggatgaccacaattaacggcaaggagctgaaggtggagggccagattacctactacaacagatacaagagacagaacgtagtcaaggacctgtccgtcgagctggatagactgagcgaagaatctgtgaacaacgacatctcctcctggacaaagggcagaagcggagaagctctgagcctcctgaagaaaagattctcccatagacccgtgcaggagaagttcgtgtgcctgaactgcggcttcgagacacacgcagccgagcaagccgccctgaacatcgccagatcctggctgttcctgcggagccaggagtacaagaaataccagacaaacaagacaaccggcaacaccgataagagagccttcgtcgagacctggcagtccttttaccggaagaagcttaaggaggtgtggaaacctgccgtgcggtctggcggatctggcggaggctccagccaggagcccgtgagcttcctggacgtggccgtggacttcacccaggaggagtggcagcagctggaccccgtgcagaggaccacctacagggacgtgatgctggagaactacagccacctggtggccctgggctacgacagcgccaagcccaacgtgatcgtgaagctggagcagggcgaggagccctgggtggccgagggcgacctgccctgcaggagcaggcccgaggaggtgtggcagggcggcccaagcagcggcgcccctcctcccagcggcggcagcccagccggctccccaacctctaccgaggagggcacctctgagtccgccacccccgagagcggccctggcacctccaccgagcccagcgagggcagcgcacccggcagccctgccggcagccccacctccacagaggagggaaccagcaccgagcccagcgaaggcagcgccccaggcaccagcaccgagcctagtgagcaggagattaaacggatcaacaagatcagaagaagacttgtgaaagacagcaacaccaagaaggccggcaagacaggccccatgaaaaccctgctggttagagtgatgacacccgatctgagagagcggctggaaaacctgagaaagaagcctgaaaatatcccccagcccatcagcaatacatctagagccaacctgaataagctgctgaccgattacaccgaaatgaagaaggcgatcctgcatgtgtactgggaagagttccagaaggaccctgtgggcctgatgagccgggtggcccagcctgccagcaagaagatcgatcagaacaagctgaaacctgagatggacgagaagggcaacctgaccaccgccggctttgcctgctctcagtgtggccagcccctgttcgtgtacaagctggagcaggtgtctgagaagggcaaggcttacaccaactacttcggacggtgcaatgtggccgagcacgaaaagctgatcctgctggcccagctgaagcccgagaaggatagcgacgaagccgtgacatatagcctgggaaagtttgggcagagggccctggatttctacagcattcatgtgaccaaggagtccacccaccccgtgaagcccctggcccagatcgccggaaacagatacgcctccggacctgtgggaaaggccctgagcgacgcatgtatgggcacaatcgcctccttcctgtctaagtaccaggacatcatcatcgaacaccagaaggtggtgaagggcaaccagaagagactggagagcctgcgggagctggccggcaaggaaaacctggaataccctagcgtgaccctgccacctcagcctcacaccaaggagggcgttgatgcctacaacgaagtgatcgcccgggtgcgaatgtgggtgaacctgaacctgtggcagaagctgaagctaagcagagatgatgccaagcctctgctgagactgaagggattcccttcctttcctctggtcgagagacaggccaacgaagtggactggtgggacatggtgtgtaacgtgaagaagctgatcaacgagaaaaaggaggatggcaaggtgttttggcagaatctggctggctacaagagacaggaagccctgagaccatacctgagcagcgaggaagatcggaagaagggaaagaaattcgctcggtaccagctgggcgacctgctgctgcacctggaaaagaagcacggcgaggactggggaaaggtgtacgacgaggcctgggagcggattgacaagaaagtggaaggcctgagcaagcacatcaagctggaagaggaacggagaagcgaggacgcccagagcaaggccgccctgaccgactggctgcgggctaaggccagcttcgtgatcgagggcctgaaggaggccgacaaggacgagttctgcagatgcgagctgaagctgcagaagtggtacggggacctgcggggaaagcccttcgccatcgaagccgagaacagcatcctggacatcagcggcttcagcaagcagtacaactgtgccttcatctggcagaaggacggcgtgaagaagctgaacctgtacctgatcatcaactacttcaagggcggcaagctgcggttcaagaagatcaaacctgaagccttcgaagccaacagattctacaccgtgatcaacaaaaagagcggcgagatcgtgcccatggaggtgaacttcaacttcgacgaccccaacctgatcatcctgcctctggcctttggcaagagacagggcagagaattcatctggaacgacctgctgtccctggaaaccggcagcctgaagctggccaacggaagagtgatcgagaagacactgtacaacagaagaacccggcaggatgagcctgccctgttcgtggccctgaccttcgagcggcgggaggtcctggactcctccaatatcaaaccaatgaacctgatcggcgtggcaagaggcgaaaacatccccgccgtgatcgccctgaccgaccccgagggctgcccactgagccggtttaaggatagcctgggaaacccaacccacatcctgagaatcggcgagagctataaggagaagcagcggaccatccaggccaagaaggaggtggagcagcggagagccggcggctacagccggaagtacgccagcaaagccaagaatctggcagacgatatggtgagaaacaccgctagagatctgctgtactacgccgtgacccaggatgccatgctgatcttcgccaacctgagccggggcttcggccggcagggcaagcggaccttcatggccgagagacagtacacacggatggaggactggctgaccgccaagctggcctacgagggcctgagcaagacctacctgtccaagacactggcccagtacacctccaagacatgcagcaactgtgggtttaccatcaccagcgccgactacgacagggtgctggagaagctgaagaagacagcaacaggctggatgaccacaattaacggcaaggagctgaaggtggagggccagattacctactacaacagatacaagagacagaacgtagtcaaggacctgtccgtcgagctggatagactgagcgaagaatctgtgaacaacgacatctcctcctggacaaagggcagaagcggagaagctctgagcctcctgaagaaaagattctcccatagacccgtgcaggagaagttcgtgtgcctgaactgcggcttcgagacacacgcagccgagcaagccgccctgaacatcgccagatcctggctgttcctgcggagccaggagtacaagaaataccagacaaacaagacaaccggcaacaccgataagagagccttcgtcgagacctggcagtccttttaccggaagaagcttaaggaggtgtggaaacctgccgtgcggtctggcggatctggcggaggctcctagccaggagcccgtgagcttcctggacgtggccgtggacttcacccaggaggagtggcagcagctggaccccgtgcagaggaccacctacagggacgtgatgctggagaactacagccacctggtggccctgggctacgacagcgccaagcccaacgtgatcgtgaagctggagcagggcgaggagccctgggtggccgagggcgacctgccctgcaggagcaggcccgaggaggtgtggcagggatctggctccggcagcggccccaagaaaaagagaaaagtctaagctgccttctgcggggcttgccttctggccatgcccttcttctctcccttgcacctgtacctcttggtctttgaataaagcctgagtaggaaggctagcaaaaaaaaaaaaaaaaaaaaaaaaaaaaaaaaaaaaaaaaaaaaaaaaaaaaaaaaaaaaaaaaaaaaaaaaaaaaaaaa

SEQ ID NO: 16535 - RNA, 9485 nt, synthetic construct
  source 1..9485: mol_type = other RNA
aggaaataagagagaaaagaagagtaagaagaaatataagagccaccatggcccctaagaagaagcgtaaagtgagccggatggaacgcctcgtctacgaggtgcggcagaagtgcagaaacatcgaggacatctgcatctcctgcggatctctgaacgtgaccctggagcacccactgttcatcggcggcatgtgccagaactgtaaaaactgttttctggagtgtgcctatcaatacgacgatgacggctaccagagctactgcaccatctgttgcggcggaagagaggtgctgatgtgtggaaataacaactgctgccggtgcttctgcgtggaatgcgtggacctgctggtgggccccggcgccgcccaggccgctattaaggaagatccttggaactgctacatgtgcggccacaagggcacatacggcctgctgagacggagagaggactggcctagcagactgcagatgttcttcgccaataaccacgaccaggagttcgacccccctaaggtgtaccctcccgtccccgccgagaagagaaagcccatccgggtcctgagcctgttcgatggcatcgccaccggtctgctggtgctgaaggacctgggcatccaggtggataggtacattgcctccgaggtgtgcgaggactccatcaccgtgggaatggtgcgtcatcagggcaagatcatgtacgtgggcgacgtgcggagcgtgacacagaagcatatccaggagtggggccctttcgacctggtgatcggcggcagcccttgcaatgacctgagcatcgtgaacccagcccggaagggcctgtacgagggaaccggcagactgttcttcgagttttacagactgctgcacgacgcccggcctaaggaaggcgacgaccggcccttcttttggctgttcgagaatgtggtggccatgggagtcagcgacaagcgggatattagccggttcctggagagcaaccccgtgatgatcgatgccaaggaagtgagcgccgcccaccgggccagatacttctggggcaatctgcctggcatgaacagacccctggccagcaccgtgaacgacaagctggagctgcaggagtgcctggagcacggccggatcgccaagttcagcaaggtgagaaccatcaccacccgaagcaacagcatcaaacaaggcaaggaccagcactttcctgtgttcatgaacgagaaggaggacatcctgtggtgtaccgagatggagagagtgttcgggttcccagtccactacacagatgtcagcaacatgtctagactggccagacagagactgctgggaagaagctggtccgtccctgtgatcagacacctgttcgcccctctgaaggagtacttcgcctgcgtgagcagcggcaacagcaacgccaacagccggggccccagcttctctagcggcctggtgccactgtccctgagagggagccacatgggccccatggagatctacaaaaccgtgagcgcctggaagcggcagcctgtgcgcgtgctgagcctgtttcggaatatcgataaagtcctgaaaagcctgggattcctggagagcggctctggctccggcggtggcaccctgaagtacgtggaggatgtgacaaacgtggtcagacgggatgtggagaagtggggccccttcgatctggtgtacggcagcacccaacccctgggcagctcttgtgaccggtgccctggctggtacatgtttcagttccaccggatcctgcagtacgccctgccgagacaggagtcccagcggccattcttttggattttcatggacaacttgctgctgaccgaggatgaccaggaaactaccactcggttcctgcagaccgaagccgtgaccctgcaggacgtgagaggccgggactaccagaacgccatgcgggtgtggtccaacatccctggactgaaaagcaagcacgcacctctgacccctaaagaagaggagtacctgcaggcccaggtgcggagcagaagcaagctggacgcccctaaggtggatctgctggtgaagaattgcctcctgcccctgagagagtacttcaagtatttcagccagaatagtctgcccctgggaggcagcggcggcggcgccctggtgacatttgaggacgtcgccgtgcggttcacccaggaggaatgggctctgctggatccttctcagaaaatcctgtaccgggacgtgatgagagagacataccggaatctgacctccgtgggcatcaactgggaatgttgggaccttgaagcctgcttcagaagcctgggaagaaacctgagagtgcaggtggtgaagagaaagtgcgagctgaccaacagcggcccctgcgccgagggcggcccaagcagcggcgcccctcctcccagcggcggcagcccagccggctccccaacctctaccgaggagggcacctctgagtccgccacccccgagagcggccctggcacctccaccgagcccagcgagggcagcgcacccggcagccctgccggcagccccacctccacagaggagggaaccagcaccgagcccagcgaaggcagcgccccaggcaccagcaccgagcctagtgagcaggagattaaacggatcaacaagatcagaagaagacttgtgaaagacagcaacaccaagaaggccggcaagacaggccccatgaaaaccctgctggttagagtgatgacacccgatctgagagagcggctggaaaacctgagaaagaagcctgaaaatatcccccagcccatcagcaatacatctagagccaacctgaataagctgctgaccgattacaccgaaatgaagaaggcgatcctgcatgtgtactgggaagagttccagaaggaccctgtgggcctgatgagccgggtggcccagcctgccagcaagaagatcgatcagaacaagctgaaacctgagatggacgagaagggcaacctgaccaccgccggctttgcctgctctcagtgtggccagcccctgttcgtgtacaagctggagcaggtgtctgagaagggcaaggcttacaccaactacttcggacggtgcaatgtggccgagcacgaaaagctgatcctgctggcccagctgaagcccgagaaggatagcgacgaagccgtgacatatagcctgggaaagtttgggcagagggccctggatttctacagcattcatgtgaccaaggagtccacccaccccgtgaagcccctggcccagatcgccggaaacagatacgcctccggacctgtgggaaaggccctgagcgacgcatgtatgggcacaatcgcctccttcctgtctaagtaccaggacatcatcatcgaacaccagaaggtggtgaagggcaaccagaagagactggagagcctgcgggagctggccggcaaggaaaacctggaataccctagcgtgaccctgccacctcagcctcacaccaaggagggcgttgatgcctacaacgaagtgatcgcccgggtgcgaatgtgggtgaacctgaacctgtggcagaagctgaagctaagcagagatgatgccaagcctctgctgagactgaagggattcccttcctttcctctggtcgagagacaggccaacgaagtggactggtgggacatggtgtgtaacgtgaagaagctgatcaacgagaaaaaggaggatggcaaggtgttttggcagaatctggctggctacaagagacaggaagccctgagaccatacctgagcagcgaggaagatcggaagaagggaaagaaattcgctcggtaccagctgggcgacctgctgctgcacctggaaaagaagcacggcgaggactggggaaaggtgtacgacgaggcctgggagcggattgacaagaaagtggaaggcctgagcaagcacatcaagctggaagaggaacggagaagcgaggacgcccagagcaaggccgccctgaccgactggctgcgggctaaggccagcttcgtgatcgagggcctgaaggaggccgacaaggacgagttctgcagatgcgagctgaagctgcagaagtggtacggggacctgcggggaaagcccttcgccatcgaagccgagaacagcatcctggacatcagcggcttcagcaagcagtacaactgtgccttcatctggcagaaggacggcgtgaagaagctgaacctgtacctgatcatcaactacttcaagggcggcaagctgcggttcaagaagatcaaacctgaagccttcgaagccaacagattctacaccgtgatcaacaaaaagagcggcgagatcgtgcccatggaggtgaacttcaacttcgacgaccccaacctgatcatcctgcctctggcctttggcaagagacagggcagagaattcatctggaacgacctgctgtccctggaaaccggcagcctgaagctggccaacggaagagtgatcgagaagacactgtacaacagaagaacccggcaggatgagcctgccctgttcgtggccctgaccttcgagcggcgggaggtcctggactcctccaatatcaaaccaatgaacctgatcggcgtggcaagaggcgaaaacatccccgccgtgatcgccctgaccgaccccgagggctgcccactgagccggtttaaggatagcctgggaaacccaacccacatcctgagaatcggcgagagctataaggagaagcagcggaccatccaggccaagaaggaggtggagcagcggagagccggcggctacagccggaagtacgccagcaaagccaagaatctggcagacgatatggtgagaaacaccgctagagatctgctgtactacgccgtgacccaggatgccatgctgatcttcgccaacctgagccggggcttcggccggcagggcaagcggaccttcatggccgagagacagtacacacggatggaggactggctgaccgccaagctggcctacgagggcctgagcaagacctacctgtccaagacactggcccagtacacctccaagacatgcagcaactgtgggtttaccatcaccagcgccgactacgacagggtgctggagaagctgaagaagacagcaacaggctggatgaccacaattaacggcaaggagctgaaggtggagggccagattacctactacaacagatacaagagacagaacgtagtcaaggacctgtccgtcgagctggatagactgagcgaagaatctgtgaacaacgacatctcctcctggacaaagggcagaagcggagaagctctgagcctcctgaagaaaagattctcccatagacccgtgcaggagaagttcgtgtgcctgaactgcggcttcgagacacacgcagccgagcaagccgccctgaacatcgccagatcctggctgttcctgcggagccaggagtacaagaaataccagacaaacaagacaaccggcaacaccgataagagagccttcgtcgagacctggcagtccttttaccggaagaagcttaaggaggtgtggaaacctgccgtgcggtctggcggatctggcggaggctccagccagggcctggtgaccttcgaggacgtggccgtgtacttcagcctggaggagtgggagaggctggacgccgcccagagggacctgtacaaggaggtgatgcaggagaactacggcatcctggtgagcctgggctaccccatccccaagcccgacctgatcttcaggctggagcagggcgaggagccctgggtgcccgacagccccaggcccgaggagggcgacatcgtgaccggcgtgtacggcggcccaagcagcggcgcccctcctcccagcggcggcagcccagccggctccccaacctctaccgaggagggcacctctgagtccgccacccccgagagcggccctggcacctccaccgagcccagcgagggcagcgcacccggcagccctgccggcagccccacctccacagaggagggaaccagcaccgagcccagcgaaggcagcgccccaggcaccagcaccgagcctagtgagcaggagattaaacggatcaacaagatcagaagaagacttgtgaaagacagcaacaccaagaaggccggcaagacaggccccatgaaaaccctgctggttagagtgatgacacccgatctgagagagcggctggaaaacctgagaaagaagcctgaaaatatcccccagcccatcagcaatacatctagagccaacctgaataagctgctgaccgattacaccgaaatgaagaaggcgatcctgcatgtgtactgggaagagttccagaaggaccctgtgggcctgatgagccgggtggcccagcctgccagcaagaagatcgatcagaacaagctgaaacctgagatggacgagaagggcaacctgaccaccgccggctttgcctgctctcagtgtggccagcccctgttcgtgtacaagctggagcaggtgtctgagaagggcaaggcttacaccaactacttcggacggtgcaatgtggccgagcacgaaaagctgatcctgctggcccagctgaagcccgagaaggatagcgacgaagccgtgacatatagcctgggaaagtttgggcagagggccctggatttctacagcattcatgtgaccaaggagtccacccaccccgtgaagcccctggcccagatcgccggaaacagatacgcctccggacctgtgggaaaggccctgagcgacgcatgtatgggcacaatcgcctccttcctgtctaagtaccaggacatcatcatcgaacaccagaaggtggtgaagggcaaccagaagagactggagagcctgcgggagctggccggcaaggaaaacctggaataccctagcgtgaccctgccacctcagcctcacaccaaggagggcgttgatgcctacaacgaagtgatcgcccgggtgcgaatgtgggtgaacctgaacctgtggcagaagctgaagctaagcagagatgatgccaagcctctgctgagactgaagggattcccttcctttcctctggtcgagagacaggccaacgaagtggactggtgggacatggtgtgtaacgtgaagaagctgatcaacgagaaaaaggaggatggcaaggtgttttggcagaatctggctggctacaagagacaggaagccctgagaccatacctgagcagcgaggaagatcggaagaagggaaagaaattcgctcggtaccagctgggcgacctgctgctgcacctggaaaagaagcacggcgaggactggggaaaggtgtacgacgaggcctgggagcggattgacaagaaagtggaaggcctgagcaagcacatcaagctggaagaggaacggagaagcgaggacgcccagagcaaggccgccctgaccgactggctgcgggctaaggccagcttcgtgatcgagggcctgaaggaggccgacaaggacgagttctgcagatgcgagctgaagctgcagaagtggtacggggacctgcggggaaagcccttcgccatcgaagccgagaacagcatcctggacatcagcggcttcagcaagcagtacaactgtgccttcatctggcagaaggacggcgtgaagaagctgaacctgtacctgatcatcaactacttcaagggcggcaagctgcggttcaagaagatcaaacctgaagccttcgaagccaacagattctacaccgtgatcaacaaaaagagcggcgagatcgtgcccatggaggtgaacttcaacttcgacgaccccaacctgatcatcctgcctctggcctttggcaagagacagggcagagaattcatctggaacgacctgctgtccctggaaaccggcagcctgaagctggccaacggaagagtgatcgagaagacactgtacaacagaagaacccggcaggatgagcctgccctgttcgtggccctgaccttcgagcggcgggaggtcctggactcctccaatatcaaaccaatgaacctgatcggcgtggcaagaggcgaaaacatccccgccgtgatcgccctgaccgaccccgagggctgcccactgagccggtttaaggatagcctgggaaacccaacccacatcctgagaatcggcgagagctataaggagaagcagcggaccatccaggccaagaaggaggtggagcagcggagagccggcggctacagccggaagtacgccagcaaagccaagaatctggcagacgatatggtgagaaacaccgctagagatctgctgtactacgccgtgacccaggatgccatgctgatcttcgccaacctgagccggggcttcggccggcagggcaagcggaccttcatggccgagagacagtacacacggatggaggactggctgaccgccaagctggcctacgagggcctgagcaagacctacctgtccaagacactggcccagtacacctccaagacatgcagcaactgtgggtttaccatcaccagcgccgactacgacagggtgctggagaagctgaagaagacagcaacaggctggatgaccacaattaacggcaaggagctgaaggtggagggccagattacctactacaacagatacaagagacagaacgtagtcaaggacctgtccgtcgagctggatagactgagcgaagaatctgtgaacaacgacatctcctcctggacaaagggcagaagcggagaagctctgagcctcctgaagaaaagattctcccatagacccgtgcaggagaagttcgtgtgcctgaactgcggcttcgagacacacgcagccgagcaagccgccctgaacatcgccagatcctggctgttcctgcggagccaggagtacaagaaataccagacaaacaagacaaccggcaacaccgataagagagccttcgtcgagacctggcagtccttttaccggaagaagcttaaggaggtgtggaaacctgccgtgcggtctggcggatctggcggaggctcctagccagggcctggtgaccttcgaggacgtggccgtgtacttcagcctggaggagtgggagaggctggacgccgcccagagggacctgtacaaggaggtgatgcaggagaactacggcatcctggtgagcctgggctaccccatccccaagcccgacctgatcttcaggctggagcagggcgaggagccctgggtgcccgacagccccaggcccgaggagggcgacatcgtgaccggcgtgtacggatctggctccggcagcggccccaagaaaaagagaaaagtctaagctgccttctgcggggcttgccttctggccatgcccttcttctctcccttgcacctgtacctcttggtctttgaataaagcctgagtaggaaggctagcaaaaaaaaaaaaaaaaaaaaaaaaaaaaaaaaaaaaaaaaaaaaaaaaaaaaaaaaaaaaaaaaaaaaaaaaaaaaaaaa

SEQ ID NO: 16536 - RNA, 9485 nt, synthetic construct
  source 1..9485: mol_type = other RNA
aggaaataagagagaaaagaagagtaagaagaaatataagagccaccatggcccctaagaagaagcgtaaagtgagccggatggaacgcctcgtctacgaggtgcggcagaagtgcagaaacatcgaggacatctgcatctcctgcggatctctgaacgtgaccctggagcacccactgttcatcggcggcatgtgccagaactgtaaaaactgttttctggagtgtgcctatcaatacgacgatgacggctaccagagctactgcaccatctgttgcggcggaagagaggtgctgatgtgtggaaataacaactgctgccggtgcttctgcgtggaatgcgtggacctgctggtgggccccggcgccgcccaggccgctattaaggaagatccttggaactgctacatgtgcggccacaagggcacatacggcctgctgagacggagagaggactggcctagcagactgcagatgttcttcgccaataaccacgaccaggagttcgacccccctaaggtgtaccctcccgtccccgccgagaagagaaagcccatccgggtcctgagcctgttcgatggcatcgccaccggtctgctggtgctgaaggacctgggcatccaggtggataggtacattgcctccgaggtgtgcgaggactccatcaccgtgggaatggtgcgtcatcagggcaagatcatgtacgtgggcgacgtgcggagcgtgacacagaagcatatccaggagtggggccctttcgacctggtgatcggcggcagcccttgcaatgacctgagcatcgtgaacccagcccggaagggcctgtacgagggaaccggcagactgttcttcgagttttacagactgctgcacgacgcccggcctaaggaaggcgacgaccggcccttcttttggctgttcgagaatgtggtggccatgggagtcagcgacaagcgggatattagccggttcctggagagcaaccccgtgatgatcgatgccaaggaagtgagcgccgcccaccgggccagatacttctggggcaatctgcctggcatgaacagacccctggccagcaccgtgaacgacaagctggagctgcaggagtgcctggagcacggccggatcgccaagttcagcaaggtgagaaccatcaccacccgaagcaacagcatcaaacaaggcaaggaccagcactttcctgtgttcatgaacgagaaggaggacatcctgtggtgtaccgagatggagagagtgttcgggttcccagtccactacacagatgtcagcaacatgtctagactggccagacagagactgctgggaagaagctggtccgtccctgtgatcagacacctgttcgcccctctgaaggagtacttcgcctgcgtgagcagcggcaacagcaacgccaacagccggggccccagcttctctagcggcctggtgccactgtccctgagagggagccacatgggccccatggagatctacaaaaccgtgagcgcctggaagcggcagcctgtgcgcgtgctgagcctgtttcggaatatcgataaagtcctgaaaagcctgggattcctggagagcggctctggctccggcggtggcaccctgaagtacgtggaggatgtgacaaacgtggtcagacgggatgtggagaagtggggccccttcgatctggtgtacggcagcacccaacccctgggcagctcttgtgaccggtgccctggctggtacatgtttcagttccaccggatcctgcagtacgccctgccgagacaggagtcccagcggccattcttttggattttcatggacaacttgctgctgaccgaggatgaccaggaaactaccactcggttcctgcagaccgaagccgtgaccctgcaggacgtgagaggccgggactaccagaacgccatgcgggtgtggtccaacatccctggactgaaaagcaagcacgcacctctgacccctaaagaagaggagtacctgcaggcccaggtgcggagcagaagcaagctggacgcccctaaggtggatctgctggtgaagaattgcctcctgcccctgagagagtacttcaagtatttcagccagaatagtctgcccctgggaggcagcggcggcggcgccctggtgacatttgaggacgtcgccgtgcggttcacccaggaggaatgggctctgctggatccttctcagaaaatcctgtaccgggacgtgatgagagagacataccggaatctgacctccgtgggcatcaactgggaatgttgggaccttgaagcctgcttcagaagcctgggaagaaacctgagagtgcaggtggtgaagagaaagtgcgagctgaccaacagcggcccctgcgccgagggcggcccaagcagcggcgcccctcctcccagcggcggcagcccagccggctccccaacctctaccgaggagggcacctctgagtccgccacccccgagagcggccctggcacctccaccgagcccagcgagggcagcgcacccggcagccctgccggcagccccacctccacagaggagggaaccagcaccgagcccagcgaaggcagcgccccaggcaccagcaccgagcctagtgagcaggagattaaacggatcaacaagatcagaagaagacttgtgaaagacagcaacaccaagaaggccggcaagacaggccccatgaaaaccctgctggttagagtgatgacacccgatctgagagagcggctggaaaacctgagaaagaagcctgaaaatatcccccagcccatcagcaatacatctagagccaacctgaataagctgctgaccgattacaccgaaatgaagaaggcgatcctgcatgtgtactgggaagagttccagaaggaccctgtgggcctgatgagccgggtggcccagcctgccagcaagaagatcgatcagaacaagctgaaacctgagatggacgagaagggcaacctgaccaccgccggctttgcctgctctcagtgtggccagcccctgttcgtgtacaagctggagcaggtgtctgagaagggcaaggcttacaccaactacttcggacggtgcaatgtggccgagcacgaaaagctgatcctgctggcccagctgaagcccgagaaggatagcgacgaagccgtgacatatagcctgggaaagtttgggcagagggccctggatttctacagcattcatgtgaccaaggagtccacccaccccgtgaagcccctggcccagatcgccggaaacagatacgcctccggacctgtgggaaaggccctgagcgacgcatgtatgggcacaatcgcctccttcctgtctaagtaccaggacatcatcatcgaacaccagaaggtggtgaagggcaaccagaagagactggagagcctgcgggagctggccggcaaggaaaacctggaataccctagcgtgaccctgccacctcagcctcacaccaaggagggcgttgatgcctacaacgaagtgatcgcccgggtgcgaatgtgggtgaacctgaacctgtggcagaagctgaagctaagcagagatgatgccaagcctctgctgagactgaagggattcccttcctttcctctggtcgagagacaggccaacgaagtggactggtgggacatggtgtgtaacgtgaagaagctgatcaacgagaaaaaggaggatggcaaggtgttttggcagaatctggctggctacaagagacaggaagccctgagaccatacctgagcagcgaggaagatcggaagaagggaaagaaattcgctcggtaccagctgggcgacctgctgctgcacctggaaaagaagcacggcgaggactggggaaaggtgtacgacgaggcctgggagcggattgacaagaaagtggaaggcctgagcaagcacatcaagctggaagaggaacggagaagcgaggacgcccagagcaaggccgccctgaccgactggctgcgggctaaggccagcttcgtgatcgagggcctgaaggaggccgacaaggacgagttctgcagatgcgagctgaagctgcagaagtggtacggggacctgcggggaaagcccttcgccatcgaagccgagaacagcatcctggacatcagcggcttcagcaagcagtacaactgtgccttcatctggcagaaggacggcgtgaagaagctgaacctgtacctgatcatcaactacttcaagggcggcaagctgcggttcaagaagatcaaacctgaagccttcgaagccaacagattctacaccgtgatcaacaaaaagagcggcgagatcgtgcccatggaggtgaacttcaacttcgacgaccccaacctgatcatcctgcctctggcctttggcaagagacagggcagagaattcatctggaacgacctgctgtccctggaaaccggcagcctgaagctggccaacggaagagtgatcgagaagacactgtacaacagaagaacccggcaggatgagcctgccctgttcgtggccctgaccttcgagcggcgggaggtcctggactcctccaatatcaaaccaatgaacctgatcggcgtggcaagaggcgaaaacatccccgccgtgatcgccctgaccgaccccgagggctgcccactgagccggtttaaggatagcctgggaaacccaacccacatcctgagaatcggcgagagctataaggagaagcagcggaccatccaggccaagaaggaggtggagcagcggagagccggcggctacagccggaagtacgccagcaaagccaagaatctggcagacgatatggtgagaaacaccgctagagatctgctgtactacgccgtgacccaggatgccatgctgatcttcgccaacctgagccggggcttcggccggcagggcaagcggaccttcatggccgagagacagtacacacggatggaggactggctgaccgccaagctggcctacgagggcctgagcaagacctacctgtccaagacactggcccagtacacctccaagacatgcagcaactgtgggtttaccatcaccagcgccgactacgacagggtgctggagaagctgaagaagacagcaacaggctggatgaccacaattaacggcaaggagctgaaggtggagggccagattacctactacaacagatacaagagacagaacgtagtcaaggacctgtccgtcgagctggatagactgagcgaagaatctgtgaacaacgacatctcctcctggacaaagggcagaagcggagaagctctgagcctcctgaagaaaagattctcccatagacccgtgcaggagaagttcgtgtgcctgaactgcggcttcgagacacacgcagccgagcaagccgccctgaacatcgccagatcctggctgttcctgcggagccaggagtacaagaaataccagacaaacaagacaaccggcaacaccgataagagagccttcgtcgagacctggcagtccttttaccggaagaagcttaaggaggtgtggaaacctgccgtgcggtctggcggatctggcggaggctccagccaggagagcgtgagcttcgaggacgtggccgtgtacttcaccaggaaccagtgggccagcctggacagcgcccagaggaccctgtacagggaggtgatgctggagaactacgccaacgtgaccagcctggccgccttccccttccccaagcccgacctgatcttccagctggagaggggcaaggcccccggcggcctggacccctggacccccatcaggagggaggtgaggggcgtgtgcggcggcccaagcagcggcgcccctcctcccagcggcggcagcccagccggctccccaacctctaccgaggagggcacctctgagtccgccacccccgagagcggccctggcacctccaccgagcccagcgagggcagcgcacccggcagccctgccggcagccccacctccacagaggagggaaccagcaccgagcccagcgaaggcagcgccccaggcaccagcaccgagcctagtgagcaggagattaaacggatcaacaagatcagaagaagacttgtgaaagacagcaacaccaagaaggccggcaagacaggccccatgaaaaccctgctggttagagtgatgacacccgatctgagagagcggctggaaaacctgagaaagaagcctgaaaatatcccccagcccatcagcaatacatctagagccaacctgaataagctgctgaccgattacaccgaaatgaagaaggcgatcctgcatgtgtactgggaagagttccagaaggaccctgtgggcctgatgagccgggtggcccagcctgccagcaagaagatcgatcagaacaagctgaaacctgagatggacgagaagggcaacctgaccaccgccggctttgcctgctctcagtgtggccagcccctgttcgtgtacaagctggagcaggtgtctgagaagggcaaggcttacaccaactacttcggacggtgcaatgtggccgagcacgaaaagctgatcctgctggcccagctgaagcccgagaaggatagcgacgaagccgtgacatatagcctgggaaagtttgggcagagggccctggatttctacagcattcatgtgaccaaggagtccacccaccccgtgaagcccctggcccagatcgccggaaacagatacgcctccggacctgtgggaaaggccctgagcgacgcatgtatgggcacaatcgcctccttcctgtctaagtaccaggacatcatcatcgaacaccagaaggtggtgaagggcaaccagaagagactggagagcctgcgggagctggccggcaaggaaaacctggaataccctagcgtgaccctgccacctcagcctcacaccaaggagggcgttgatgcctacaacgaagtgatcgcccgggtgcgaatgtgggtgaacctgaacctgtggcagaagctgaagctaagcagagatgatgccaagcctctgctgagactgaagggattcccttcctttcctctggtcgagagacaggccaacgaagtggactggtgggacatggtgtgtaacgtgaagaagctgatcaacgagaaaaaggaggatggcaaggtgttttggcagaatctggctggctacaagagacaggaagccctgagaccatacctgagcagcgaggaagatcggaagaagggaaagaaattcgctcggtaccagctgggcgacctgctgctgcacctggaaaagaagcacggcgaggactggggaaaggtgtacgacgaggcctgggagcggattgacaagaaagtggaaggcctgagcaagcacatcaagctggaagaggaacggagaagcgaggacgcccagagcaaggccgccctgaccgactggctgcgggctaaggccagcttcgtgatcgagggcctgaaggaggccgacaaggacgagttctgcagatgcgagctgaagctgcagaagtggtacggggacctgcggggaaagcccttcgccatcgaagccgagaacagcatcctggacatcagcggcttcagcaagcagtacaactgtgccttcatctggcagaaggacggcgtgaagaagctgaacctgtacctgatcatcaactacttcaagggcggcaagctgcggttcaagaagatcaaacctgaagccttcgaagccaacagattctacaccgtgatcaacaaaaagagcggcgagatcgtgcccatggaggtgaacttcaacttcgacgaccccaacctgatcatcctgcctctggcctttggcaagagacagggcagagaattcatctggaacgacctgctgtccctggaaaccggcagcctgaagctggccaacggaagagtgatcgagaagacactgtacaacagaagaacccggcaggatgagcctgccctgttcgtggccctgaccttcgagcggcgggaggtcctggactcctccaatatcaaaccaatgaacctgatcggcgtggcaagaggcgaaaacatccccgccgtgatcgccctgaccgaccccgagggctgcccactgagccggtttaaggatagcctgggaaacccaacccacatcctgagaatcggcgagagctataaggagaagcagcggaccatccaggccaagaaggaggtggagcagcggagagccggcggctacagccggaagtacgccagcaaagccaagaatctggcagacgatatggtgagaaacaccgctagagatctgctgtactacgccgtgacccaggatgccatgctgatcttcgccaacctgagccggggcttcggccggcagggcaagcggaccttcatggccgagagacagtacacacggatggaggactggctgaccgccaagctggcctacgagggcctgagcaagacctacctgtccaagacactggcccagtacacctccaagacatgcagcaactgtgggtttaccatcaccagcgccgactacgacagggtgctggagaagctgaagaagacagcaacaggctggatgaccacaattaacggcaaggagctgaaggtggagggccagattacctactacaacagatacaagagacagaacgtagtcaaggacctgtccgtcgagctggatagactgagcgaagaatctgtgaacaacgacatctcctcctggacaaagggcagaagcggagaagctctgagcctcctgaagaaaagattctcccatagacccgtgcaggagaagttcgtgtgcctgaactgcggcttcgagacacacgcagccgagcaagccgccctgaacatcgccagatcctggctgttcctgcggagccaggagtacaagaaataccagacaaacaagacaaccggcaacaccgataagagagccttcgtcgagacctggcagtccttttaccggaagaagcttaaggaggtgtggaaacctgccgtgcggtctggcggatctggcggaggctcctagccaggagagcgtgagcttcgaggacgtggccgtgtacttcaccaggaaccagtgggccagcctggacagcgcccagaggaccctgtacagggaggtgatgctggagaactacgccaacgtgaccagcctggccgccttccccttccccaagcccgacctgatcttccagctggagaggggcaaggcccccggcggcctggacccctggacccccatcaggagggaggtgaggggcgtgtgcggatctggctccggcagcggccccaagaaaaagagaaaagtctaagctgccttctgcggggcttgccttctggccatgcccttcttctctcccttgcacctgtacctcttggtctttgaataaagcctgagtaggaaggctagcaaaaaaaaaaaaaaaaaaaaaaaaaaaaaaaaaaaaaaaaaaaaaaaaaaaaaaaaaaaaaaaaaaaaaaaaaaaaaaaa

SEQ ID NO: 16537 - RNA, 9485 nt, synthetic construct
  source 1..9485: mol_type = other RNA
aggaaataagagagaaaagaagagtaagaagaaatataagagccaccatggcccctaagaagaagcgtaaagtgagccggatggaacgcctcgtctacgaggtgcggcagaagtgcagaaacatcgaggacatctgcatctcctgcggatctctgaacgtgaccctggagcacccactgttcatcggcggcatgtgccagaactgtaaaaactgttttctggagtgtgcctatcaatacgacgatgacggctaccagagctactgcaccatctgttgcggcggaagagaggtgctgatgtgtggaaataacaactgctgccggtgcttctgcgtggaatgcgtggacctgctggtgggccccggcgccgcccaggccgctattaaggaagatccttggaactgctacatgtgcggccacaagggcacatacggcctgctgagacggagagaggactggcctagcagactgcagatgttcttcgccaataaccacgaccaggagttcgacccccctaaggtgtaccctcccgtccccgccgagaagagaaagcccatccgggtcctgagcctgttcgatggcatcgccaccggtctgctggtgctgaaggacctgggcatccaggtggataggtacattgcctccgaggtgtgcgaggactccatcaccgtgggaatggtgcgtcatcagggcaagatcatgtacgtgggcgacgtgcggagcgtgacacagaagcatatccaggagtggggccctttcgacctggtgatcggcggcagcccttgcaatgacctgagcatcgtgaacccagcccggaagggcctgtacgagggaaccggcagactgttcttcgagttttacagactgctgcacgacgcccggcctaaggaaggcgacgaccggcccttcttttggctgttcgagaatgtggtggccatgggagtcagcgacaagcgggatattagccggttcctggagagcaaccccgtgatgatcgatgccaaggaagtgagcgccgcccaccgggccagatacttctggggcaatctgcctggcatgaacagacccctggccagcaccgtgaacgacaagctggagctgcaggagtgcctggagcacggccggatcgccaagttcagcaaggtgagaaccatcaccacccgaagcaacagcatcaaacaaggcaaggaccagcactttcctgtgttcatgaacgagaaggaggacatcctgtggtgtaccgagatggagagagtgttcgggttcccagtccactacacagatgtcagcaacatgtctagactggccagacagagactgctgggaagaagctggtccgtccctgtgatcagacacctgttcgcccctctgaaggagtacttcgcctgcgtgagcagcggcaacagcaacgccaacagccggggccccagcttctctagcggcctggtgccactgtccctgagagggagccacatgggccccatggagatctacaaaaccgtgagcgcctggaagcggcagcctgtgcgcgtgctgagcctgtttcggaatatcgataaagtcctgaaaagcctgggattcctggagagcggctctggctccggcggtggcaccctgaagtacgtggaggatgtgacaaacgtggtcagacgggatgtggagaagtggggccccttcgatctggtgtacggcagcacccaacccctgggcagctcttgtgaccggtgccctggctggtacatgtttcagttccaccggatcctgcagtacgccctgccgagacaggagtcccagcggccattcttttggattttcatggacaacttgctgctgaccgaggatgaccaggaaactaccactcggttcctgcagaccgaagccgtgaccctgcaggacgtgagaggccgggactaccagaacgccatgcgggtgtggtccaacatccctggactgaaaagcaagcacgcacctctgacccctaaagaagaggagtacctgcaggcccaggtgcggagcagaagcaagctggacgcccctaaggtggatctgctggtgaagaattgcctcctgcccctgagagagtacttcaagtatttcagccagaatagtctgcccctgggaggcagcggcggcggcgccctggtgacatttgaggacgtcgccgtgcggttcacccaggaggaatgggctctgctggatccttctcagaaaatcctgtaccgggacgtgatgagagagacataccggaatctgacctccgtgggcatcaactgggaatgttgggaccttgaagcctgcttcagaagcctgggaagaaacctgagagtgcaggtggtgaagagaaagtgcgagctgaccaacagcggcccctgcgccgagggcggcccaagcagcggcgcccctcctcccagcggcggcagcccagccggctccccaacctctaccgaggagggcacctctgagtccgccacccccgagagcggccctggcacctccaccgagcccagcgagggcagcgcacccggcagccctgccggcagccccacctccacagaggagggaaccagcaccgagcccagcgaaggcagcgccccaggcaccagcaccgagcctagtgagcaggagattaaacggatcaacaagatcagaagaagacttgtgaaagacagcaacaccaagaaggccggcaagacaggccccatgaaaaccctgctggttagagtgatgacacccgatctgagagagcggctggaaaacctgagaaagaagcctgaaaatatcccccagcccatcagcaatacatctagagccaacctgaataagctgctgaccgattacaccgaaatgaagaaggcgatcctgcatgtgtactgggaagagttccagaaggaccctgtgggcctgatgagccgggtggcccagcctgccagcaagaagatcgatcagaacaagctgaaacctgagatggacgagaagggcaacctgaccaccgccggctttgcctgctctcagtgtggccagcccctgttcgtgtacaagctggagcaggtgtctgagaagggcaaggcttacaccaactacttcggacggtgcaatgtggccgagcacgaaaagctgatcctgctggcccagctgaagcccgagaaggatagcgacgaagccgtgacatatagcctgggaaagtttgggcagagggccctggatttctacagcattcatgtgaccaaggagtccacccaccccgtgaagcccctggcccagatcgccggaaacagatacgcctccggacctgtgggaaaggccctgagcgacgcatgtatgggcacaatcgcctccttcctgtctaagtaccaggacatcatcatcgaacaccagaaggtggtgaagggcaaccagaagagactggagagcctgcgggagctggccggcaaggaaaacctggaataccctagcgtgaccctgccacctcagcctcacaccaaggagggcgttgatgcctacaacgaagtgatcgcccgggtgcgaatgtgggtgaacctgaacctgtggcagaagctgaagctaagcagagatgatgccaagcctctgctgagactgaagggattcccttcctttcctctggtcgagagacaggccaacgaagtggactggtgggacatggtgtgtaacgtgaagaagctgatcaacgagaaaaaggaggatggcaaggtgttttggcagaatctggctggctacaagagacaggaagccctgagaccatacctgagcagcgaggaagatcggaagaagggaaagaaattcgctcggtaccagctgggcgacctgctgctgcacctggaaaagaagcacggcgaggactggggaaaggtgtacgacgaggcctgggagcggattgacaagaaagtggaaggcctgagcaagcacatcaagctggaagaggaacggagaagcgaggacgcccagagcaaggccgccctgaccgactggctgcgggctaaggccagcttcgtgatcgagggcctgaaggaggccgacaaggacgagttctgcagatgcgagctgaagctgcagaagtggtacggggacctgcggggaaagcccttcgccatcgaagccgagaacagcatcctggacatcagcggcttcagcaagcagtacaactgtgccttcatctggcagaaggacggcgtgaagaagctgaacctgtacctgatcatcaactacttcaagggcggcaagctgcggttcaagaagatcaaacctgaagccttcgaagccaacagattctacaccgtgatcaacaaaaagagcggcgagatcgtgcccatggaggtgaacttcaacttcgacgaccccaacctgatcatcctgcctctggcctttggcaagagacagggcagagaattcatctggaacgacctgctgtccctggaaaccggcagcctgaagctggccaacggaagagtgatcgagaagacactgtacaacagaagaacccggcaggatgagcctgccctgttcgtggccctgaccttcgagcggcgggaggtcctggactcctccaatatcaaaccaatgaacctgatcggcgtggcaagaggcgaaaacatccccgccgtgatcgccctgaccgaccccgagggctgcccactgagccggtttaaggatagcctgggaaacccaacccacatcctgagaatcggcgagagctataaggagaagcagcggaccatccaggccaagaaggaggtggagcagcggagagccggcggctacagccggaagtacgccagcaaagccaagaatctggcagacgatatggtgagaaacaccgctagagatctgctgtactacgccgtgacccaggatgccatgctgatcttcgccaacctgagccggggcttcggccggcagggcaagcggaccttcatggccgagagacagtacacacggatggaggactggctgaccgccaagctggcctacgagggcctgagcaagacctacctgtccaagacactggcccagtacacctccaagacatgcagcaactgtgggtttaccatcaccagcgccgactacgacagggtgctggagaagctgaagaagacagcaacaggctggatgaccacaattaacggcaaggagctgaaggtggagggccagattacctactacaacagatacaagagacagaacgtagtcaaggacctgtccgtcgagctggatagactgagcgaagaatctgtgaacaacgacatctcctcctggacaaagggcagaagcggagaagctctgagcctcctgaagaaaagattctcccatagacccgtgcaggagaagttcgtgtgcctgaactgcggcttcgagacacacgcagccgagcaagccgccctgaacatcgccagatcctggctgttcctgcggagccaggagtacaagaaataccagacaaacaagacaaccggcaacaccgataagagagccttcgtcgagacctggcagtccttttaccggaagaagcttaaggaggtgtggaaacctgccgtgcggtctggcggatctggcggaggctccggcatgagggtgaccttcgaggacatcgccgtgagcttcagccaggaggagtgggagtacctgggcgagggccagaaggagctgtacagggaggtgatgaaggagaactacgagaccctgatcagcctgggcaccgacagcagcgccctgacccccgagatcatcagcaggatcgagaggggcgaggagccctgcatcagggacaagcccggcagcgaggagagggagaccggcaagagcagcggcggcccaagcagcggcgcccctcctcccagcggcggcagcccagccggctccccaacctctaccgaggagggcacctctgagtccgccacccccgagagcggccctggcacctccaccgagcccagcgagggcagcgcacccggcagccctgccggcagccccacctccacagaggagggaaccagcaccgagcccagcgaaggcagcgccccaggcaccagcaccgagcctagtgagcaggagattaaacggatcaacaagatcagaagaagacttgtgaaagacagcaacaccaagaaggccggcaagacaggccccatgaaaaccctgctggttagagtgatgacacccgatctgagagagcggctggaaaacctgagaaagaagcctgaaaatatcccccagcccatcagcaatacatctagagccaacctgaataagctgctgaccgattacaccgaaatgaagaaggcgatcctgcatgtgtactgggaagagttccagaaggaccctgtgggcctgatgagccgggtggcccagcctgccagcaagaagatcgatcagaacaagctgaaacctgagatggacgagaagggcaacctgaccaccgccggctttgcctgctctcagtgtggccagcccctgttcgtgtacaagctggagcaggtgtctgagaagggcaaggcttacaccaactacttcggacggtgcaatgtggccgagcacgaaaagctgatcctgctggcccagctgaagcccgagaaggatagcgacgaagccgtgacatatagcctgggaaagtttgggcagagggccctggatttctacagcattcatgtgaccaaggagtccacccaccccgtgaagcccctggcccagatcgccggaaacagatacgcctccggacctgtgggaaaggccctgagcgacgcatgtatgggcacaatcgcctccttcctgtctaagtaccaggacatcatcatcgaacaccagaaggtggtgaagggcaaccagaagagactggagagcctgcgggagctggccggcaaggaaaacctggaataccctagcgtgaccctgccacctcagcctcacaccaaggagggcgttgatgcctacaacgaagtgatcgcccgggtgcgaatgtgggtgaacctgaacctgtggcagaagctgaagctaagcagagatgatgccaagcctctgctgagactgaagggattcccttcctttcctctggtcgagagacaggccaacgaagtggactggtgggacatggtgtgtaacgtgaagaagctgatcaacgagaaaaaggaggatggcaaggtgttttggcagaatctggctggctacaagagacaggaagccctgagaccatacctgagcagcgaggaagatcggaagaagggaaagaaattcgctcggtaccagctgggcgacctgctgctgcacctggaaaagaagcacggcgaggactggggaaaggtgtacgacgaggcctgggagcggattgacaagaaagtggaaggcctgagcaagcacatcaagctggaagaggaacggagaagcgaggacgcccagagcaaggccgccctgaccgactggctgcgggctaaggccagcttcgtgatcgagggcctgaaggaggccgacaaggacgagttctgcagatgcgagctgaagctgcagaagtggtacggggacctgcggggaaagcccttcgccatcgaagccgagaacagcatcctggacatcagcggcttcagcaagcagtacaactgtgccttcatctggcagaaggacggcgtgaagaagctgaacctgtacctgatcatcaactacttcaagggcggcaagctgcggttcaagaagatcaaacctgaagccttcgaagccaacagattctacaccgtgatcaacaaaaagagcggcgagatcgtgcccatggaggtgaacttcaacttcgacgaccccaacctgatcatcctgcctctggcctttggcaagagacagggcagagaattcatctggaacgacctgctgtccctggaaaccggcagcctgaagctggccaacggaagagtgatcgagaagacactgtacaacagaagaacccggcaggatgagcctgccctgttcgtggccctgaccttcgagcggcgggaggtcctggactcctccaatatcaaaccaatgaacctgatcggcgtggcaagaggcgaaaacatccccgccgtgatcgccctgaccgaccccgagggctgcccactgagccggtttaaggatagcctgggaaacccaacccacatcctgagaatcggcgagagctataaggagaagcagcggaccatccaggccaagaaggaggtggagcagcggagagccggcggctacagccggaagtacgccagcaaagccaagaatctggcagacgatatggtgagaaacaccgctagagatctgctgtactacgccgtgacccaggatgccatgctgatcttcgccaacctgagccggggcttcggccggcagggcaagcggaccttcatggccgagagacagtacacacggatggaggactggctgaccgccaagctggcctacgagggcctgagcaagacctacctgtccaagacactggcccagtacacctccaagacatgcagcaactgtgggtttaccatcaccagcgccgactacgacagggtgctggagaagctgaagaagacagcaacaggctggatgaccacaattaacggcaaggagctgaaggtggagggccagattacctactacaacagatacaagagacagaacgtagtcaaggacctgtccgtcgagctggatagactgagcgaagaatctgtgaacaacgacatctcctcctggacaaagggcagaagcggagaagctctgagcctcctgaagaaaagattctcccatagacccgtgcaggagaagttcgtgtgcctgaactgcggcttcgagacacacgcagccgagcaagccgccctgaacatcgccagatcctggctgttcctgcggagccaggagtacaagaaataccagacaaacaagacaaccggcaacaccgataagagagccttcgtcgagacctggcagtccttttaccggaagaagcttaaggaggtgtggaaacctgccgtgcggtctggcggatctggcggaggctcctggcatgagggtgaccttcgaggacatcgccgtgagcttcagccaggaggagtgggagtacctgggcgagggccagaaggagctgtacagggaggtgatgaaggagaactacgagaccctgatcagcctgggcaccgacagcagcgccctgacccccgagatcatcagcaggatcgagaggggcgaggagccctgcatcagggacaagcccggcagcgaggagagggagaccggcaagagcagcggatctggctccggcagcggccccaagaaaaagagaaaagtctaagctgccttctgcggggcttgccttctggccatgcccttcttctctcccttgcacctgtacctcttggtctttgaataaagcctgagtaggaaggctagcaaaaaaaaaaaaaaaaaaaaaaaaaaaaaaaaaaaaaaaaaaaaaaaaaaaaaaaaaaaaaaaaaaaaaaaaaaaaaaaa

SEQ ID NO: 16538 - RNA, 9485 nt, synthetic construct
  source 1..9485: mol_type = other RNA
aggaaataagagagaaaagaagagtaagaagaaatataagagccaccatggcccctaagaagaagcgtaaagtgagccggatggaacgcctcgtctacgaggtgcggcagaagtgcagaaacatcgaggacatctgcatctcctgcggatctctgaacgtgaccctggagcacccactgttcatcggcggcatgtgccagaactgtaaaaactgttttctggagtgtgcctatcaatacgacgatgacggctaccagagctactgcaccatctgttgcggcggaagagaggtgctgatgtgtggaaataacaactgctgccggtgcttctgcgtggaatgcgtggacctgctggtgggccccggcgccgcccaggccgctattaaggaagatccttggaactgctacatgtgcggccacaagggcacatacggcctgctgagacggagagaggactggcctagcagactgcagatgttcttcgccaataaccacgaccaggagttcgacccccctaaggtgtaccctcccgtccccgccgagaagagaaagcccatccgggtcctgagcctgttcgatggcatcgccaccggtctgctggtgctgaaggacctgggcatccaggtggataggtacattgcctccgaggtgtgcgaggactccatcaccgtgggaatggtgcgtcatcagggcaagatcatgtacgtgggcgacgtgcggagcgtgacacagaagcatatccaggagtggggccctttcgacctggtgatcggcggcagcccttgcaatgacctgagcatcgtgaacccagcccggaagggcctgtacgagggaaccggcagactgttcttcgagttttacagactgctgcacgacgcccggcctaaggaaggcgacgaccggcccttcttttggctgttcgagaatgtggtggccatgggagtcagcgacaagcgggatattagccggttcctggagagcaaccccgtgatgatcgatgccaaggaagtgagcgccgcccaccgggccagatacttctggggcaatctgcctggcatgaacagacccctggccagcaccgtgaacgacaagctggagctgcaggagtgcctggagcacggccggatcgccaagttcagcaaggtgagaaccatcaccacccgaagcaacagcatcaaacaaggcaaggaccagcactttcctgtgttcatgaacgagaaggaggacatcctgtggtgtaccgagatggagagagtgttcgggttcccagtccactacacagatgtcagcaacatgtctagactggccagacagagactgctgggaagaagctggtccgtccctgtgatcagacacctgttcgcccctctgaaggagtacttcgcctgcgtgagcagcggcaacagcaacgccaacagccggggccccagcttctctagcggcctggtgccactgtccctgagagggagccacatgggccccatggagatctacaaaaccgtgagcgcctggaagcggcagcctgtgcgcgtgctgagcctgtttcggaatatcgataaagtcctgaaaagcctgggattcctggagagcggctctggctccggcggtggcaccctgaagtacgtggaggatgtgacaaacgtggtcagacgggatgtggagaagtggggccccttcgatctggtgtacggcagcacccaacccctgggcagctcttgtgaccggtgccctggctggtacatgtttcagttccaccggatcctgcagtacgccctgccgagacaggagtcccagcggccattcttttggattttcatggacaacttgctgctgaccgaggatgaccaggaaactaccactcggttcctgcagaccgaagccgtgaccctgcaggacgtgagaggccgggactaccagaacgccatgcgggtgtggtccaacatccctggactgaaaagcaagcacgcacctctgacccctaaagaagaggagtacctgcaggcccaggtgcggagcagaagcaagctggacgcccctaaggtggatctgctggtgaagaattgcctcctgcccctgagagagtacttcaagtatttcagccagaatagtctgcccctgggaggcagcggcggcggcgccctggtgacatttgaggacgtcgccgtgcggttcacccaggaggaatgggctctgctggatccttctcagaaaatcctgtaccgggacgtgatgagagagacataccggaatctgacctccgtgggcatcaactgggaatgttgggaccttgaagcctgcttcagaagcctgggaagaaacctgagagtgcaggtggtgaagagaaagtgcgagctgaccaacagcggcccctgcgccgagggcggcccaagcagcggcgcccctcctcccagcggcggcagcccagccggctccccaacctctaccgaggagggcacctctgagtccgccacccccgagagcggccctggcacctccaccgagcccagcgagggcagcgcacccggcagccctgccggcagccccacctccacagaggagggaaccagcaccgagcccagcgaaggcagcgccccaggcaccagcaccgagcctagtgagcaggagattaaacggatcaacaagatcagaagaagacttgtgaaagacagcaacaccaagaaggccggcaagacaggccccatgaaaaccctgctggttagagtgatgacacccgatctgagagagcggctggaaaacctgagaaagaagcctgaaaatatcccccagcccatcagcaatacatctagagccaacctgaataagctgctgaccgattacaccgaaatgaagaaggcgatcctgcatgtgtactgggaagagttccagaaggaccctgtgggcctgatgagccgggtggcccagcctgccagcaagaagatcgatcagaacaagctgaaacctgagatggacgagaagggcaacctgaccaccgccggctttgcctgctctcagtgtggccagcccctgttcgtgtacaagctggagcaggtgtctgagaagggcaaggcttacaccaactacttcggacggtgcaatgtggccgagcacgaaaagctgatcctgctggcccagctgaagcccgagaaggatagcgacgaagccgtgacatatagcctgggaaagtttgggcagagggccctggatttctacagcattcatgtgaccaaggagtccacccaccccgtgaagcccctggcccagatcgccggaaacagatacgcctccggacctgtgggaaaggccctgagcgacgcatgtatgggcacaatcgcctccttcctgtctaagtaccaggacatcatcatcgaacaccagaaggtggtgaagggcaaccagaagagactggagagcctgcgggagctggccggcaaggaaaacctggaataccctagcgtgaccctgccacctcagcctcacaccaaggagggcgttgatgcctacaacgaagtgatcgcccgggtgcgaatgtgggtgaacctgaacctgtggcagaagctgaagctaagcagagatgatgccaagcctctgctgagactgaagggattcccttcctttcctctggtcgagagacaggccaacgaagtggactggtgggacatggtgtgtaacgtgaagaagctgatcaacgagaaaaaggaggatggcaaggtgttttggcagaatctggctggctacaagagacaggaagccctgagaccatacctgagcagcgaggaagatcggaagaagggaaagaaattcgctcggtaccagctgggcgacctgctgctgcacctggaaaagaagcacggcgaggactggggaaaggtgtacgacgaggcctgggagcggattgacaagaaagtggaaggcctgagcaagcacatcaagctggaagaggaacggagaagcgaggacgcccagagcaaggccgccctgaccgactggctgcgggctaaggccagcttcgtgatcgagggcctgaaggaggccgacaaggacgagttctgcagatgcgagctgaagctgcagaagtggtacggggacctgcggggaaagcccttcgccatcgaagccgagaacagcatcctggacatcagcggcttcagcaagcagtacaactgtgccttcatctggcagaaggacggcgtgaagaagctgaacctgtacctgatcatcaactacttcaagggcggcaagctgcggttcaagaagatcaaacctgaagccttcgaagccaacagattctacaccgtgatcaacaaaaagagcggcgagatcgtgcccatggaggtgaacttcaacttcgacgaccccaacctgatcatcctgcctctggcctttggcaagagacagggcagagaattcatctggaacgacctgctgtccctggaaaccggcagcctgaagctggccaacggaagagtgatcgagaagacactgtacaacagaagaacccggcaggatgagcctgccctgttcgtggccctgaccttcgagcggcgggaggtcctggactcctccaatatcaaaccaatgaacctgatcggcgtggcaagaggcgaaaacatccccgccgtgatcgccctgaccgaccccgagggctgcccactgagccggtttaaggatagcctgggaaacccaacccacatcctgagaatcggcgagagctataaggagaagcagcggaccatccaggccaagaaggaggtggagcagcggagagccggcggctacagccggaagtacgccagcaaagccaagaatctggcagacgatatggtgagaaacaccgctagagatctgctgtactacgccgtgacccaggatgccatgctgatcttcgccaacctgagccggggcttcggccggcagggcaagcggaccttcatggccgagagacagtacacacggatggaggactggctgaccgccaagctggcctacgagggcctgagcaagacctacctgtccaagacactggcccagtacacctccaagacatgcagcaactgtgggtttaccatcaccagcgccgactacgacagggtgctggagaagctgaagaagacagcaacaggctggatgaccacaattaacggcaaggagctgaaggtggagggccagattacctactacaacagatacaagagacagaacgtagtcaaggacctgtccgtcgagctggatagactgagcgaagaatctgtgaacaacgacatctcctcctggacaaagggcagaagcggagaagctctgagcctcctgaagaaaagattctcccatagacccgtgcaggagaagttcgtgtgcctgaactgcggcttcgagacacacgcagccgagcaagccgccctgaacatcgccagatcctggctgttcctgcggagccaggagtacaagaaataccagacaaacaagacaaccggcaacaccgataagagagccttcgtcgagacctggcagtccttttaccggaagaagcttaaggaggtgtggaaacctgccgtgcggtctggcggatctggcggaggctccagccccgtgctggtgagcttcgacgacgtgttcgtgagcttcaccagggaggagtggcaggtgctggacaacgcccagagggccctgtacggcgacgtgatgctggagacctacaggagcctggtgctgctgggccagtgcatcaccaagcccgaggtgatcttcaagctggagcagggcgtggagccctggaccggcggcgagccccacaaccagagcccccccgacgtgcaggaggtggacggcggcccaagcagcggcgcccctcctcccagcggcggcagcccagccggctccccaacctctaccgaggagggcacctctgagtccgccacccccgagagcggccctggcacctccaccgagcccagcgagggcagcgcacccggcagccctgccggcagccccacctccacagaggagggaaccagcaccgagcccagcgaaggcagcgccccaggcaccagcaccgagcctagtgagcaggagattaaacggatcaacaagatcagaagaagacttgtgaaagacagcaacaccaagaaggccggcaagacaggccccatgaaaaccctgctggttagagtgatgacacccgatctgagagagcggctggaaaacctgagaaagaagcctgaaaatatcccccagcccatcagcaatacatctagagccaacctgaataagctgctgaccgattacaccgaaatgaagaaggcgatcctgcatgtgtactgggaagagttccagaaggaccctgtgggcctgatgagccgggtggcccagcctgccagcaagaagatcgatcagaacaagctgaaacctgagatggacgagaagggcaacctgaccaccgccggctttgcctgctctcagtgtggccagcccctgttcgtgtacaagctggagcaggtgtctgagaagggcaaggcttacaccaactacttcggacggtgcaatgtggccgagcacgaaaagctgatcctgctggcccagctgaagcccgagaaggatagcgacgaagccgtgacatatagcctgggaaagtttgggcagagggccctggatttctacagcattcatgtgaccaaggagtccacccaccccgtgaagcccctggcccagatcgccggaaacagatacgcctccggacctgtgggaaaggccctgagcgacgcatgtatgggcacaatcgcctccttcctgtctaagtaccaggacatcatcatcgaacaccagaaggtggtgaagggcaaccagaagagactggagagcctgcgggagctggccggcaaggaaaacctggaataccctagcgtgaccctgccacctcagcctcacaccaaggagggcgttgatgcctacaacgaagtgatcgcccgggtgcgaatgtgggtgaacctgaacctgtggcagaagctgaagctaagcagagatgatgccaagcctctgctgagactgaagggattcccttcctttcctctggtcgagagacaggccaacgaagtggactggtgggacatggtgtgtaacgtgaagaagctgatcaacgagaaaaaggaggatggcaaggtgttttggcagaatctggctggctacaagagacaggaagccctgagaccatacctgagcagcgaggaagatcggaagaagggaaagaaattcgctcggtaccagctgggcgacctgctgctgcacctggaaaagaagcacggcgaggactggggaaaggtgtacgacgaggcctgggagcggattgacaagaaagtggaaggcctgagcaagcacatcaagctggaagaggaacggagaagcgaggacgcccagagcaaggccgccctgaccgactggctgcgggctaaggccagcttcgtgatcgagggcctgaaggaggccgacaaggacgagttctgcagatgcgagctgaagctgcagaagtggtacggggacctgcggggaaagcccttcgccatcgaagccgagaacagcatcctggacatcagcggcttcagcaagcagtacaactgtgccttcatctggcagaaggacggcgtgaagaagctgaacctgtacctgatcatcaactacttcaagggcggcaagctgcggttcaagaagatcaaacctgaagccttcgaagccaacagattctacaccgtgatcaacaaaaagagcggcgagatcgtgcccatggaggtgaacttcaacttcgacgaccccaacctgatcatcctgcctctggcctttggcaagagacagggcagagaattcatctggaacgacctgctgtccctggaaaccggcagcctgaagctggccaacggaagagtgatcgagaagacactgtacaacagaagaacccggcaggatgagcctgccctgttcgtggccctgaccttcgagcggcgggaggtcctggactcctccaatatcaaaccaatgaacctgatcggcgtggcaagaggcgaaaacatccccgccgtgatcgccctgaccgaccccgagggctgcccactgagccggtttaaggatagcctgggaaacccaacccacatcctgagaatcggcgagagctataaggagaagcagcggaccatccaggccaagaaggaggtggagcagcggagagccggcggctacagccggaagtacgccagcaaagccaagaatctggcagacgatatggtgagaaacaccgctagagatctgctgtactacgccgtgacccaggatgccatgctgatcttcgccaacctgagccggggcttcggccggcagggcaagcggaccttcatggccgagagacagtacacacggatggaggactggctgaccgccaagctggcctacgagggcctgagcaagacctacctgtccaagacactggcccagtacacctccaagacatgcagcaactgtgggtttaccatcaccagcgccgactacgacagggtgctggagaagctgaagaagacagcaacaggctggatgaccacaattaacggcaaggagctgaaggtggagggccagattacctactacaacagatacaagagacagaacgtagtcaaggacctgtccgtcgagctggatagactgagcgaagaatctgtgaacaacgacatctcctcctggacaaagggcagaagcggagaagctctgagcctcctgaagaaaagattctcccatagacccgtgcaggagaagttcgtgtgcctgaactgcggcttcgagacacacgcagccgagcaagccgccctgaacatcgccagatcctggctgttcctgcggagccaggagtacaagaaataccagacaaacaagacaaccggcaacaccgataagagagccttcgtcgagacctggcagtccttttaccggaagaagcttaaggaggtgtggaaacctgccgtgcggtctggcggatctggcggaggctcctagccccgtgctggtgagcttcgacgacgtgttcgtgagcttcaccagggaggagtggcaggtgctggacaacgcccagagggccctgtacggcgacgtgatgctggagacctacaggagcctggtgctgctgggccagtgcatcaccaagcccgaggtgatcttcaagctggagcagggcgtggagccctggaccggcggcgagccccacaaccagagcccccccgacgtgcaggaggtggacggatctggctccggcagcggccccaagaaaaagagaaaagtctaagctgccttctgcggggcttgccttctggccatgcccttcttctctcccttgcacctgtacctcttggtctttgaataaagcctgagtaggaaggctagcaaaaaaaaaaaaaaaaaaaaaaaaaaaaaaaaaaaaaaaaaaaaaaaaaaaaaaaaaaaaaaaaaaaaaaaaaaaaaaaa

SEQ ID NO: 16539 - RNA, 9485 nt, synthetic construct
  source 1..9485: mol_type = other RNA
aggaaataagagagaaaagaagagtaagaagaaatataagagccaccatggcccctaagaagaagcgtaaagtgagccggatggaacgcctcgtctacgaggtgcggcagaagtgcagaaacatcgaggacatctgcatctcctgcggatctctgaacgtgaccctggagcacccactgttcatcggcggcatgtgccagaactgtaaaaactgttttctggagtgtgcctatcaatacgacgatgacggctaccagagctactgcaccatctgttgcggcggaagagaggtgctgatgtgtggaaataacaactgctgccggtgcttctgcgtggaatgcgtggacctgctggtgggccccggcgccgcccaggccgctattaaggaagatccttggaactgctacatgtgcggccacaagggcacatacggcctgctgagacggagagaggactggcctagcagactgcagatgttcttcgccaataaccacgaccaggagttcgacccccctaaggtgtaccctcccgtccccgccgagaagagaaagcccatccgggtcctgagcctgttcgatggcatcgccaccggtctgctggtgctgaaggacctgggcatccaggtggataggtacattgcctccgaggtgtgcgaggactccatcaccgtgggaatggtgcgtcatcagggcaagatcatgtacgtgggcgacgtgcggagcgtgacacagaagcatatccaggagtggggccctttcgacctggtgatcggcggcagcccttgcaatgacctgagcatcgtgaacccagcccggaagggcctgtacgagggaaccggcagactgttcttcgagttttacagactgctgcacgacgcccggcctaaggaaggcgacgaccggcccttcttttggctgttcgagaatgtggtggccatgggagtcagcgacaagcgggatattagccggttcctggagagcaaccccgtgatgatcgatgccaaggaagtgagcgccgcccaccgggccagatacttctggggcaatctgcctggcatgaacagacccctggccagcaccgtgaacgacaagctggagctgcaggagtgcctggagcacggccggatcgccaagttcagcaaggtgagaaccatcaccacccgaagcaacagcatcaaacaaggcaaggaccagcactttcctgtgttcatgaacgagaaggaggacatcctgtggtgtaccgagatggagagagtgttcgggttcccagtccactacacagatgtcagcaacatgtctagactggccagacagagactgctgggaagaagctggtccgtccctgtgatcagacacctgttcgcccctctgaaggagtacttcgcctgcgtgagcagcggcaacagcaacgccaacagccggggccccagcttctctagcggcctggtgccactgtccctgagagggagccacatgggccccatggagatctacaaaaccgtgagcgcctggaagcggcagcctgtgcgcgtgctgagcctgtttcggaatatcgataaagtcctgaaaagcctgggattcctggagagcggctctggctccggcggtggcaccctgaagtacgtggaggatgtgacaaacgtggtcagacgggatgtggagaagtggggccccttcgatctggtgtacggcagcacccaacccctgggcagctcttgtgaccggtgccctggctggtacatgtttcagttccaccggatcctgcagtacgccctgccgagacaggagtcccagcggccattcttttggattttcatggacaacttgctgctgaccgaggatgaccaggaaactaccactcggttcctgcagaccgaagccgtgaccctgcaggacgtgagaggccgggactaccagaacgccatgcgggtgtggtccaacatccctggactgaaaagcaagcacgcacctctgacccctaaagaagaggagtacctgcaggcccaggtgcggagcagaagcaagctggacgcccctaaggtggatctgctggtgaagaattgcctcctgcccctgagagagtacttcaagtatttcagccagaatagtctgcccctgggaggcagcggcggcggcgccctggtgacatttgaggacgtcgccgtgcggttcacccaggaggaatgggctctgctggatccttctcagaaaatcctgtaccgggacgtgatgagagagacataccggaatctgacctccgtgggcatcaactgggaatgttgggaccttgaagcctgcttcagaagcctgggaagaaacctgagagtgcaggtggtgaagagaaagtgcgagctgaccaacagcggcccctgcgccgagggcggcccaagcagcggcgcccctcctcccagcggcggcagcccagccggctccccaacctctaccgaggagggcacctctgagtccgccacccccgagagcggccctggcacctccaccgagcccagcgagggcagcgcacccggcagccctgccggcagccccacctccacagaggagggaaccagcaccgagcccagcgaaggcagcgccccaggcaccagcaccgagcctagtgagcaggagattaaacggatcaacaagatcagaagaagacttgtgaaagacagcaacaccaagaaggccggcaagacaggccccatgaaaaccctgctggttagagtgatgacacccgatctgagagagcggctggaaaacctgagaaagaagcctgaaaatatcccccagcccatcagcaatacatctagagccaacctgaataagctgctgaccgattacaccgaaatgaagaaggcgatcctgcatgtgtactgggaagagttccagaaggaccctgtgggcctgatgagccgggtggcccagcctgccagcaagaagatcgatcagaacaagctgaaacctgagatggacgagaagggcaacctgaccaccgccggctttgcctgctctcagtgtggccagcccctgttcgtgtacaagctggagcaggtgtctgagaagggcaaggcttacaccaactacttcggacggtgcaatgtggccgagcacgaaaagctgatcctgctggcccagctgaagcccgagaaggatagcgacgaagccgtgacatatagcctgggaaagtttgggcagagggccctggatttctacagcattcatgtgaccaaggagtccacccaccccgtgaagcccctggcccagatcgccggaaacagatacgcctccggacctgtgggaaaggccctgagcgacgcatgtatgggcacaatcgcctccttcctgtctaagtaccaggacatcatcatcgaacaccagaaggtggtgaagggcaaccagaagagactggagagcctgcgggagctggccggcaaggaaaacctggaataccctagcgtgaccctgccacctcagcctcacaccaaggagggcgttgatgcctacaacgaagtgatcgcccgggtgcgaatgtgggtgaacctgaacctgtggcagaagctgaagctaagcagagatgatgccaagcctctgctgagactgaagggattcccttcctttcctctggtcgagagacaggccaacgaagtggactggtgggacatggtgtgtaacgtgaagaagctgatcaacgagaaaaaggaggatggcaaggtgttttggcagaatctggctggctacaagagacaggaagccctgagaccatacctgagcagcgaggaagatcggaagaagggaaagaaattcgctcggtaccagctgggcgacctgctgctgcacctggaaaagaagcacggcgaggactggggaaaggtgtacgacgaggcctgggagcggattgacaagaaagtggaaggcctgagcaagcacatcaagctggaagaggaacggagaagcgaggacgcccagagcaaggccgccctgaccgactggctgcgggctaaggccagcttcgtgatcgagggcctgaaggaggccgacaaggacgagttctgcagatgcgagctgaagctgcagaagtggtacggggacctgcggggaaagcccttcgccatcgaagccgagaacagcatcctggacatcagcggcttcagcaagcagtacaactgtgccttcatctggcagaaggacggcgtgaagaagctgaacctgtacctgatcatcaactacttcaagggcggcaagctgcggttcaagaagatcaaacctgaagccttcgaagccaacagattctacaccgtgatcaacaaaaagagcggcgagatcgtgcccatggaggtgaacttcaacttcgacgaccccaacctgatcatcctgcctctggcctttggcaagagacagggcagagaattcatctggaacgacctgctgtccctggaaaccggcagcctgaagctggccaacggaagagtgatcgagaagacactgtacaacagaagaacccggcaggatgagcctgccctgttcgtggccctgaccttcgagcggcgggaggtcctggactcctccaatatcaaaccaatgaacctgatcggcgtggcaagaggcgaaaacatccccgccgtgatcgccctgaccgaccccgagggctgcccactgagccggtttaaggatagcctgggaaacccaacccacatcctgagaatcggcgagagctataaggagaagcagcggaccatccaggccaagaaggaggtggagcagcggagagccggcggctacagccggaagtacgccagcaaagccaagaatctggcagacgatatggtgagaaacaccgctagagatctgctgtactacgccgtgacccaggatgccatgctgatcttcgccaacctgagccggggcttcggccggcagggcaagcggaccttcatggccgagagacagtacacacggatggaggactggctgaccgccaagctggcctacgagggcctgagcaagacctacctgtccaagacactggcccagtacacctccaagacatgcagcaactgtgggtttaccatcaccagcgccgactacgacagggtgctggagaagctgaagaagacagcaacaggctggatgaccacaattaacggcaaggagctgaaggtggagggccagattacctactacaacagatacaagagacagaacgtagtcaaggacctgtccgtcgagctggatagactgagcgaagaatctgtgaacaacgacatctcctcctggacaaagggcagaagcggagaagctctgagcctcctgaagaaaagattctcccatagacccgtgcaggagaagttcgtgtgcctgaactgcggcttcgagacacacgcagccgagcaagccgccctgaacatcgccagatcctggctgttcctgcggagccaggagtacaagaaataccagacaaacaagacaaccggcaacaccgataagagagccttcgtcgagacctggcagtccttttaccggaagaagcttaaggaggtgtggaaacctgccgtgcggtctggcggatctggcggaggctccttccaggagagcgtgaccttcaaggacgtggccgtggacttcacccaggaggagtggaagcagctggaccccgcccagagggacctgtacagggacgtgatgctggagaactacaggaacctggtgagcctgggcctgcccgtgttcaagcccgacgtgatcagccagctggagaggggcgaggccccctggatccccgaggtgcccaggagcatctgccagggcgaggtggtgaggaccaggggcggcccaagcagcggcgcccctcctcccagcggcggcagcccagccggctccccaacctctaccgaggagggcacctctgagtccgccacccccgagagcggccctggcacctccaccgagcccagcgagggcagcgcacccggcagccctgccggcagccccacctccacagaggagggaaccagcaccgagcccagcgaaggcagcgccccaggcaccagcaccgagcctagtgagcaggagattaaacggatcaacaagatcagaagaagacttgtgaaagacagcaacaccaagaaggccggcaagacaggccccatgaaaaccctgctggttagagtgatgacacccgatctgagagagcggctggaaaacctgagaaagaagcctgaaaatatcccccagcccatcagcaatacatctagagccaacctgaataagctgctgaccgattacaccgaaatgaagaaggcgatcctgcatgtgtactgggaagagttccagaaggaccctgtgggcctgatgagccgggtggcccagcctgccagcaagaagatcgatcagaacaagctgaaacctgagatggacgagaagggcaacctgaccaccgccggctttgcctgctctcagtgtggccagcccctgttcgtgtacaagctggagcaggtgtctgagaagggcaaggcttacaccaactacttcggacggtgcaatgtggccgagcacgaaaagctgatcctgctggcccagctgaagcccgagaaggatagcgacgaagccgtgacatatagcctgggaaagtttgggcagagggccctggatttctacagcattcatgtgaccaaggagtccacccaccccgtgaagcccctggcccagatcgccggaaacagatacgcctccggacctgtgggaaaggccctgagcgacgcatgtatgggcacaatcgcctccttcctgtctaagtaccaggacatcatcatcgaacaccagaaggtggtgaagggcaaccagaagagactggagagcctgcgggagctggccggcaaggaaaacctggaataccctagcgtgaccctgccacctcagcctcacaccaaggagggcgttgatgcctacaacgaagtgatcgcccgggtgcgaatgtgggtgaacctgaacctgtggcagaagctgaagctaagcagagatgatgccaagcctctgctgagactgaagggattcccttcctttcctctggtcgagagacaggccaacgaagtggactggtgggacatggtgtgtaacgtgaagaagctgatcaacgagaaaaaggaggatggcaaggtgttttggcagaatctggctggctacaagagacaggaagccctgagaccatacctgagcagcgaggaagatcggaagaagggaaagaaattcgctcggtaccagctgggcgacctgctgctgcacctggaaaagaagcacggcgaggactggggaaaggtgtacgacgaggcctgggagcggattgacaagaaagtggaaggcctgagcaagcacatcaagctggaagaggaacggagaagcgaggacgcccagagcaaggccgccctgaccgactggctgcgggctaaggccagcttcgtgatcgagggcctgaaggaggccgacaaggacgagttctgcagatgcgagctgaagctgcagaagtggtacggggacctgcggggaaagcccttcgccatcgaagccgagaacagcatcctggacatcagcggcttcagcaagcagtacaactgtgccttcatctggcagaaggacggcgtgaagaagctgaacctgtacctgatcatcaactacttcaagggcggcaagctgcggttcaagaagatcaaacctgaagccttcgaagccaacagattctacaccgtgatcaacaaaaagagcggcgagatcgtgcccatggaggtgaacttcaacttcgacgaccccaacctgatcatcctgcctctggcctttggcaagagacagggcagagaattcatctggaacgacctgctgtccctggaaaccggcagcctgaagctggccaacggaagagtgatcgagaagacactgtacaacagaagaacccggcaggatgagcctgccctgttcgtggccctgaccttcgagcggcgggaggtcctggactcctccaatatcaaaccaatgaacctgatcggcgtggcaagaggcgaaaacatccccgccgtgatcgccctgaccgaccccgagggctgcccactgagccggtttaaggatagcctgggaaacccaacccacatcctgagaatcggcgagagctataaggagaagcagcggaccatccaggccaagaaggaggtggagcagcggagagccggcggctacagccggaagtacgccagcaaagccaagaatctggcagacgatatggtgagaaacaccgctagagatctgctgtactacgccgtgacccaggatgccatgctgatcttcgccaacctgagccggggcttcggccggcagggcaagcggaccttcatggccgagagacagtacacacggatggaggactggctgaccgccaagctggcctacgagggcctgagcaagacctacctgtccaagacactggcccagtacacctccaagacatgcagcaactgtgggtttaccatcaccagcgccgactacgacagggtgctggagaagctgaagaagacagcaacaggctggatgaccacaattaacggcaaggagctgaaggtggagggccagattacctactacaacagatacaagagacagaacgtagtcaaggacctgtccgtcgagctggatagactgagcgaagaatctgtgaacaacgacatctcctcctggacaaagggcagaagcggagaagctctgagcctcctgaagaaaagattctcccatagacccgtgcaggagaagttcgtgtgcctgaactgcggcttcgagacacacgcagccgagcaagccgccctgaacatcgccagatcctggctgttcctgcggagccaggagtacaagaaataccagacaaacaagacaaccggcaacaccgataagagagccttcgtcgagacctggcagtccttttaccggaagaagcttaaggaggtgtggaaacctgccgtgcggtctggcggatctggcggaggctcctttccaggagagcgtgaccttcaaggacgtggccgtggacttcacccaggaggagtggaagcagctggaccccgcccagagggacctgtacagggacgtgatgctggagaactacaggaacctggtgagcctgggcctgcccgtgttcaagcccgacgtgatcagccagctggagaggggcgaggccccctggatccccgaggtgcccaggagcatctgccagggcgaggtggtgaggaccaggggatctggctccggcagcggccccaagaaaaagagaaaagtctaagctgccttctgcggggcttgccttctggccatgcccttcttctctcccttgcacctgtacctcttggtctttgaataaagcctgagtaggaaggctagcaaaaaaaaaaaaaaaaaaaaaaaaaaaaaaaaaaaaaaaaaaaaaaaaaaaaaaaaaaaaaaaaaaaaaaaaaaaaaaaa

SEQ ID NO: 16540 - RNA, 9485 nt, synthetic construct
  source 1..9485: mol_type = other RNA
aggaaataagagagaaaagaagagtaagaagaaatataagagccaccatggcccctaagaagaagcgtaaagtgagccggatggaacgcctcgtctacgaggtgcggcagaagtgcagaaacatcgaggacatctgcatctcctgcggatctctgaacgtgaccctggagcacccactgttcatcggcggcatgtgccagaactgtaaaaactgttttctggagtgtgcctatcaatacgacgatgacggctaccagagctactgcaccatctgttgcggcggaagagaggtgctgatgtgtggaaataacaactgctgccggtgcttctgcgtggaatgcgtggacctgctggtgggccccggcgccgcccaggccgctattaaggaagatccttggaactgctacatgtgcggccacaagggcacatacggcctgctgagacggagagaggactggcctagcagactgcagatgttcttcgccaataaccacgaccaggagttcgacccccctaaggtgtaccctcccgtccccgccgagaagagaaagcccatccgggtcctgagcctgttcgatggcatcgccaccggtctgctggtgctgaaggacctgggcatccaggtggataggtacattgcctccgaggtgtgcgaggactccatcaccgtgggaatggtgcgtcatcagggcaagatcatgtacgtgggcgacgtgcggagcgtgacacagaagcatatccaggagtggggccctttcgacctggtgatcggcggcagcccttgcaatgacctgagcatcgtgaacccagcccggaagggcctgtacgagggaaccggcagactgttcttcgagttttacagactgctgcacgacgcccggcctaaggaaggcgacgaccggcccttcttttggctgttcgagaatgtggtggccatgggagtcagcgacaagcgggatattagccggttcctggagagcaaccccgtgatgatcgatgccaaggaagtgagcgccgcccaccgggccagatacttctggggcaatctgcctggcatgaacagacccctggccagcaccgtgaacgacaagctggagctgcaggagtgcctggagcacggccggatcgccaagttcagcaaggtgagaaccatcaccacccgaagcaacagcatcaaacaaggcaaggaccagcactttcctgtgttcatgaacgagaaggaggacatcctgtggtgtaccgagatggagagagtgttcgggttcccagtccactacacagatgtcagcaacatgtctagactggccagacagagactgctgggaagaagctggtccgtccctgtgatcagacacctgttcgcccctctgaaggagtacttcgcctgcgtgagcagcggcaacagcaacgccaacagccggggccccagcttctctagcggcctggtgccactgtccctgagagggagccacatgggccccatggagatctacaaaaccgtgagcgcctggaagcggcagcctgtgcgcgtgctgagcctgtttcggaatatcgataaagtcctgaaaagcctgggattcctggagagcggctctggctccggcggtggcaccctgaagtacgtggaggatgtgacaaacgtggtcagacgggatgtggagaagtggggccccttcgatctggtgtacggcagcacccaacccctgggcagctcttgtgaccggtgccctggctggtacatgtttcagttccaccggatcctgcagtacgccctgccgagacaggagtcccagcggccattcttttggattttcatggacaacttgctgctgaccgaggatgaccaggaaactaccactcggttcctgcagaccgaagccgtgaccctgcaggacgtgagaggccgggactaccagaacgccatgcgggtgtggtccaacatccctggactgaaaagcaagcacgcacctctgacccctaaagaagaggagtacctgcaggcccaggtgcggagcagaagcaagctggacgcccctaaggtggatctgctggtgaagaattgcctcctgcccctgagagagtacttcaagtatttcagccagaatagtctgcccctgggaggcagcggcggcggcgccctggtgacatttgaggacgtcgccgtgcggttcacccaggaggaatgggctctgctggatccttctcagaaaatcctgtaccgggacgtgatgagagagacataccggaatctgacctccgtgggcatcaactgggaatgttgggaccttgaagcctgcttcagaagcctgggaagaaacctgagagtgcaggtggtgaagagaaagtgcgagctgaccaacagcggcccctgcgccgagggcggcccaagcagcggcgcccctcctcccagcggcggcagcccagccggctccccaacctctaccgaggagggcacctctgagtccgccacccccgagagcggccctggcacctccaccgagcccagcgagggcagcgcacccggcagccctgccggcagccccacctccacagaggagggaaccagcaccgagcccagcgaaggcagcgccccaggcaccagcaccgagcctagtgagcaggagattaaacggatcaacaagatcagaagaagacttgtgaaagacagcaacaccaagaaggccggcaagacaggccccatgaaaaccctgctggttagagtgatgacacccgatctgagagagcggctggaaaacctgagaaagaagcctgaaaatatcccccagcccatcagcaatacatctagagccaacctgaataagctgctgaccgattacaccgaaatgaagaaggcgatcctgcatgtgtactgggaagagttccagaaggaccctgtgggcctgatgagccgggtggcccagcctgccagcaagaagatcgatcagaacaagctgaaacctgagatggacgagaagggcaacctgaccaccgccggctttgcctgctctcagtgtggccagcccctgttcgtgtacaagctggagcaggtgtctgagaagggcaaggcttacaccaactacttcggacggtgcaatgtggccgagcacgaaaagctgatcctgctggcccagctgaagcccgagaaggatagcgacgaagccgtgacatatagcctgggaaagtttgggcagagggccctggatttctacagcattcatgtgaccaaggagtccacccaccccgtgaagcccctggcccagatcgccggaaacagatacgcctccggacctgtgggaaaggccctgagcgacgcatgtatgggcacaatcgcctccttcctgtctaagtaccaggacatcatcatcgaacaccagaaggtggtgaagggcaaccagaagagactggagagcctgcgggagctggccggcaaggaaaacctggaataccctagcgtgaccctgccacctcagcctcacaccaaggagggcgttgatgcctacaacgaagtgatcgcccgggtgcgaatgtgggtgaacctgaacctgtggcagaagctgaagctaagcagagatgatgccaagcctctgctgagactgaagggattcccttcctttcctctggtcgagagacaggccaacgaagtggactggtgggacatggtgtgtaacgtgaagaagctgatcaacgagaaaaaggaggatggcaaggtgttttggcagaatctggctggctacaagagacaggaagccctgagaccatacctgagcagcgaggaagatcggaagaagggaaagaaattcgctcggtaccagctgggcgacctgctgctgcacctggaaaagaagcacggcgaggactggggaaaggtgtacgacgaggcctgggagcggattgacaagaaagtggaaggcctgagcaagcacatcaagctggaagaggaacggagaagcgaggacgcccagagcaaggccgccctgaccgactggctgcgggctaaggccagcttcgtgatcgagggcctgaaggaggccgacaaggacgagttctgcagatgcgagctgaagctgcagaagtggtacggggacctgcggggaaagcccttcgccatcgaagccgagaacagcatcctggacatcagcggcttcagcaagcagtacaactgtgccttcatctggcagaaggacggcgtgaagaagctgaacctgtacctgatcatcaactacttcaagggcggcaagctgcggttcaagaagatcaaacctgaagccttcgaagccaacagattctacaccgtgatcaacaaaaagagcggcgagatcgtgcccatggaggtgaacttcaacttcgacgaccccaacctgatcatcctgcctctggcctttggcaagagacagggcagagaattcatctggaacgacctgctgtccctggaaaccggcagcctgaagctggccaacggaagagtgatcgagaagacactgtacaacagaagaacccggcaggatgagcctgccctgttcgtggccctgaccttcgagcggcgggaggtcctggactcctccaatatcaaaccaatgaacctgatcggcgtggcaagaggcgaaaacatccccgccgtgatcgccctgaccgaccccgagggctgcccactgagccggtttaaggatagcctgggaaacccaacccacatcctgagaatcggcgagagctataaggagaagcagcggaccatccaggccaagaaggaggtggagcagcggagagccggcggctacagccggaagtacgccagcaaagccaagaatctggcagacgatatggtgagaaacaccgctagagatctgctgtactacgccgtgacccaggatgccatgctgatcttcgccaacctgagccggggcttcggccggcagggcaagcggaccttcatggccgagagacagtacacacggatggaggactggctgaccgccaagctggcctacgagggcctgagcaagacctacctgtccaagacactggcccagtacacctccaagacatgcagcaactgtgggtttaccatcaccagcgccgactacgacagggtgctggagaagctgaagaagacagcaacaggctggatgaccacaattaacggcaaggagctgaaggtggagggccagattacctactacaacagatacaagagacagaacgtagtcaaggacctgtccgtcgagctggatagactgagcgaagaatctgtgaacaacgacatctcctcctggacaaagggcagaagcggagaagctctgagcctcctgaagaaaagattctcccatagacccgtgcaggagaagttcgtgtgcctgaactgcggcttcgagacacacgcagccgagcaagccgccctgaacatcgccagatcctggctgttcctgcggagccaggagtacaagaaataccagacaaacaagacaaccggcaacaccgataagagagccttcgtcgagacctggcagtccttttaccggaagaagcttaaggaggtgtggaaacctgccgtgcggtctggcggatctggcggaggctccgcccaggtgcccgtgaccttcgaggacatcgccgtgtacttcagccaggaggagtgggaggacctggaggagcagcagagggagctgtacaaggacgtgatgaaggagaactacgagaccctgagcagcctgggcccccccgccgtgacccccgacatcatcagccacatcgagaggggcgaggagccctacatcaggttcgagagcggccccgaggagagggagatcggcaagagcagctgcggcggcccaagcagcggcgcccctcctcccagcggcggcagcccagccggctccccaacctctaccgaggagggcacctctgagtccgccacccccgagagcggccctggcacctccaccgagcccagcgagggcagcgcacccggcagccctgccggcagccccacctccacagaggagggaaccagcaccgagcccagcgaaggcagcgccccaggcaccagcaccgagcctagtgagcaggagattaaacggatcaacaagatcagaagaagacttgtgaaagacagcaacaccaagaaggccggcaagacaggccccatgaaaaccctgctggttagagtgatgacacccgatctgagagagcggctggaaaacctgagaaagaagcctgaaaatatcccccagcccatcagcaatacatctagagccaacctgaataagctgctgaccgattacaccgaaatgaagaaggcgatcctgcatgtgtactgggaagagttccagaaggaccctgtgggcctgatgagccgggtggcccagcctgccagcaagaagatcgatcagaacaagctgaaacctgagatggacgagaagggcaacctgaccaccgccggctttgcctgctctcagtgtggccagcccctgttcgtgtacaagctggagcaggtgtctgagaagggcaaggcttacaccaactacttcggacggtgcaatgtggccgagcacgaaaagctgatcctgctggcccagctgaagcccgagaaggatagcgacgaagccgtgacatatagcctgggaaagtttgggcagagggccctggatttctacagcattcatgtgaccaaggagtccacccaccccgtgaagcccctggcccagatcgccggaaacagatacgcctccggacctgtgggaaaggccctgagcgacgcatgtatgggcacaatcgcctccttcctgtctaagtaccaggacatcatcatcgaacaccagaaggtggtgaagggcaaccagaagagactggagagcctgcgggagctggccggcaaggaaaacctggaataccctagcgtgaccctgccacctcagcctcacaccaaggagggcgttgatgcctacaacgaagtgatcgcccgggtgcgaatgtgggtgaacctgaacctgtggcagaagctgaagctaagcagagatgatgccaagcctctgctgagactgaagggattcccttcctttcctctggtcgagagacaggccaacgaagtggactggtgggacatggtgtgtaacgtgaagaagctgatcaacgagaaaaaggaggatggcaaggtgttttggcagaatctggctggctacaagagacaggaagccctgagaccatacctgagcagcgaggaagatcggaagaagggaaagaaattcgctcggtaccagctgggcgacctgctgctgcacctggaaaagaagcacggcgaggactggggaaaggtgtacgacgaggcctgggagcggattgacaagaaagtggaaggcctgagcaagcacatcaagctggaagaggaacggagaagcgaggacgcccagagcaaggccgccctgaccgactggctgcgggctaaggccagcttcgtgatcgagggcctgaaggaggccgacaaggacgagttctgcagatgcgagctgaagctgcagaagtggtacggggacctgcggggaaagcccttcgccatcgaagccgagaacagcatcctggacatcagcggcttcagcaagcagtacaactgtgccttcatctggcagaaggacggcgtgaagaagctgaacctgtacctgatcatcaactacttcaagggcggcaagctgcggttcaagaagatcaaacctgaagccttcgaagccaacagattctacaccgtgatcaacaaaaagagcggcgagatcgtgcccatggaggtgaacttcaacttcgacgaccccaacctgatcatcctgcctctggcctttggcaagagacagggcagagaattcatctggaacgacctgctgtccctggaaaccggcagcctgaagctggccaacggaagagtgatcgagaagacactgtacaacagaagaacccggcaggatgagcctgccctgttcgtggccctgaccttcgagcggcgggaggtcctggactcctccaatatcaaaccaatgaacctgatcggcgtggcaagaggcgaaaacatccccgccgtgatcgccctgaccgaccccgagggctgcccactgagccggtttaaggatagcctgggaaacccaacccacatcctgagaatcggcgagagctataaggagaagcagcggaccatccaggccaagaaggaggtggagcagcggagagccggcggctacagccggaagtacgccagcaaagccaagaatctggcagacgatatggtgagaaacaccgctagagatctgctgtactacgccgtgacccaggatgccatgctgatcttcgccaacctgagccggggcttcggccggcagggcaagcggaccttcatggccgagagacagtacacacggatggaggactggctgaccgccaagctggcctacgagggcctgagcaagacctacctgtccaagacactggcccagtacacctccaagacatgcagcaactgtgggtttaccatcaccagcgccgactacgacagggtgctggagaagctgaagaagacagcaacaggctggatgaccacaattaacggcaaggagctgaaggtggagggccagattacctactacaacagatacaagagacagaacgtagtcaaggacctgtccgtcgagctggatagactgagcgaagaatctgtgaacaacgacatctcctcctggacaaagggcagaagcggagaagctctgagcctcctgaagaaaagattctcccatagacccgtgcaggagaagttcgtgtgcctgaactgcggcttcgagacacacgcagccgagcaagccgccctgaacatcgccagatcctggctgttcctgcggagccaggagtacaagaaataccagacaaacaagacaaccggcaacaccgataagagagccttcgtcgagacctggcagtccttttaccggaagaagcttaaggaggtgtggaaacctgccgtgcggtctggcggatctggcggaggctcctgcccaggtgcccgtgaccttcgaggacatcgccgtgtacttcagccaggaggagtgggaggacctggaggagcagcagagggagctgtacaaggacgtgatgaaggagaactacgagaccctgagcagcctgggcccccccgccgtgacccccgacatcatcagccacatcgagaggggcgaggagccctacatcaggttcgagagcggccccgaggagagggagatcggcaagagcagctgcggatctggctccggcagcggccccaagaaaaagagaaaagtctaagctgccttctgcggggcttgccttctggccatgcccttcttctctcccttgcacctgtacctcttggtctttgaataaagcctgagtaggaaggctagcaaaaaaaaaaaaaaaaaaaaaaaaaaaaaaaaaaaaaaaaaaaaaaaaaaaaaaaaaaaaaaaaaaaaaaaaaaaaaaaa

SEQ ID NO: 16541 - RNA, 9485 nt, synthetic construct
  source 1..9485: mol_type = other RNA
aggaaataagagagaaaagaagagtaagaagaaatataagagccaccatggcccctaagaagaagcgtaaagtgagccggatggaacgcctcgtctacgaggtgcggcagaagtgcagaaacatcgaggacatctgcatctcctgcggatctctgaacgtgaccctggagcacccactgttcatcggcggcatgtgccagaactgtaaaaactgttttctggagtgtgcctatcaatacgacgatgacggctaccagagctactgcaccatctgttgcggcggaagagaggtgctgatgtgtggaaataacaactgctgccggtgcttctgcgtggaatgcgtggacctgctggtgggccccggcgccgcccaggccgctattaaggaagatccttggaactgctacatgtgcggccacaagggcacatacggcctgctgagacggagagaggactggcctagcagactgcagatgttcttcgccaataaccacgaccaggagttcgacccccctaaggtgtaccctcccgtccccgccgagaagagaaagcccatccgggtcctgagcctgttcgatggcatcgccaccggtctgctggtgctgaaggacctgggcatccaggtggataggtacattgcctccgaggtgtgcgaggactccatcaccgtgggaatggtgcgtcatcagggcaagatcatgtacgtgggcgacgtgcggagcgtgacacagaagcatatccaggagtggggccctttcgacctggtgatcggcggcagcccttgcaatgacctgagcatcgtgaacccagcccggaagggcctgtacgagggaaccggcagactgttcttcgagttttacagactgctgcacgacgcccggcctaaggaaggcgacgaccggcccttcttttggctgttcgagaatgtggtggccatgggagtcagcgacaagcgggatattagccggttcctggagagcaaccccgtgatgatcgatgccaaggaagtgagcgccgcccaccgggccagatacttctggggcaatctgcctggcatgaacagacccctggccagcaccgtgaacgacaagctggagctgcaggagtgcctggagcacggccggatcgccaagttcagcaaggtgagaaccatcaccacccgaagcaacagcatcaaacaaggcaaggaccagcactttcctgtgttcatgaacgagaaggaggacatcctgtggtgtaccgagatggagagagtgttcgggttcccagtccactacacagatgtcagcaacatgtctagactggccagacagagactgctgggaagaagctggtccgtccctgtgatcagacacctgttcgcccctctgaaggagtacttcgcctgcgtgagcagcggcaacagcaacgccaacagccggggccccagcttctctagcggcctggtgccactgtccctgagagggagccacatgggccccatggagatctacaaaaccgtgagcgcctggaagcggcagcctgtgcgcgtgctgagcctgtttcggaatatcgataaagtcctgaaaagcctgggattcctggagagcggctctggctccggcggtggcaccctgaagtacgtggaggatgtgacaaacgtggtcagacgggatgtggagaagtggggccccttcgatctggtgtacggcagcacccaacccctgggcagctcttgtgaccggtgccctggctggtacatgtttcagttccaccggatcctgcagtacgccctgccgagacaggagtcccagcggccattcttttggattttcatggacaacttgctgctgaccgaggatgaccaggaaactaccactcggttcctgcagaccgaagccgtgaccctgcaggacgtgagaggccgggactaccagaacgccatgcgggtgtggtccaacatccctggactgaaaagcaagcacgcacctctgacccctaaagaagaggagtacctgcaggcccaggtgcggagcagaagcaagctggacgcccctaaggtggatctgctggtgaagaattgcctcctgcccctgagagagtacttcaagtatttcagccagaatagtctgcccctgggaggcagcggcggcggcgccctggtgacatttgaggacgtcgccgtgcggttcacccaggaggaatgggctctgctggatccttctcagaaaatcctgtaccgggacgtgatgagagagacataccggaatctgacctccgtgggcatcaactgggaatgttgggaccttgaagcctgcttcagaagcctgggaagaaacctgagagtgcaggtggtgaagagaaagtgcgagctgaccaacagcggcccctgcgccgagggcggcccaagcagcggcgcccctcctcccagcggcggcagcccagccggctccccaacctctaccgaggagggcacctctgagtccgccacccccgagagcggccctggcacctccaccgagcccagcgagggcagcgcacccggcagccctgccggcagccccacctccacagaggagggaaccagcaccgagcccagcgaaggcagcgccccaggcaccagcaccgagcctagtgagcaggagattaaacggatcaacaagatcagaagaagacttgtgaaagacagcaacaccaagaaggccggcaagacaggccccatgaaaaccctgctggttagagtgatgacacccgatctgagagagcggctggaaaacctgagaaagaagcctgaaaatatcccccagcccatcagcaatacatctagagccaacctgaataagctgctgaccgattacaccgaaatgaagaaggcgatcctgcatgtgtactgggaagagttccagaaggaccctgtgggcctgatgagccgggtggcccagcctgccagcaagaagatcgatcagaacaagctgaaacctgagatggacgagaagggcaacctgaccaccgccggctttgcctgctctcagtgtggccagcccctgttcgtgtacaagctggagcaggtgtctgagaagggcaaggcttacaccaactacttcggacggtgcaatgtggccgagcacgaaaagctgatcctgctggcccagctgaagcccgagaaggatagcgacgaagccgtgacatatagcctgggaaagtttgggcagagggccctggatttctacagcattcatgtgaccaaggagtccacccaccccgtgaagcccctggcccagatcgccggaaacagatacgcctccggacctgtgggaaaggccctgagcgacgcatgtatgggcacaatcgcctccttcctgtctaagtaccaggacatcatcatcgaacaccagaaggtggtgaagggcaaccagaagagactggagagcctgcgggagctggccggcaaggaaaacctggaataccctagcgtgaccctgccacctcagcctcacaccaaggagggcgttgatgcctacaacgaagtgatcgcccgggtgcgaatgtgggtgaacctgaacctgtggcagaagctgaagctaagcagagatgatgccaagcctctgctgagactgaagggattcccttcctttcctctggtcgagagacaggccaacgaagtggactggtgggacatggtgtgtaacgtgaagaagctgatcaacgagaaaaaggaggatggcaaggtgttttggcagaatctggctggctacaagagacaggaagccctgagaccatacctgagcagcgaggaagatcggaagaagggaaagaaattcgctcggtaccagctgggcgacctgctgctgcacctggaaaagaagcacggcgaggactggggaaaggtgtacgacgaggcctgggagcggattgacaagaaagtggaaggcctgagcaagcacatcaagctggaagaggaacggagaagcgaggacgcccagagcaaggccgccctgaccgactggctgcgggctaaggccagcttcgtgatcgagggcctgaaggaggccgacaaggacgagttctgcagatgcgagctgaagctgcagaagtggtacggggacctgcggggaaagcccttcgccatcgaagccgagaacagcatcctggacatcagcggcttcagcaagcagtacaactgtgccttcatctggcagaaggacggcgtgaagaagctgaacctgtacctgatcatcaactacttcaagggcggcaagctgcggttcaagaagatcaaacctgaagccttcgaagccaacagattctacaccgtgatcaacaaaaagagcggcgagatcgtgcccatggaggtgaacttcaacttcgacgaccccaacctgatcatcctgcctctggcctttggcaagagacagggcagagaattcatctggaacgacctgctgtccctggaaaccggcagcctgaagctggccaacggaagagtgatcgagaagacactgtacaacagaagaacccggcaggatgagcctgccctgttcgtggccctgaccttcgagcggcgggaggtcctggactcctccaatatcaaaccaatgaacctgatcggcgtggcaagaggcgaaaacatccccgccgtgatcgccctgaccgaccccgagggctgcccactgagccggtttaaggatagcctgggaaacccaacccacatcctgagaatcggcgagagctataaggagaagcagcggaccatccaggccaagaaggaggtggagcagcggagagccggcggctacagccggaagtacgccagcaaagccaagaatctggcagacgatatggtgagaaacaccgctagagatctgctgtactacgccgtgacccaggatgccatgctgatcttcgccaacctgagccggggcttcggccggcagggcaagcggaccttcatggccgagagacagtacacacggatggaggactggctgaccgccaagctggcctacgagggcctgagcaagacctacctgtccaagacactggcccagtacacctccaagacatgcagcaactgtgggtttaccatcaccagcgccgactacgacagggtgctggagaagctgaagaagacagcaacaggctggatgaccacaattaacggcaaggagctgaaggtggagggccagattacctactacaacagatacaagagacagaacgtagtcaaggacctgtccgtcgagctggatagactgagcgaagaatctgtgaacaacgacatctcctcctggacaaagggcagaagcggagaagctctgagcctcctgaagaaaagattctcccatagacccgtgcaggagaagttcgtgtgcctgaactgcggcttcgagacacacgcagccgagcaagccgccctgaacatcgccagatcctggctgttcctgcggagccaggagtacaagaaataccagacaaacaagacaaccggcaacaccgataagagagccttcgtcgagacctggcagtccttttaccggaagaagcttaaggaggtgtggaaacctgccgtgcggtctggcggatctggcggaggctccagctacgagggcagcgtgagcttcagggacgtggccatcgacttcagcagggaggagtggaggcacctggacctgagccagaggaacctgtacagggacgtgatgctggagacctacagccacctgctgagcgtgggctaccaggtgcccgaggccgaggtggtgatgctggagcagggcaacgagccctgggccctgcagggcgagaggccccaccagagctgccccggcgagaagctgtggggcggcccaagcagcggcgcccctcctcccagcggcggcagcccagccggctccccaacctctaccgaggagggcacctctgagtccgccacccccgagagcggccctggcacctccaccgagcccagcgagggcagcgcacccggcagccctgccggcagccccacctccacagaggagggaaccagcaccgagcccagcgaaggcagcgccccaggcaccagcaccgagcctagtgagcaggagattaaacggatcaacaagatcagaagaagacttgtgaaagacagcaacaccaagaaggccggcaagacaggccccatgaaaaccctgctggttagagtgatgacacccgatctgagagagcggctggaaaacctgagaaagaagcctgaaaatatcccccagcccatcagcaatacatctagagccaacctgaataagctgctgaccgattacaccgaaatgaagaaggcgatcctgcatgtgtactgggaagagttccagaaggaccctgtgggcctgatgagccgggtggcccagcctgccagcaagaagatcgatcagaacaagctgaaacctgagatggacgagaagggcaacctgaccaccgccggctttgcctgctctcagtgtggccagcccctgttcgtgtacaagctggagcaggtgtctgagaagggcaaggcttacaccaactacttcggacggtgcaatgtggccgagcacgaaaagctgatcctgctggcccagctgaagcccgagaaggatagcgacgaagccgtgacatatagcctgggaaagtttgggcagagggccctggatttctacagcattcatgtgaccaaggagtccacccaccccgtgaagcccctggcccagatcgccggaaacagatacgcctccggacctgtgggaaaggccctgagcgacgcatgtatgggcacaatcgcctccttcctgtctaagtaccaggacatcatcatcgaacaccagaaggtggtgaagggcaaccagaagagactggagagcctgcgggagctggccggcaaggaaaacctggaataccctagcgtgaccctgccacctcagcctcacaccaaggagggcgttgatgcctacaacgaagtgatcgcccgggtgcgaatgtgggtgaacctgaacctgtggcagaagctgaagctaagcagagatgatgccaagcctctgctgagactgaagggattcccttcctttcctctggtcgagagacaggccaacgaagtggactggtgggacatggtgtgtaacgtgaagaagctgatcaacgagaaaaaggaggatggcaaggtgttttggcagaatctggctggctacaagagacaggaagccctgagaccatacctgagcagcgaggaagatcggaagaagggaaagaaattcgctcggtaccagctgggcgacctgctgctgcacctggaaaagaagcacggcgaggactggggaaaggtgtacgacgaggcctgggagcggattgacaagaaagtggaaggcctgagcaagcacatcaagctggaagaggaacggagaagcgaggacgcccagagcaaggccgccctgaccgactggctgcgggctaaggccagcttcgtgatcgagggcctgaaggaggccgacaaggacgagttctgcagatgcgagctgaagctgcagaagtggtacggggacctgcggggaaagcccttcgccatcgaagccgagaacagcatcctggacatcagcggcttcagcaagcagtacaactgtgccttcatctggcagaaggacggcgtgaagaagctgaacctgtacctgatcatcaactacttcaagggcggcaagctgcggttcaagaagatcaaacctgaagccttcgaagccaacagattctacaccgtgatcaacaaaaagagcggcgagatcgtgcccatggaggtgaacttcaacttcgacgaccccaacctgatcatcctgcctctggcctttggcaagagacagggcagagaattcatctggaacgacctgctgtccctggaaaccggcagcctgaagctggccaacggaagagtgatcgagaagacactgtacaacagaagaacccggcaggatgagcctgccctgttcgtggccctgaccttcgagcggcgggaggtcctggactcctccaatatcaaaccaatgaacctgatcggcgtggcaagaggcgaaaacatccccgccgtgatcgccctgaccgaccccgagggctgcccactgagccggtttaaggatagcctgggaaacccaacccacatcctgagaatcggcgagagctataaggagaagcagcggaccatccaggccaagaaggaggtggagcagcggagagccggcggctacagccggaagtacgccagcaaagccaagaatctggcagacgatatggtgagaaacaccgctagagatctgctgtactacgccgtgacccaggatgccatgctgatcttcgccaacctgagccggggcttcggccggcagggcaagcggaccttcatggccgagagacagtacacacggatggaggactggctgaccgccaagctggcctacgagggcctgagcaagacctacctgtccaagacactggcccagtacacctccaagacatgcagcaactgtgggtttaccatcaccagcgccgactacgacagggtgctggagaagctgaagaagacagcaacaggctggatgaccacaattaacggcaaggagctgaaggtggagggccagattacctactacaacagatacaagagacagaacgtagtcaaggacctgtccgtcgagctggatagactgagcgaagaatctgtgaacaacgacatctcctcctggacaaagggcagaagcggagaagctctgagcctcctgaagaaaagattctcccatagacccgtgcaggagaagttcgtgtgcctgaactgcggcttcgagacacacgcagccgagcaagccgccctgaacatcgccagatcctggctgttcctgcggagccaggagtacaagaaataccagacaaacaagacaaccggcaacaccgataagagagccttcgtcgagacctggcagtccttttaccggaagaagcttaaggaggtgtggaaacctgccgtgcggtctggcggatctggcggaggctcctagctacgagggcagcgtgagcttcagggacgtggccatcgacttcagcagggaggagtggaggcacctggacctgagccagaggaacctgtacagggacgtgatgctggagacctacagccacctgctgagcgtgggctaccaggtgcccgaggccgaggtggtgatgctggagcagggcaacgagccctgggccctgcagggcgagaggccccaccagagctgccccggcgagaagctgtggggatctggctccggcagcggccccaagaaaaagagaaaagtctaagctgccttctgcggggcttgccttctggccatgcccttcttctctcccttgcacctgtacctcttggtctttgaataaagcctgagtaggaaggctagcaaaaaaaaaaaaaaaaaaaaaaaaaaaaaaaaaaaaaaaaaaaaaaaaaaaaaaaaaaaaaaaaaaaaaaaaaaaaaaaa

SEQ ID NO: 16542 - RNA, 9485 nt, synthetic construct
  source 1..9485: mol_type = other RNA
aggaaataagagagaaaagaagagtaagaagaaatataagagccaccatggcccctaagaagaagcgtaaagtgagccggatggaacgcctcgtctacgaggtgcggcagaagtgcagaaacatcgaggacatctgcatctcctgcggatctctgaacgtgaccctggagcacccactgttcatcggcggcatgtgccagaactgtaaaaactgttttctggagtgtgcctatcaatacgacgatgacggctaccagagctactgcaccatctgttgcggcggaagagaggtgctgatgtgtggaaataacaactgctgccggtgcttctgcgtggaatgcgtggacctgctggtgggccccggcgccgcccaggccgctattaaggaagatccttggaactgctacatgtgcggccacaagggcacatacggcctgctgagacggagagaggactggcctagcagactgcagatgttcttcgccaataaccacgaccaggagttcgacccccctaaggtgtaccctcccgtccccgccgagaagagaaagcccatccgggtcctgagcctgttcgatggcatcgccaccggtctgctggtgctgaaggacctgggcatccaggtggataggtacattgcctccgaggtgtgcgaggactccatcaccgtgggaatggtgcgtcatcagggcaagatcatgtacgtgggcgacgtgcggagcgtgacacagaagcatatccaggagtggggccctttcgacctggtgatcggcggcagcccttgcaatgacctgagcatcgtgaacccagcccggaagggcctgtacgagggaaccggcagactgttcttcgagttttacagactgctgcacgacgcccggcctaaggaaggcgacgaccggcccttcttttggctgttcgagaatgtggtggccatgggagtcagcgacaagcgggatattagccggttcctggagagcaaccccgtgatgatcgatgccaaggaagtgagcgccgcccaccgggccagatacttctggggcaatctgcctggcatgaacagacccctggccagcaccgtgaacgacaagctggagctgcaggagtgcctggagcacggccggatcgccaagttcagcaaggtgagaaccatcaccacccgaagcaacagcatcaaacaaggcaaggaccagcactttcctgtgttcatgaacgagaaggaggacatcctgtggtgtaccgagatggagagagtgttcgggttcccagtccactacacagatgtcagcaacatgtctagactggccagacagagactgctgggaagaagctggtccgtccctgtgatcagacacctgttcgcccctctgaaggagtacttcgcctgcgtgagcagcggcaacagcaacgccaacagccggggccccagcttctctagcggcctggtgccactgtccctgagagggagccacatgggccccatggagatctacaaaaccgtgagcgcctggaagcggcagcctgtgcgcgtgctgagcctgtttcggaatatcgataaagtcctgaaaagcctgggattcctggagagcggctctggctccggcggtggcaccctgaagtacgtggaggatgtgacaaacgtggtcagacgggatgtggagaagtggggccccttcgatctggtgtacggcagcacccaacccctgggcagctcttgtgaccggtgccctggctggtacatgtttcagttccaccggatcctgcagtacgccctgccgagacaggagtcccagcggccattcttttggattttcatggacaacttgctgctgaccgaggatgaccaggaaactaccactcggttcctgcagaccgaagccgtgaccctgcaggacgtgagaggccgggactaccagaacgccatgcgggtgtggtccaacatccctggactgaaaagcaagcacgcacctctgacccctaaagaagaggagtacctgcaggcccaggtgcggagcagaagcaagctggacgcccctaaggtggatctgctggtgaagaattgcctcctgcccctgagagagtacttcaagtatttcagccagaatagtctgcccctgggaggcagcggcggcggcgccctggtgacatttgaggacgtcgccgtgcggttcacccaggaggaatgggctctgctggatccttctcagaaaatcctgtaccgggacgtgatgagagagacataccggaatctgacctccgtgggcatcaactgggaatgttgggaccttgaagcctgcttcagaagcctgggaagaaacctgagagtgcaggtggtgaagagaaagtgcgagctgaccaacagcggcccctgcgccgagggcggcccaagcagcggcgcccctcctcccagcggcggcagcccagccggctccccaacctctaccgaggagggcacctctgagtccgccacccccgagagcggccctggcacctccaccgagcccagcgagggcagcgcacccggcagccctgccggcagccccacctccacagaggagggaaccagcaccgagcccagcgaaggcagcgccccaggcaccagcaccgagcctagtgagcaggagattaaacggatcaacaagatcagaagaagacttgtgaaagacagcaacaccaagaaggccggcaagacaggccccatgaaaaccctgctggttagagtgatgacacccgatctgagagagcggctggaaaacctgagaaagaagcctgaaaatatcccccagcccatcagcaatacatctagagccaacctgaataagctgctgaccgattacaccgaaatgaagaaggcgatcctgcatgtgtactgggaagagttccagaaggaccctgtgggcctgatgagccgggtggcccagcctgccagcaagaagatcgatcagaacaagctgaaacctgagatggacgagaagggcaacctgaccaccgccggctttgcctgctctcagtgtggccagcccctgttcgtgtacaagctggagcaggtgtctgagaagggcaaggcttacaccaactacttcggacggtgcaatgtggccgagcacgaaaagctgatcctgctggcccagctgaagcccgagaaggatagcgacgaagccgtgacatatagcctgggaaagtttgggcagagggccctggatttctacagcattcatgtgaccaaggagtccacccaccccgtgaagcccctggcccagatcgccggaaacagatacgcctccggacctgtgggaaaggccctgagcgacgcatgtatgggcacaatcgcctccttcctgtctaagtaccaggacatcatcatcgaacaccagaaggtggtgaagggcaaccagaagagactggagagcctgcgggagctggccggcaaggaaaacctggaataccctagcgtgaccctgccacctcagcctcacaccaaggagggcgttgatgcctacaacgaagtgatcgcccgggtgcgaatgtgggtgaacctgaacctgtggcagaagctgaagctaagcagagatgatgccaagcctctgctgagactgaagggattcccttcctttcctctggtcgagagacaggccaacgaagtggactggtgggacatggtgtgtaacgtgaagaagctgatcaacgagaaaaaggaggatggcaaggtgttttggcagaatctggctggctacaagagacaggaagccctgagaccatacctgagcagcgaggaagatcggaagaagggaaagaaattcgctcggtaccagctgggcgacctgctgctgcacctggaaaagaagcacggcgaggactggggaaaggtgtacgacgaggcctgggagcggattgacaagaaagtggaaggcctgagcaagcacatcaagctggaagaggaacggagaagcgaggacgcccagagcaaggccgccctgaccgactggctgcgggctaaggccagcttcgtgatcgagggcctgaaggaggccgacaaggacgagttctgcagatgcgagctgaagctgcagaagtggtacggggacctgcggggaaagcccttcgccatcgaagccgagaacagcatcctggacatcagcggcttcagcaagcagtacaactgtgccttcatctggcagaaggacggcgtgaagaagctgaacctgtacctgatcatcaactacttcaagggcggcaagctgcggttcaagaagatcaaacctgaagccttcgaagccaacagattctacaccgtgatcaacaaaaagagcggcgagatcgtgcccatggaggtgaacttcaacttcgacgaccccaacctgatcatcctgcctctggcctttggcaagagacagggcagagaattcatctggaacgacctgctgtccctggaaaccggcagcctgaagctggccaacggaagagtgatcgagaagacactgtacaacagaagaacccggcaggatgagcctgccctgttcgtggccctgaccttcgagcggcgggaggtcctggactcctccaatatcaaaccaatgaacctgatcggcgtggcaagaggcgaaaacatccccgccgtgatcgccctgaccgaccccgagggctgcccactgagccggtttaaggatagcctgggaaacccaacccacatcctgagaatcggcgagagctataaggagaagcagcggaccatccaggccaagaaggaggtggagcagcggagagccggcggctacagccggaagtacgccagcaaagccaagaatctggcagacgatatggtgagaaacaccgctagagatctgctgtactacgccgtgacccaggatgccatgctgatcttcgccaacctgagccggggcttcggccggcagggcaagcggaccttcatggccgagagacagtacacacggatggaggactggctgaccgccaagctggcctacgagggcctgagcaagacctacctgtccaagacactggcccagtacacctccaagacatgcagcaactgtgggtttaccatcaccagcgccgactacgacagggtgctggagaagctgaagaagacagcaacaggctggatgaccacaattaacggcaaggagctgaaggtggagggccagattacctactacaacagatacaagagacagaacgtagtcaaggacctgtccgtcgagctggatagactgagcgaagaatctgtgaacaacgacatctcctcctggacaaagggcagaagcggagaagctctgagcctcctgaagaaaagattctcccatagacccgtgcaggagaagttcgtgtgcctgaactgcggcttcgagacacacgcagccgagcaagccgccctgaacatcgccagatcctggctgttcctgcggagccaggagtacaagaaataccagacaaacaagacaaccggcaacaccgataagagagccttcgtcgagacctggcagtccttttaccggaagaagcttaaggaggtgtggaaacctgccgtgcggtctggcggatctggcggaggctccatggcccaggagagcgtgatgttcagcgacgtgagcatcgacttcagccaggaggagtgggagtgcctgaacgacgaccagagggacctgtacagggacgtgatgctggagaactacagcaacctggtgagcatggccggccacagcatcagcaagcccaacgtgatcagctacctggagcagggcaaggagccctggctggtggacagggagctgaccaggggccagtggcccgccctggagggcggcccaagcagcggcgcccctcctcccagcggcggcagcccagccggctccccaacctctaccgaggagggcacctctgagtccgccacccccgagagcggccctggcacctccaccgagcccagcgagggcagcgcacccggcagccctgccggcagccccacctccacagaggagggaaccagcaccgagcccagcgaaggcagcgccccaggcaccagcaccgagcctagtgagcaggagattaaacggatcaacaagatcagaagaagacttgtgaaagacagcaacaccaagaaggccggcaagacaggccccatgaaaaccctgctggttagagtgatgacacccgatctgagagagcggctggaaaacctgagaaagaagcctgaaaatatcccccagcccatcagcaatacatctagagccaacctgaataagctgctgaccgattacaccgaaatgaagaaggcgatcctgcatgtgtactgggaagagttccagaaggaccctgtgggcctgatgagccgggtggcccagcctgccagcaagaagatcgatcagaacaagctgaaacctgagatggacgagaagggcaacctgaccaccgccggctttgcctgctctcagtgtggccagcccctgttcgtgtacaagctggagcaggtgtctgagaagggcaaggcttacaccaactacttcggacggtgcaatgtggccgagcacgaaaagctgatcctgctggcccagctgaagcccgagaaggatagcgacgaagccgtgacatatagcctgggaaagtttgggcagagggccctggatttctacagcattcatgtgaccaaggagtccacccaccccgtgaagcccctggcccagatcgccggaaacagatacgcctccggacctgtgggaaaggccctgagcgacgcatgtatgggcacaatcgcctccttcctgtctaagtaccaggacatcatcatcgaacaccagaaggtggtgaagggcaaccagaagagactggagagcctgcgggagctggccggcaaggaaaacctggaataccctagcgtgaccctgccacctcagcctcacaccaaggagggcgttgatgcctacaacgaagtgatcgcccgggtgcgaatgtgggtgaacctgaacctgtggcagaagctgaagctaagcagagatgatgccaagcctctgctgagactgaagggattcccttcctttcctctggtcgagagacaggccaacgaagtggactggtgggacatggtgtgtaacgtgaagaagctgatcaacgagaaaaaggaggatggcaaggtgttttggcagaatctggctggctacaagagacaggaagccctgagaccatacctgagcagcgaggaagatcggaagaagggaaagaaattcgctcggtaccagctgggcgacctgctgctgcacctggaaaagaagcacggcgaggactggggaaaggtgtacgacgaggcctgggagcggattgacaagaaagtggaaggcctgagcaagcacatcaagctggaagaggaacggagaagcgaggacgcccagagcaaggccgccctgaccgactggctgcgggctaaggccagcttcgtgatcgagggcctgaaggaggccgacaaggacgagttctgcagatgcgagctgaagctgcagaagtggtacggggacctgcggggaaagcccttcgccatcgaagccgagaacagcatcctggacatcagcggcttcagcaagcagtacaactgtgccttcatctggcagaaggacggcgtgaagaagctgaacctgtacctgatcatcaactacttcaagggcggcaagctgcggttcaagaagatcaaacctgaagccttcgaagccaacagattctacaccgtgatcaacaaaaagagcggcgagatcgtgcccatggaggtgaacttcaacttcgacgaccccaacctgatcatcctgcctctggcctttggcaagagacagggcagagaattcatctggaacgacctgctgtccctggaaaccggcagcctgaagctggccaacggaagagtgatcgagaagacactgtacaacagaagaacccggcaggatgagcctgccctgttcgtggccctgaccttcgagcggcgggaggtcctggactcctccaatatcaaaccaatgaacctgatcggcgtggcaagaggcgaaaacatccccgccgtgatcgccctgaccgaccccgagggctgcccactgagccggtttaaggatagcctgggaaacccaacccacatcctgagaatcggcgagagctataaggagaagcagcggaccatccaggccaagaaggaggtggagcagcggagagccggcggctacagccggaagtacgccagcaaagccaagaatctggcagacgatatggtgagaaacaccgctagagatctgctgtactacgccgtgacccaggatgccatgctgatcttcgccaacctgagccggggcttcggccggcagggcaagcggaccttcatggccgagagacagtacacacggatggaggactggctgaccgccaagctggcctacgagggcctgagcaagacctacctgtccaagacactggcccagtacacctccaagacatgcagcaactgtgggtttaccatcaccagcgccgactacgacagggtgctggagaagctgaagaagacagcaacaggctggatgaccacaattaacggcaaggagctgaaggtggagggccagattacctactacaacagatacaagagacagaacgtagtcaaggacctgtccgtcgagctggatagactgagcgaagaatctgtgaacaacgacatctcctcctggacaaagggcagaagcggagaagctctgagcctcctgaagaaaagattctcccatagacccgtgcaggagaagttcgtgtgcctgaactgcggcttcgagacacacgcagccgagcaagccgccctgaacatcgccagatcctggctgttcctgcggagccaggagtacaagaaataccagacaaacaagacaaccggcaacaccgataagagagccttcgtcgagacctggcagtccttttaccggaagaagcttaaggaggtgtggaaacctgccgtgcggtctggcggatctggcggaggctcctatggcccaggagagcgtgatgttcagcgacgtgagcatcgacttcagccaggaggagtgggagtgcctgaacgacgaccagagggacctgtacagggacgtgatgctggagaactacagcaacctggtgagcatggccggccacagcatcagcaagcccaacgtgatcagctacctggagcagggcaaggagccctggctggtggacagggagctgaccaggggccagtggcccgccctggagggatctggctccggcagcggccccaagaaaaagagaaaagtctaagctgccttctgcggggcttgccttctggccatgcccttcttctctcccttgcacctgtacctcttggtctttgaataaagcctgagtaggaaggctagcaaaaaaaaaaaaaaaaaaaaaaaaaaaaaaaaaaaaaaaaaaaaaaaaaaaaaaaaaaaaaaaaaaaaaaaaaaaaaaaa

SEQ ID NO: 16543 - RNA, 9485 nt, synthetic construct
  source 1..9485: mol_type = other RNA
aggaaataagagagaaaagaagagtaagaagaaatataagagccaccatggcccctaagaagaagcgtaaagtgagccggatggaacgcctcgtctacgaggtgcggcagaagtgcagaaacatcgaggacatctgcatctcctgcggatctctgaacgtgaccctggagcacccactgttcatcggcggcatgtgccagaactgtaaaaactgttttctggagtgtgcctatcaatacgacgatgacggctaccagagctactgcaccatctgttgcggcggaagagaggtgctgatgtgtggaaataacaactgctgccggtgcttctgcgtggaatgcgtggacctgctggtgggccccggcgccgcccaggccgctattaaggaagatccttggaactgctacatgtgcggccacaagggcacatacggcctgctgagacggagagaggactggcctagcagactgcagatgttcttcgccaataaccacgaccaggagttcgacccccctaaggtgtaccctcccgtccccgccgagaagagaaagcccatccgggtcctgagcctgttcgatggcatcgccaccggtctgctggtgctgaaggacctgggcatccaggtggataggtacattgcctccgaggtgtgcgaggactccatcaccgtgggaatggtgcgtcatcagggcaagatcatgtacgtgggcgacgtgcggagcgtgacacagaagcatatccaggagtggggccctttcgacctggtgatcggcggcagcccttgcaatgacctgagcatcgtgaacccagcccggaagggcctgtacgagggaaccggcagactgttcttcgagttttacagactgctgcacgacgcccggcctaaggaaggcgacgaccggcccttcttttggctgttcgagaatgtggtggccatgggagtcagcgacaagcgggatattagccggttcctggagagcaaccccgtgatgatcgatgccaaggaagtgagcgccgcccaccgggccagatacttctggggcaatctgcctggcatgaacagacccctggccagcaccgtgaacgacaagctggagctgcaggagtgcctggagcacggccggatcgccaagttcagcaaggtgagaaccatcaccacccgaagcaacagcatcaaacaaggcaaggaccagcactttcctgtgttcatgaacgagaaggaggacatcctgtggtgtaccgagatggagagagtgttcgggttcccagtccactacacagatgtcagcaacatgtctagactggccagacagagactgctgggaagaagctggtccgtccctgtgatcagacacctgttcgcccctctgaaggagtacttcgcctgcgtgagcagcggcaacagcaacgccaacagccggggccccagcttctctagcggcctggtgccactgtccctgagagggagccacatgggccccatggagatctacaaaaccgtgagcgcctggaagcggcagcctgtgcgcgtgctgagcctgtttcggaatatcgataaagtcctgaaaagcctgggattcctggagagcggctctggctccggcggtggcaccctgaagtacgtggaggatgtgacaaacgtggtcagacgggatgtggagaagtggggccccttcgatctggtgtacggcagcacccaacccctgggcagctcttgtgaccggtgccctggctggtacatgtttcagttccaccggatcctgcagtacgccctgccgagacaggagtcccagcggccattcttttggattttcatggacaacttgctgctgaccgaggatgaccaggaaactaccactcggttcctgcagaccgaagccgtgaccctgcaggacgtgagaggccgggactaccagaacgccatgcgggtgtggtccaacatccctggactgaaaagcaagcacgcacctctgacccctaaagaagaggagtacctgcaggcccaggtgcggagcagaagcaagctggacgcccctaaggtggatctgctggtgaagaattgcctcctgcccctgagagagtacttcaagtatttcagccagaatagtctgcccctgggaggcagcggcggcggcgccctggtgacatttgaggacgtcgccgtgcggttcacccaggaggaatgggctctgctggatccttctcagaaaatcctgtaccgggacgtgatgagagagacataccggaatctgacctccgtgggcatcaactgggaatgttgggaccttgaagcctgcttcagaagcctgggaagaaacctgagagtgcaggtggtgaagagaaagtgcgagctgaccaacagcggcccctgcgccgagggcggcccaagcagcggcgcccctcctcccagcggcggcagcccagccggctccccaacctctaccgaggagggcacctctgagtccgccacccccgagagcggccctggcacctccaccgagcccagcgagggcagcgcacccggcagccctgccggcagccccacctccacagaggagggaaccagcaccgagcccagcgaaggcagcgccccaggcaccagcaccgagcctagtgagcaggagattaaacggatcaacaagatcagaagaagacttgtgaaagacagcaacaccaagaaggccggcaagacaggccccatgaaaaccctgctggttagagtgatgacacccgatctgagagagcggctggaaaacctgagaaagaagcctgaaaatatcccccagcccatcagcaatacatctagagccaacctgaataagctgctgaccgattacaccgaaatgaagaaggcgatcctgcatgtgtactgggaagagttccagaaggaccctgtgggcctgatgagccgggtggcccagcctgccagcaagaagatcgatcagaacaagctgaaacctgagatggacgagaagggcaacctgaccaccgccggctttgcctgctctcagtgtggccagcccctgttcgtgtacaagctggagcaggtgtctgagaagggcaaggcttacaccaactacttcggacggtgcaatgtggccgagcacgaaaagctgatcctgctggcccagctgaagcccgagaaggatagcgacgaagccgtgacatatagcctgggaaagtttgggcagagggccctggatttctacagcattcatgtgaccaaggagtccacccaccccgtgaagcccctggcccagatcgccggaaacagatacgcctccggacctgtgggaaaggccctgagcgacgcatgtatgggcacaatcgcctccttcctgtctaagtaccaggacatcatcatcgaacaccagaaggtggtgaagggcaaccagaagagactggagagcctgcgggagctggccggcaaggaaaacctggaataccctagcgtgaccctgccacctcagcctcacaccaaggagggcgttgatgcctacaacgaagtgatcgcccgggtgcgaatgtgggtgaacctgaacctgtggcagaagctgaagctaagcagagatgatgccaagcctctgctgagactgaagggattcccttcctttcctctggtcgagagacaggccaacgaagtggactggtgggacatggtgtgtaacgtgaagaagctgatcaacgagaaaaaggaggatggcaaggtgttttggcagaatctggctggctacaagagacaggaagccctgagaccatacctgagcagcgaggaagatcggaagaagggaaagaaattcgctcggtaccagctgggcgacctgctgctgcacctggaaaagaagcacggcgaggactggggaaaggtgtacgacgaggcctgggagcggattgacaagaaagtggaaggcctgagcaagcacatcaagctggaagaggaacggagaagcgaggacgcccagagcaaggccgccctgaccgactggctgcgggctaaggccagcttcgtgatcgagggcctgaaggaggccgacaaggacgagttctgcagatgcgagctgaagctgcagaagtggtacggggacctgcggggaaagcccttcgccatcgaagccgagaacagcatcctggacatcagcggcttcagcaagcagtacaactgtgccttcatctggcagaaggacggcgtgaagaagctgaacctgtacctgatcatcaactacttcaagggcggcaagctgcggttcaagaagatcaaacctgaagccttcgaagccaacagattctacaccgtgatcaacaaaaagagcggcgagatcgtgcccatggaggtgaacttcaacttcgacgaccccaacctgatcatcctgcctctggcctttggcaagagacagggcagagaattcatctggaacgacctgctgtccctggaaaccggcagcctgaagctggccaacggaagagtgatcgagaagacactgtacaacagaagaacccggcaggatgagcctgccctgttcgtggccctgaccttcgagcggcgggaggtcctggactcctccaatatcaaaccaatgaacctgatcggcgtggcaagaggcgaaaacatccccgccgtgatcgccctgaccgaccccgagggctgcccactgagccggtttaaggatagcctgggaaacccaacccacatcctgagaatcggcgagagctataaggagaagcagcggaccatccaggccaagaaggaggtggagcagcggagagccggcggctacagccggaagtacgccagcaaagccaagaatctggcagacgatatggtgagaaacaccgctagagatctgctgtactacgccgtgacccaggatgccatgctgatcttcgccaacctgagccggggcttcggccggcagggcaagcggaccttcatggccgagagacagtacacacggatggaggactggctgaccgccaagctggcctacgagggcctgagcaagacctacctgtccaagacactggcccagtacacctccaagacatgcagcaactgtgggtttaccatcaccagcgccgactacgacagggtgctggagaagctgaagaagacagcaacaggctggatgaccacaattaacggcaaggagctgaaggtggagggccagattacctactacaacagatacaagagacagaacgtagtcaaggacctgtccgtcgagctggatagactgagcgaagaatctgtgaacaacgacatctcctcctggacaaagggcagaagcggagaagctctgagcctcctgaagaaaagattctcccatagacccgtgcaggagaagttcgtgtgcctgaactgcggcttcgagacacacgcagccgagcaagccgccctgaacatcgccagatcctggctgttcctgcggagccaggagtacaagaaataccagacaaacaagacaaccggcaacaccgataagagagccttcgtcgagacctggcagtccttttaccggaagaagcttaaggaggtgtggaaacctgccgtgcggtctggcggatctggcggaggctccccccaggagagcgtggccttcgaggacgtggccgtgtacttcaccgccaaggagtgggacatcatggtgcccgccgagagggccctgtacagggacgtgatgctggagaactacgaggccgtggccttcgtggtgccccccaccagcaagcccgccctggtgagccacctggagcagggcaaggagagctgcttcaccaggccccagggcgtgctgtgcaggaacgactggagggccggcctgggcggcccaagcagcggcgcccctcctcccagcggcggcagcccagccggctccccaacctctaccgaggagggcacctctgagtccgccacccccgagagcggccctggcacctccaccgagcccagcgagggcagcgcacccggcagccctgccggcagccccacctccacagaggagggaaccagcaccgagcccagcgaaggcagcgccccaggcaccagcaccgagcctagtgagcaggagattaaacggatcaacaagatcagaagaagacttgtgaaagacagcaacaccaagaaggccggcaagacaggccccatgaaaaccctgctggttagagtgatgacacccgatctgagagagcggctggaaaacctgagaaagaagcctgaaaatatcccccagcccatcagcaatacatctagagccaacctgaataagctgctgaccgattacaccgaaatgaagaaggcgatcctgcatgtgtactgggaagagttccagaaggaccctgtgggcctgatgagccgggtggcccagcctgccagcaagaagatcgatcagaacaagctgaaacctgagatggacgagaagggcaacctgaccaccgccggctttgcctgctctcagtgtggccagcccctgttcgtgtacaagctggagcaggtgtctgagaagggcaaggcttacaccaactacttcggacggtgcaatgtggccgagcacgaaaagctgatcctgctggcccagctgaagcccgagaaggatagcgacgaagccgtgacatatagcctgggaaagtttgggcagagggccctggatttctacagcattcatgtgaccaaggagtccacccaccccgtgaagcccctggcccagatcgccggaaacagatacgcctccggacctgtgggaaaggccctgagcgacgcatgtatgggcacaatcgcctccttcctgtctaagtaccaggacatcatcatcgaacaccagaaggtggtgaagggcaaccagaagagactggagagcctgcgggagctggccggcaaggaaaacctggaataccctagcgtgaccctgccacctcagcctcacaccaaggagggcgttgatgcctacaacgaagtgatcgcccgggtgcgaatgtgggtgaacctgaacctgtggcagaagctgaagctaagcagagatgatgccaagcctctgctgagactgaagggattcccttcctttcctctggtcgagagacaggccaacgaagtggactggtgggacatggtgtgtaacgtgaagaagctgatcaacgagaaaaaggaggatggcaaggtgttttggcagaatctggctggctacaagagacaggaagccctgagaccatacctgagcagcgaggaagatcggaagaagggaaagaaattcgctcggtaccagctgggcgacctgctgctgcacctggaaaagaagcacggcgaggactggggaaaggtgtacgacgaggcctgggagcggattgacaagaaagtggaaggcctgagcaagcacatcaagctggaagaggaacggagaagcgaggacgcccagagcaaggccgccctgaccgactggctgcgggctaaggccagcttcgtgatcgagggcctgaaggaggccgacaaggacgagttctgcagatgcgagctgaagctgcagaagtggtacggggacctgcggggaaagcccttcgccatcgaagccgagaacagcatcctggacatcagcggcttcagcaagcagtacaactgtgccttcatctggcagaaggacggcgtgaagaagctgaacctgtacctgatcatcaactacttcaagggcggcaagctgcggttcaagaagatcaaacctgaagccttcgaagccaacagattctacaccgtgatcaacaaaaagagcggcgagatcgtgcccatggaggtgaacttcaacttcgacgaccccaacctgatcatcctgcctctggcctttggcaagagacagggcagagaattcatctggaacgacctgctgtccctggaaaccggcagcctgaagctggccaacggaagagtgatcgagaagacactgtacaacagaagaacccggcaggatgagcctgccctgttcgtggccctgaccttcgagcggcgggaggtcctggactcctccaatatcaaaccaatgaacctgatcggcgtggcaagaggcgaaaacatccccgccgtgatcgccctgaccgaccccgagggctgcccactgagccggtttaaggatagcctgggaaacccaacccacatcctgagaatcggcgagagctataaggagaagcagcggaccatccaggccaagaaggaggtggagcagcggagagccggcggctacagccggaagtacgccagcaaagccaagaatctggcagacgatatggtgagaaacaccgctagagatctgctgtactacgccgtgacccaggatgccatgctgatcttcgccaacctgagccggggcttcggccggcagggcaagcggaccttcatggccgagagacagtacacacggatggaggactggctgaccgccaagctggcctacgagggcctgagcaagacctacctgtccaagacactggcccagtacacctccaagacatgcagcaactgtgggtttaccatcaccagcgccgactacgacagggtgctggagaagctgaagaagacagcaacaggctggatgaccacaattaacggcaaggagctgaaggtggagggccagattacctactacaacagatacaagagacagaacgtagtcaaggacctgtccgtcgagctggatagactgagcgaagaatctgtgaacaacgacatctcctcctggacaaagggcagaagcggagaagctctgagcctcctgaagaaaagattctcccatagacccgtgcaggagaagttcgtgtgcctgaactgcggcttcgagacacacgcagccgagcaagccgccctgaacatcgccagatcctggctgttcctgcggagccaggagtacaagaaataccagacaaacaagacaaccggcaacaccgataagagagccttcgtcgagacctggcagtccttttaccggaagaagcttaaggaggtgtggaaacctgccgtgcggtctggcggatctggcggaggctcctccccaggagagcgtggccttcgaggacgtggccgtgtacttcaccgccaaggagtgggacatcatggtgcccgccgagagggccctgtacagggacgtgatgctggagaactacgaggccgtggccttcgtggtgccccccaccagcaagcccgccctggtgagccacctggagcagggcaaggagagctgcttcaccaggccccagggcgtgctgtgcaggaacgactggagggccggcctgggatctggctccggcagcggccccaagaaaaagagaaaagtctaagctgccttctgcggggcttgccttctggccatgcccttcttctctcccttgcacctgtacctcttggtctttgaataaagcctgagtaggaaggctagcaaaaaaaaaaaaaaaaaaaaaaaaaaaaaaaaaaaaaaaaaaaaaaaaaaaaaaaaaaaaaaaaaaaaaaaaaaaaaaaa

SEQ ID NO: 16544 - RNA, 9485 nt, synthetic construct
  source 1..9485: mol_type = other RNA
aggaaataagagagaaaagaagagtaagaagaaatataagagccaccatggcccctaagaagaagcgtaaagtgagccggatggaacgcctcgtctacgaggtgcggcagaagtgcagaaacatcgaggacatctgcatctcctgcggatctctgaacgtgaccctggagcacccactgttcatcggcggcatgtgccagaactgtaaaaactgttttctggagtgtgcctatcaatacgacgatgacggctaccagagctactgcaccatctgttgcggcggaagagaggtgctgatgtgtggaaataacaactgctgccggtgcttctgcgtggaatgcgtggacctgctggtgggccccggcgccgcccaggccgctattaaggaagatccttggaactgctacatgtgcggccacaagggcacatacggcctgctgagacggagagaggactggcctagcagactgcagatgttcttcgccaataaccacgaccaggagttcgacccccctaaggtgtaccctcccgtccccgccgagaagagaaagcccatccgggtcctgagcctgttcgatggcatcgccaccggtctgctggtgctgaaggacctgggcatccaggtggataggtacattgcctccgaggtgtgcgaggactccatcaccgtgggaatggtgcgtcatcagggcaagatcatgtacgtgggcgacgtgcggagcgtgacacagaagcatatccaggagtggggccctttcgacctggtgatcggcggcagcccttgcaatgacctgagcatcgtgaacccagcccggaagggcctgtacgagggaaccggcagactgttcttcgagttttacagactgctgcacgacgcccggcctaaggaaggcgacgaccggcccttcttttggctgttcgagaatgtggtggccatgggagtcagcgacaagcgggatattagccggttcctggagagcaaccccgtgatgatcgatgccaaggaagtgagcgccgcccaccgggccagatacttctggggcaatctgcctggcatgaacagacccctggccagcaccgtgaacgacaagctggagctgcaggagtgcctggagcacggccggatcgccaagttcagcaaggtgagaaccatcaccacccgaagcaacagcatcaaacaaggcaaggaccagcactttcctgtgttcatgaacgagaaggaggacatcctgtggtgtaccgagatggagagagtgttcgggttcccagtccactacacagatgtcagcaacatgtctagactggccagacagagactgctgggaagaagctggtccgtccctgtgatcagacacctgttcgcccctctgaaggagtacttcgcctgcgtgagcagcggcaacagcaacgccaacagccggggccccagcttctctagcggcctggtgccactgtccctgagagggagccacatgggccccatggagatctacaaaaccgtgagcgcctggaagcggcagcctgtgcgcgtgctgagcctgtttcggaatatcgataaagtcctgaaaagcctgggattcctggagagcggctctggctccggcggtggcaccctgaagtacgtggaggatgtgacaaacgtggtcagacgggatgtggagaagtggggccccttcgatctggtgtacggcagcacccaacccctgggcagctcttgtgaccggtgccctggctggtacatgtttcagttccaccggatcctgcagtacgccctgccgagacaggagtcccagcggccattcttttggattttcatggacaacttgctgctgaccgaggatgaccaggaaactaccactcggttcctgcagaccgaagccgtgaccctgcaggacgtgagaggccgggactaccagaacgccatgcgggtgtggtccaacatccctggactgaaaagcaagcacgcacctctgacccctaaagaagaggagtacctgcaggcccaggtgcggagcagaagcaagctggacgcccctaaggtggatctgctggtgaagaattgcctcctgcccctgagagagtacttcaagtatttcagccagaatagtctgcccctgggaggcagcggcggcggcgccctggtgacatttgaggacgtcgccgtgcggttcacccaggaggaatgggctctgctggatccttctcagaaaatcctgtaccgggacgtgatgagagagacataccggaatctgacctccgtgggcatcaactgggaatgttgggaccttgaagcctgcttcagaagcctgggaagaaacctgagagtgcaggtggtgaagagaaagtgcgagctgaccaacagcggcccctgcgccgagggcggcccaagcagcggcgcccctcctcccagcggcggcagcccagccggctccccaacctctaccgaggagggcacctctgagtccgccacccccgagagcggccctggcacctccaccgagcccagcgagggcagcgcacccggcagccctgccggcagccccacctccacagaggagggaaccagcaccgagcccagcgaaggcagcgccccaggcaccagcaccgagcctagtgagcaggagattaaacggatcaacaagatcagaagaagacttgtgaaagacagcaacaccaagaaggccggcaagacaggccccatgaaaaccctgctggttagagtgatgacacccgatctgagagagcggctggaaaacctgagaaagaagcctgaaaatatcccccagcccatcagcaatacatctagagccaacctgaataagctgctgaccgattacaccgaaatgaagaaggcgatcctgcatgtgtactgggaagagttccagaaggaccctgtgggcctgatgagccgggtggcccagcctgccagcaagaagatcgatcagaacaagctgaaacctgagatggacgagaagggcaacctgaccaccgccggctttgcctgctctcagtgtggccagcccctgttcgtgtacaagctggagcaggtgtctgagaagggcaaggcttacaccaactacttcggacggtgcaatgtggccgagcacgaaaagctgatcctgctggcccagctgaagcccgagaaggatagcgacgaagccgtgacatatagcctgggaaagtttgggcagagggccctggatttctacagcattcatgtgaccaaggagtccacccaccccgtgaagcccctggcccagatcgccggaaacagatacgcctccggacctgtgggaaaggccctgagcgacgcatgtatgggcacaatcgcctccttcctgtctaagtaccaggacatcatcatcgaacaccagaaggtggtgaagggcaaccagaagagactggagagcctgcgggagctggccggcaaggaaaacctggaataccctagcgtgaccctgccacctcagcctcacaccaaggagggcgttgatgcctacaacgaagtgatcgcccgggtgcgaatgtgggtgaacctgaacctgtggcagaagctgaagctaagcagagatgatgccaagcctctgctgagactgaagggattcccttcctttcctctggtcgagagacaggccaacgaagtggactggtgggacatggtgtgtaacgtgaagaagctgatcaacgagaaaaaggaggatggcaaggtgttttggcagaatctggctggctacaagagacaggaagccctgagaccatacctgagcagcgaggaagatcggaagaagggaaagaaattcgctcggtaccagctgggcgacctgctgctgcacctggaaaagaagcacggcgaggactggggaaaggtgtacgacgaggcctgggagcggattgacaagaaagtggaaggcctgagcaagcacatcaagctggaagaggaacggagaagcgaggacgcccagagcaaggccgccctgaccgactggctgcgggctaaggccagcttcgtgatcgagggcctgaaggaggccgacaaggacgagttctgcagatgcgagctgaagctgcagaagtggtacggggacctgcggggaaagcccttcgccatcgaagccgagaacagcatcctggacatcagcggcttcagcaagcagtacaactgtgccttcatctggcagaaggacggcgtgaagaagctgaacctgtacctgatcatcaactacttcaagggcggcaagctgcggttcaagaagatcaaacctgaagccttcgaagccaacagattctacaccgtgatcaacaaaaagagcggcgagatcgtgcccatggaggtgaacttcaacttcgacgaccccaacctgatcatcctgcctctggcctttggcaagagacagggcagagaattcatctggaacgacctgctgtccctggaaaccggcagcctgaagctggccaacggaagagtgatcgagaagacactgtacaacagaagaacccggcaggatgagcctgccctgttcgtggccctgaccttcgagcggcgggaggtcctggactcctccaatatcaaaccaatgaacctgatcggcgtggcaagaggcgaaaacatccccgccgtgatcgccctgaccgaccccgagggctgcccactgagccggtttaaggatagcctgggaaacccaacccacatcctgagaatcggcgagagctataaggagaagcagcggaccatccaggccaagaaggaggtggagcagcggagagccggcggctacagccggaagtacgccagcaaagccaagaatctggcagacgatatggtgagaaacaccgctagagatctgctgtactacgccgtgacccaggatgccatgctgatcttcgccaacctgagccggggcttcggccggcagggcaagcggaccttcatggccgagagacagtacacacggatggaggactggctgaccgccaagctggcctacgagggcctgagcaagacctacctgtccaagacactggcccagtacacctccaagacatgcagcaactgtgggtttaccatcaccagcgccgactacgacagggtgctggagaagctgaagaagacagcaacaggctggatgaccacaattaacggcaaggagctgaaggtggagggccagattacctactacaacagatacaagagacagaacgtagtcaaggacctgtccgtcgagctggatagactgagcgaagaatctgtgaacaacgacatctcctcctggacaaagggcagaagcggagaagctctgagcctcctgaagaaaagattctcccatagacccgtgcaggagaagttcgtgtgcctgaactgcggcttcgagacacacgcagccgagcaagccgccctgaacatcgccagatcctggctgttcctgcggagccaggagtacaagaaataccagacaaacaagacaaccggcaacaccgataagagagccttcgtcgagacctggcagtccttttaccggaagaagcttaaggaggtgtggaaacctgccgtgcggtctggcggatctggcggaggctccgaggagctggtgggccagaaccacggcatggagggcgaggcctgcaccggcggcgacgtgaccttcagcgacgtggccatcgacttcagccacgaggagtgggcctgcctggacaccgcccagagggacctgtacaaggacgtgatggtgcagaactacgagaacctggtgagcgtgggcctgagcgtgaccaagccctacgtgatcatgctgctggaggacggcaaggagccctggatgatgggcggcccaagcagcggcgcccctcctcccagcggcggcagcccagccggctccccaacctctaccgaggagggcacctctgagtccgccacccccgagagcggccctggcacctccaccgagcccagcgagggcagcgcacccggcagccctgccggcagccccacctccacagaggagggaaccagcaccgagcccagcgaaggcagcgccccaggcaccagcaccgagcctagtgagcaggagattaaacggatcaacaagatcagaagaagacttgtgaaagacagcaacaccaagaaggccggcaagacaggccccatgaaaaccctgctggttagagtgatgacacccgatctgagagagcggctggaaaacctgagaaagaagcctgaaaatatcccccagcccatcagcaatacatctagagccaacctgaataagctgctgaccgattacaccgaaatgaagaaggcgatcctgcatgtgtactgggaagagttccagaaggaccctgtgggcctgatgagccgggtggcccagcctgccagcaagaagatcgatcagaacaagctgaaacctgagatggacgagaagggcaacctgaccaccgccggctttgcctgctctcagtgtggccagcccctgttcgtgtacaagctggagcaggtgtctgagaagggcaaggcttacaccaactacttcggacggtgcaatgtggccgagcacgaaaagctgatcctgctggcccagctgaagcccgagaaggatagcgacgaagccgtgacatatagcctgggaaagtttgggcagagggccctggatttctacagcattcatgtgaccaaggagtccacccaccccgtgaagcccctggcccagatcgccggaaacagatacgcctccggacctgtgggaaaggccctgagcgacgcatgtatgggcacaatcgcctccttcctgtctaagtaccaggacatcatcatcgaacaccagaaggtggtgaagggcaaccagaagagactggagagcctgcgggagctggccggcaaggaaaacctggaataccctagcgtgaccctgccacctcagcctcacaccaaggagggcgttgatgcctacaacgaagtgatcgcccgggtgcgaatgtgggtgaacctgaacctgtggcagaagctgaagctaagcagagatgatgccaagcctctgctgagactgaagggattcccttcctttcctctggtcgagagacaggccaacgaagtggactggtgggacatggtgtgtaacgtgaagaagctgatcaacgagaaaaaggaggatggcaaggtgttttggcagaatctggctggctacaagagacaggaagccctgagaccatacctgagcagcgaggaagatcggaagaagggaaagaaattcgctcggtaccagctgggcgacctgctgctgcacctggaaaagaagcacggcgaggactggggaaaggtgtacgacgaggcctgggagcggattgacaagaaagtggaaggcctgagcaagcacatcaagctggaagaggaacggagaagcgaggacgcccagagcaaggccgccctgaccgactggctgcgggctaaggccagcttcgtgatcgagggcctgaaggaggccgacaaggacgagttctgcagatgcgagctgaagctgcagaagtggtacggggacctgcggggaaagcccttcgccatcgaagccgagaacagcatcctggacatcagcggcttcagcaagcagtacaactgtgccttcatctggcagaaggacggcgtgaagaagctgaacctgtacctgatcatcaactacttcaagggcggcaagctgcggttcaagaagatcaaacctgaagccttcgaagccaacagattctacaccgtgatcaacaaaaagagcggcgagatcgtgcccatggaggtgaacttcaacttcgacgaccccaacctgatcatcctgcctctggcctttggcaagagacagggcagagaattcatctggaacgacctgctgtccctggaaaccggcagcctgaagctggccaacggaagagtgatcgagaagacactgtacaacagaagaacccggcaggatgagcctgccctgttcgtggccctgaccttcgagcggcgggaggtcctggactcctccaatatcaaaccaatgaacctgatcggcgtggcaagaggcgaaaacatccccgccgtgatcgccctgaccgaccccgagggctgcccactgagccggtttaaggatagcctgggaaacccaacccacatcctgagaatcggcgagagctataaggagaagcagcggaccatccaggccaagaaggaggtggagcagcggagagccggcggctacagccggaagtacgccagcaaagccaagaatctggcagacgatatggtgagaaacaccgctagagatctgctgtactacgccgtgacccaggatgccatgctgatcttcgccaacctgagccggggcttcggccggcagggcaagcggaccttcatggccgagagacagtacacacggatggaggactggctgaccgccaagctggcctacgagggcctgagcaagacctacctgtccaagacactggcccagtacacctccaagacatgcagcaactgtgggtttaccatcaccagcgccgactacgacagggtgctggagaagctgaagaagacagcaacaggctggatgaccacaattaacggcaaggagctgaaggtggagggccagattacctactacaacagatacaagagacagaacgtagtcaaggacctgtccgtcgagctggatagactgagcgaagaatctgtgaacaacgacatctcctcctggacaaagggcagaagcggagaagctctgagcctcctgaagaaaagattctcccatagacccgtgcaggagaagttcgtgtgcctgaactgcggcttcgagacacacgcagccgagcaagccgccctgaacatcgccagatcctggctgttcctgcggagccaggagtacaagaaataccagacaaacaagacaaccggcaacaccgataagagagccttcgtcgagacctggcagtccttttaccggaagaagcttaaggaggtgtggaaacctgccgtgcggtctggcggatctggcggaggctcctgaggagctggtgggccagaaccacggcatggagggcgaggcctgcaccggcggcgacgtgaccttcagcgacgtggccatcgacttcagccacgaggagtgggcctgcctggacaccgcccagagggacctgtacaaggacgtgatggtgcagaactacgagaacctggtgagcgtgggcctgagcgtgaccaagccctacgtgatcatgctgctggaggacggcaaggagccctggatgatgggatctggctccggcagcggccccaagaaaaagagaaaagtctaagctgccttctgcggggcttgccttctggccatgcccttcttctctcccttgcacctgtacctcttggtctttgaataaagcctgagtaggaaggctagcaaaaaaaaaaaaaaaaaaaaaaaaaaaaaaaaaaaaaaaaaaaaaaaaaaaaaaaaaaaaaaaaaaaaaaaaaaaaaaaa

SEQ ID NO: 16545 - RNA, 9485 nt, synthetic construct
  source 1..9485: mol_type = other RNA
aggaaataagagagaaaagaagagtaagaagaaatataagagccaccatggcccctaagaagaagcgtaaagtgagccggatggaacgcctcgtctacgaggtgcggcagaagtgcagaaacatcgaggacatctgcatctcctgcggatctctgaacgtgaccctggagcacccactgttcatcggcggcatgtgccagaactgtaaaaactgttttctggagtgtgcctatcaatacgacgatgacggctaccagagctactgcaccatctgttgcggcggaagagaggtgctgatgtgtggaaataacaactgctgccggtgcttctgcgtggaatgcgtggacctgctggtgggccccggcgccgcccaggccgctattaaggaagatccttggaactgctacatgtgcggccacaagggcacatacggcctgctgagacggagagaggactggcctagcagactgcagatgttcttcgccaataaccacgaccaggagttcgacccccctaaggtgtaccctcccgtccccgccgagaagagaaagcccatccgggtcctgagcctgttcgatggcatcgccaccggtctgctggtgctgaaggacctgggcatccaggtggataggtacattgcctccgaggtgtgcgaggactccatcaccgtgggaatggtgcgtcatcagggcaagatcatgtacgtgggcgacgtgcggagcgtgacacagaagcatatccaggagtggggccctttcgacctggtgatcggcggcagcccttgcaatgacctgagcatcgtgaacccagcccggaagggcctgtacgagggaaccggcagactgttcttcgagttttacagactgctgcacgacgcccggcctaaggaaggcgacgaccggcccttcttttggctgttcgagaatgtggtggccatgggagtcagcgacaagcgggatattagccggttcctggagagcaaccccgtgatgatcgatgccaaggaagtgagcgccgcccaccgggccagatacttctggggcaatctgcctggcatgaacagacccctggccagcaccgtgaacgacaagctggagctgcaggagtgcctggagcacggccggatcgccaagttcagcaaggtgagaaccatcaccacccgaagcaacagcatcaaacaaggcaaggaccagcactttcctgtgttcatgaacgagaaggaggacatcctgtggtgtaccgagatggagagagtgttcgggttcccagtccactacacagatgtcagcaacatgtctagactggccagacagagactgctgggaagaagctggtccgtccctgtgatcagacacctgttcgcccctctgaaggagtacttcgcctgcgtgagcagcggcaacagcaacgccaacagccggggccccagcttctctagcggcctggtgccactgtccctgagagggagccacatgggccccatggagatctacaaaaccgtgagcgcctggaagcggcagcctgtgcgcgtgctgagcctgtttcggaatatcgataaagtcctgaaaagcctgggattcctggagagcggctctggctccggcggtggcaccctgaagtacgtggaggatgtgacaaacgtggtcagacgggatgtggagaagtggggccccttcgatctggtgtacggcagcacccaacccctgggcagctcttgtgaccggtgccctggctggtacatgtttcagttccaccggatcctgcagtacgccctgccgagacaggagtcccagcggccattcttttggattttcatggacaacttgctgctgaccgaggatgaccaggaaactaccactcggttcctgcagaccgaagccgtgaccctgcaggacgtgagaggccgggactaccagaacgccatgcgggtgtggtccaacatccctggactgaaaagcaagcacgcacctctgacccctaaagaagaggagtacctgcaggcccaggtgcggagcagaagcaagctggacgcccctaaggtggatctgctggtgaagaattgcctcctgcccctgagagagtacttcaagtatttcagccagaatagtctgcccctgggaggcagcggcggcggcgccctggtgacatttgaggacgtcgccgtgcggttcacccaggaggaatgggctctgctggatccttctcagaaaatcctgtaccgggacgtgatgagagagacataccggaatctgacctccgtgggcatcaactgggaatgttgggaccttgaagcctgcttcagaagcctgggaagaaacctgagagtgcaggtggtgaagagaaagtgcgagctgaccaacagcggcccctgcgccgagggcggcccaagcagcggcgcccctcctcccagcggcggcagcccagccggctccccaacctctaccgaggagggcacctctgagtccgccacccccgagagcggccctggcacctccaccgagcccagcgagggcagcgcacccggcagccctgccggcagccccacctccacagaggagggaaccagcaccgagcccagcgaaggcagcgccccaggcaccagcaccgagcctagtgagcaggagattaaacggatcaacaagatcagaagaagacttgtgaaagacagcaacaccaagaaggccggcaagacaggccccatgaaaaccctgctggttagagtgatgacacccgatctgagagagcggctggaaaacctgagaaagaagcctgaaaatatcccccagcccatcagcaatacatctagagccaacctgaataagctgctgaccgattacaccgaaatgaagaaggcgatcctgcatgtgtactgggaagagttccagaaggaccctgtgggcctgatgagccgggtggcccagcctgccagcaagaagatcgatcagaacaagctgaaacctgagatggacgagaagggcaacctgaccaccgccggctttgcctgctctcagtgtggccagcccctgttcgtgtacaagctggagcaggtgtctgagaagggcaaggcttacaccaactacttcggacggtgcaatgtggccgagcacgaaaagctgatcctgctggcccagctgaagcccgagaaggatagcgacgaagccgtgacatatagcctgggaaagtttgggcagagggccctggatttctacagcattcatgtgaccaaggagtccacccaccccgtgaagcccctggcccagatcgccggaaacagatacgcctccggacctgtgggaaaggccctgagcgacgcatgtatgggcacaatcgcctccttcctgtctaagtaccaggacatcatcatcgaacaccagaaggtggtgaagggcaaccagaagagactggagagcctgcgggagctggccggcaaggaaaacctggaataccctagcgtgaccctgccacctcagcctcacaccaaggagggcgttgatgcctacaacgaagtgatcgcccgggtgcgaatgtgggtgaacctgaacctgtggcagaagctgaagctaagcagagatgatgccaagcctctgctgagactgaagggattcccttcctttcctctggtcgagagacaggccaacgaagtggactggtgggacatggtgtgtaacgtgaagaagctgatcaacgagaaaaaggaggatggcaaggtgttttggcagaatctggctggctacaagagacaggaagccctgagaccatacctgagcagcgaggaagatcggaagaagggaaagaaattcgctcggtaccagctgggcgacctgctgctgcacctggaaaagaagcacggcgaggactggggaaaggtgtacgacgaggcctgggagcggattgacaagaaagtggaaggcctgagcaagcacatcaagctggaagaggaacggagaagcgaggacgcccagagcaaggccgccctgaccgactggctgcgggctaaggccagcttcgtgatcgagggcctgaaggaggccgacaaggacgagttctgcagatgcgagctgaagctgcagaagtggtacggggacctgcggggaaagcccttcgccatcgaagccgagaacagcatcctggacatcagcggcttcagcaagcagtacaactgtgccttcatctggcagaaggacggcgtgaagaagctgaacctgtacctgatcatcaactacttcaagggcggcaagctgcggttcaagaagatcaaacctgaagccttcgaagccaacagattctacaccgtgatcaacaaaaagagcggcgagatcgtgcccatggaggtgaacttcaacttcgacgaccccaacctgatcatcctgcctctggcctttggcaagagacagggcagagaattcatctggaacgacctgctgtccctggaaaccggcagcctgaagctggccaacggaagagtgatcgagaagacactgtacaacagaagaacccggcaggatgagcctgccctgttcgtggccctgaccttcgagcggcgggaggtcctggactcctccaatatcaaaccaatgaacctgatcggcgtggcaagaggcgaaaacatccccgccgtgatcgccctgaccgaccccgagggctgcccactgagccggtttaaggatagcctgggaaacccaacccacatcctgagaatcggcgagagctataaggagaagcagcggaccatccaggccaagaaggaggtggagcagcggagagccggcggctacagccggaagtacgccagcaaagccaagaatctggcagacgatatggtgagaaacaccgctagagatctgctgtactacgccgtgacccaggatgccatgctgatcttcgccaacctgagccggggcttcggccggcagggcaagcggaccttcatggccgagagacagtacacacggatggaggactggctgaccgccaagctggcctacgagggcctgagcaagacctacctgtccaagacactggcccagtacacctccaagacatgcagcaactgtgggtttaccatcaccagcgccgactacgacagggtgctggagaagctgaagaagacagcaacaggctggatgaccacaattaacggcaaggagctgaaggtggagggccagattacctactacaacagatacaagagacagaacgtagtcaaggacctgtccgtcgagctggatagactgagcgaagaatctgtgaacaacgacatctcctcctggacaaagggcagaagcggagaagctctgagcctcctgaagaaaagattctcccatagacccgtgcaggagaagttcgtgtgcctgaactgcggcttcgagacacacgcagccgagcaagccgccctgaacatcgccagatcctggctgttcctgcggagccaggagtacaagaaataccagacaaacaagacaaccggcaacaccgataagagagccttcgtcgagacctggcagtccttttaccggaagaagcttaaggaggtgtggaaacctgccgtgcggtctggcggatctggcggaggctccgcctgcgagagcatcaccttcggcgacgtggccatcgacttcagccaccaggagtgggagtacctgaacctggtgcagaagaccctgtaccaggaggtgatgatggagaactacgacaacctggtgagcctgggccacttcatcagcaagcccgacctgatcaccctgctggagcagggcaaggagccctggatgatcgtgggcgaggagaccaggggcgagtgcaccgacctggacagcaggggcggcccaagcagcggcgcccctcctcccagcggcggcagcccagccggctccccaacctctaccgaggagggcacctctgagtccgccacccccgagagcggccctggcacctccaccgagcccagcgagggcagcgcacccggcagccctgccggcagccccacctccacagaggagggaaccagcaccgagcccagcgaaggcagcgccccaggcaccagcaccgagcctagtgagcaggagattaaacggatcaacaagatcagaagaagacttgtgaaagacagcaacaccaagaaggccggcaagacaggccccatgaaaaccctgctggttagagtgatgacacccgatctgagagagcggctggaaaacctgagaaagaagcctgaaaatatcccccagcccatcagcaatacatctagagccaacctgaataagctgctgaccgattacaccgaaatgaagaaggcgatcctgcatgtgtactgggaagagttccagaaggaccctgtgggcctgatgagccgggtggcccagcctgccagcaagaagatcgatcagaacaagctgaaacctgagatggacgagaagggcaacctgaccaccgccggctttgcctgctctcagtgtggccagcccctgttcgtgtacaagctggagcaggtgtctgagaagggcaaggcttacaccaactacttcggacggtgcaatgtggccgagcacgaaaagctgatcctgctggcccagctgaagcccgagaaggatagcgacgaagccgtgacatatagcctgggaaagtttgggcagagggccctggatttctacagcattcatgtgaccaaggagtccacccaccccgtgaagcccctggcccagatcgccggaaacagatacgcctccggacctgtgggaaaggccctgagcgacgcatgtatgggcacaatcgcctccttcctgtctaagtaccaggacatcatcatcgaacaccagaaggtggtgaagggcaaccagaagagactggagagcctgcgggagctggccggcaaggaaaacctggaataccctagcgtgaccctgccacctcagcctcacaccaaggagggcgttgatgcctacaacgaagtgatcgcccgggtgcgaatgtgggtgaacctgaacctgtggcagaagctgaagctaagcagagatgatgccaagcctctgctgagactgaagggattcccttcctttcctctggtcgagagacaggccaacgaagtggactggtgggacatggtgtgtaacgtgaagaagctgatcaacgagaaaaaggaggatggcaaggtgttttggcagaatctggctggctacaagagacaggaagccctgagaccatacctgagcagcgaggaagatcggaagaagggaaagaaattcgctcggtaccagctgggcgacctgctgctgcacctggaaaagaagcacggcgaggactggggaaaggtgtacgacgaggcctgggagcggattgacaagaaagtggaaggcctgagcaagcacatcaagctggaagaggaacggagaagcgaggacgcccagagcaaggccgccctgaccgactggctgcgggctaaggccagcttcgtgatcgagggcctgaaggaggccgacaaggacgagttctgcagatgcgagctgaagctgcagaagtggtacggggacctgcggggaaagcccttcgccatcgaagccgagaacagcatcctggacatcagcggcttcagcaagcagtacaactgtgccttcatctggcagaaggacggcgtgaagaagctgaacctgtacctgatcatcaactacttcaagggcggcaagctgcggttcaagaagatcaaacctgaagccttcgaagccaacagattctacaccgtgatcaacaaaaagagcggcgagatcgtgcccatggaggtgaacttcaacttcgacgaccccaacctgatcatcctgcctctggcctttggcaagagacagggcagagaattcatctggaacgacctgctgtccctggaaaccggcagcctgaagctggccaacggaagagtgatcgagaagacactgtacaacagaagaacccggcaggatgagcctgccctgttcgtggccctgaccttcgagcggcgggaggtcctggactcctccaatatcaaaccaatgaacctgatcggcgtggcaagaggcgaaaacatccccgccgtgatcgccctgaccgaccccgagggctgcccactgagccggtttaaggatagcctgggaaacccaacccacatcctgagaatcggcgagagctataaggagaagcagcggaccatccaggccaagaaggaggtggagcagcggagagccggcggctacagccggaagtacgccagcaaagccaagaatctggcagacgatatggtgagaaacaccgctagagatctgctgtactacgccgtgacccaggatgccatgctgatcttcgccaacctgagccggggcttcggccggcagggcaagcggaccttcatggccgagagacagtacacacggatggaggactggctgaccgccaagctggcctacgagggcctgagcaagacctacctgtccaagacactggcccagtacacctccaagacatgcagcaactgtgggtttaccatcaccagcgccgactacgacagggtgctggagaagctgaagaagacagcaacaggctggatgaccacaattaacggcaaggagctgaaggtggagggccagattacctactacaacagatacaagagacagaacgtagtcaaggacctgtccgtcgagctggatagactgagcgaagaatctgtgaacaacgacatctcctcctggacaaagggcagaagcggagaagctctgagcctcctgaagaaaagattctcccatagacccgtgcaggagaagttcgtgtgcctgaactgcggcttcgagacacacgcagccgagcaagccgccctgaacatcgccagatcctggctgttcctgcggagccaggagtacaagaaataccagacaaacaagacaaccggcaacaccgataagagagccttcgtcgagacctggcagtccttttaccggaagaagcttaaggaggtgtggaaacctgccgtgcggtctggcggatctggcggaggctcctgcctgcgagagcatcaccttcggcgacgtggccatcgacttcagccaccaggagtgggagtacctgaacctggtgcagaagaccctgtaccaggaggtgatgatggagaactacgacaacctggtgagcctgggccacttcatcagcaagcccgacctgatcaccctgctggagcagggcaaggagccctggatgatcgtgggcgaggagaccaggggcgagtgcaccgacctggacagcaggggatctggctccggcagcggccccaagaaaaagagaaaagtctaagctgccttctgcggggcttgccttctggccatgcccttcttctctcccttgcacctgtacctcttggtctttgaataaagcctgagtaggaaggctagcaaaaaaaaaaaaaaaaaaaaaaaaaaaaaaaaaaaaaaaaaaaaaaaaaaaaaaaaaaaaaaaaaaaaaaaaaaaaaaaa

SEQ ID NO: 16546 - RNA, 9485 nt, synthetic construct
  source 1..9485: mol_type = other RNA
aggaaataagagagaaaagaagagtaagaagaaatataagagccaccatggcccctaagaagaagcgtaaagtgagccggatggaacgcctcgtctacgaggtgcggcagaagtgcagaaacatcgaggacatctgcatctcctgcggatctctgaacgtgaccctggagcacccactgttcatcggcggcatgtgccagaactgtaaaaactgttttctggagtgtgcctatcaatacgacgatgacggctaccagagctactgcaccatctgttgcggcggaagagaggtgctgatgtgtggaaataacaactgctgccggtgcttctgcgtggaatgcgtggacctgctggtgggccccggcgccgcccaggccgctattaaggaagatccttggaactgctacatgtgcggccacaagggcacatacggcctgctgagacggagagaggactggcctagcagactgcagatgttcttcgccaataaccacgaccaggagttcgacccccctaaggtgtaccctcccgtccccgccgagaagagaaagcccatccgggtcctgagcctgttcgatggcatcgccaccggtctgctggtgctgaaggacctgggcatccaggtggataggtacattgcctccgaggtgtgcgaggactccatcaccgtgggaatggtgcgtcatcagggcaagatcatgtacgtgggcgacgtgcggagcgtgacacagaagcatatccaggagtggggccctttcgacctggtgatcggcggcagcccttgcaatgacctgagcatcgtgaacccagcccggaagggcctgtacgagggaaccggcagactgttcttcgagttttacagactgctgcacgacgcccggcctaaggaaggcgacgaccggcccttcttttggctgttcgagaatgtggtggccatgggagtcagcgacaagcgggatattagccggttcctggagagcaaccccgtgatgatcgatgccaaggaagtgagcgccgcccaccgggccagatacttctggggcaatctgcctggcatgaacagacccctggccagcaccgtgaacgacaagctggagctgcaggagtgcctggagcacggccggatcgccaagttcagcaaggtgagaaccatcaccacccgaagcaacagcatcaaacaaggcaaggaccagcactttcctgtgttcatgaacgagaaggaggacatcctgtggtgtaccgagatggagagagtgttcgggttcccagtccactacacagatgtcagcaacatgtctagactggccagacagagactgctgggaagaagctggtccgtccctgtgatcagacacctgttcgcccctctgaaggagtacttcgcctgcgtgagcagcggcaacagcaacgccaacagccggggccccagcttctctagcggcctggtgccactgtccctgagagggagccacatgggccccatggagatctacaaaaccgtgagcgcctggaagcggcagcctgtgcgcgtgctgagcctgtttcggaatatcgataaagtcctgaaaagcctgggattcctggagagcggctctggctccggcggtggcaccctgaagtacgtggaggatgtgacaaacgtggtcagacgggatgtggagaagtggggccccttcgatctggtgtacggcagcacccaacccctgggcagctcttgtgaccggtgccctggctggtacatgtttcagttccaccggatcctgcagtacgccctgccgagacaggagtcccagcggccattcttttggattttcatggacaacttgctgctgaccgaggatgaccaggaaactaccactcggttcctgcagaccgaagccgtgaccctgcaggacgtgagaggccgggactaccagaacgccatgcgggtgtggtccaacatccctggactgaaaagcaagcacgcacctctgacccctaaagaagaggagtacctgcaggcccaggtgcggagcagaagcaagctggacgcccctaaggtggatctgctggtgaagaattgcctcctgcccctgagagagtacttcaagtatttcagccagaatagtctgcccctgggaggcagcggcggcggcgccctggtgacatttgaggacgtcgccgtgcggttcacccaggaggaatgggctctgctggatccttctcagaaaatcctgtaccgggacgtgatgagagagacataccggaatctgacctccgtgggcatcaactgggaatgttgggaccttgaagcctgcttcagaagcctgggaagaaacctgagagtgcaggtggtgaagagaaagtgcgagctgaccaacagcggcccctgcgccgagggcggcccaagcagcggcgcccctcctcccagcggcggcagcccagccggctccccaacctctaccgaggagggcacctctgagtccgccacccccgagagcggccctggcacctccaccgagcccagcgagggcagcgcacccggcagccctgccggcagccccacctccacagaggagggaaccagcaccgagcccagcgaaggcagcgccccaggcaccagcaccgagcctagtgagcaggagattaaacggatcaacaagatcagaagaagacttgtgaaagacagcaacaccaagaaggccggcaagacaggccccatgaaaaccctgctggttagagtgatgacacccgatctgagagagcggctggaaaacctgagaaagaagcctgaaaatatcccccagcccatcagcaatacatctagagccaacctgaataagctgctgaccgattacaccgaaatgaagaaggcgatcctgcatgtgtactgggaagagttccagaaggaccctgtgggcctgatgagccgggtggcccagcctgccagcaagaagatcgatcagaacaagctgaaacctgagatggacgagaagggcaacctgaccaccgccggctttgcctgctctcagtgtggccagcccctgttcgtgtacaagctggagcaggtgtctgagaagggcaaggcttacaccaactacttcggacggtgcaatgtggccgagcacgaaaagctgatcctgctggcccagctgaagcccgagaaggatagcgacgaagccgtgacatatagcctgggaaagtttgggcagagggccctggatttctacagcattcatgtgaccaaggagtccacccaccccgtgaagcccctggcccagatcgccggaaacagatacgcctccggacctgtgggaaaggccctgagcgacgcatgtatgggcacaatcgcctccttcctgtctaagtaccaggacatcatcatcgaacaccagaaggtggtgaagggcaaccagaagagactggagagcctgcgggagctggccggcaaggaaaacctggaataccctagcgtgaccctgccacctcagcctcacaccaaggagggcgttgatgcctacaacgaagtgatcgcccgggtgcgaatgtgggtgaacctgaacctgtggcagaagctgaagctaagcagagatgatgccaagcctctgctgagactgaagggattcccttcctttcctctggtcgagagacaggccaacgaagtggactggtgggacatggtgtgtaacgtgaagaagctgatcaacgagaaaaaggaggatggcaaggtgttttggcagaatctggctggctacaagagacaggaagccctgagaccatacctgagcagcgaggaagatcggaagaagggaaagaaattcgctcggtaccagctgggcgacctgctgctgcacctggaaaagaagcacggcgaggactggggaaaggtgtacgacgaggcctgggagcggattgacaagaaagtggaaggcctgagcaagcacatcaagctggaagaggaacggagaagcgaggacgcccagagcaaggccgccctgaccgactggctgcgggctaaggccagcttcgtgatcgagggcctgaaggaggccgacaaggacgagttctgcagatgcgagctgaagctgcagaagtggtacggggacctgcggggaaagcccttcgccatcgaagccgagaacagcatcctggacatcagcggcttcagcaagcagtacaactgtgccttcatctggcagaaggacggcgtgaagaagctgaacctgtacctgatcatcaactacttcaagggcggcaagctgcggttcaagaagatcaaacctgaagccttcgaagccaacagattctacaccgtgatcaacaaaaagagcggcgagatcgtgcccatggaggtgaacttcaacttcgacgaccccaacctgatcatcctgcctctggcctttggcaagagacagggcagagaattcatctggaacgacctgctgtccctggaaaccggcagcctgaagctggccaacggaagagtgatcgagaagacactgtacaacagaagaacccggcaggatgagcctgccctgttcgtggccctgaccttcgagcggcgggaggtcctggactcctccaatatcaaaccaatgaacctgatcggcgtggcaagaggcgaaaacatccccgccgtgatcgccctgaccgaccccgagggctgcccactgagccggtttaaggatagcctgggaaacccaacccacatcctgagaatcggcgagagctataaggagaagcagcggaccatccaggccaagaaggaggtggagcagcggagagccggcggctacagccggaagtacgccagcaaagccaagaatctggcagacgatatggtgagaaacaccgctagagatctgctgtactacgccgtgacccaggatgccatgctgatcttcgccaacctgagccggggcttcggccggcagggcaagcggaccttcatggccgagagacagtacacacggatggaggactggctgaccgccaagctggcctacgagggcctgagcaagacctacctgtccaagacactggcccagtacacctccaagacatgcagcaactgtgggtttaccatcaccagcgccgactacgacagggtgctggagaagctgaagaagacagcaacaggctggatgaccacaattaacggcaaggagctgaaggtggagggccagattacctactacaacagatacaagagacagaacgtagtcaaggacctgtccgtcgagctggatagactgagcgaagaatctgtgaacaacgacatctcctcctggacaaagggcagaagcggagaagctctgagcctcctgaagaaaagattctcccatagacccgtgcaggagaagttcgtgtgcctgaactgcggcttcgagacacacgcagccgagcaagccgccctgaacatcgccagatcctggctgttcctgcggagccaggagtacaagaaataccagacaaacaagacaaccggcaacaccgataagagagccttcgtcgagacctggcagtccttttaccggaagaagcttaaggaggtgtggaaacctgccgtgcggtctggcggatctggcggaggctccagccaggtgagcctgaccttcagggacgtggccgtggacttcagccaggaggagtggggcctgctggagcccgcccagaaggacatgtacagggacgtgatgctggagaactacgagaacttcctgagcctgggcctgcccatcagcaagcccaacatgatcagccagctgaagaggagggaggcccccagctggatcgccgagggcaaggtgagcctgagcacctacctgggcaccctgaggggcggcccaagcagcggcgcccctcctcccagcggcggcagcccagccggctccccaacctctaccgaggagggcacctctgagtccgccacccccgagagcggccctggcacctccaccgagcccagcgagggcagcgcacccggcagccctgccggcagccccacctccacagaggagggaaccagcaccgagcccagcgaaggcagcgccccaggcaccagcaccgagcctagtgagcaggagattaaacggatcaacaagatcagaagaagacttgtgaaagacagcaacaccaagaaggccggcaagacaggccccatgaaaaccctgctggttagagtgatgacacccgatctgagagagcggctggaaaacctgagaaagaagcctgaaaatatcccccagcccatcagcaatacatctagagccaacctgaataagctgctgaccgattacaccgaaatgaagaaggcgatcctgcatgtgtactgggaagagttccagaaggaccctgtgggcctgatgagccgggtggcccagcctgccagcaagaagatcgatcagaacaagctgaaacctgagatggacgagaagggcaacctgaccaccgccggctttgcctgctctcagtgtggccagcccctgttcgtgtacaagctggagcaggtgtctgagaagggcaaggcttacaccaactacttcggacggtgcaatgtggccgagcacgaaaagctgatcctgctggcccagctgaagcccgagaaggatagcgacgaagccgtgacatatagcctgggaaagtttgggcagagggccctggatttctacagcattcatgtgaccaaggagtccacccaccccgtgaagcccctggcccagatcgccggaaacagatacgcctccggacctgtgggaaaggccctgagcgacgcatgtatgggcacaatcgcctccttcctgtctaagtaccaggacatcatcatcgaacaccagaaggtggtgaagggcaaccagaagagactggagagcctgcgggagctggccggcaaggaaaacctggaataccctagcgtgaccctgccacctcagcctcacaccaaggagggcgttgatgcctacaacgaagtgatcgcccgggtgcgaatgtgggtgaacctgaacctgtggcagaagctgaagctaagcagagatgatgccaagcctctgctgagactgaagggattcccttcctttcctctggtcgagagacaggccaacgaagtggactggtgggacatggtgtgtaacgtgaagaagctgatcaacgagaaaaaggaggatggcaaggtgttttggcagaatctggctggctacaagagacaggaagccctgagaccatacctgagcagcgaggaagatcggaagaagggaaagaaattcgctcggtaccagctgggcgacctgctgctgcacctggaaaagaagcacggcgaggactggggaaaggtgtacgacgaggcctgggagcggattgacaagaaagtggaaggcctgagcaagcacatcaagctggaagaggaacggagaagcgaggacgcccagagcaaggccgccctgaccgactggctgcgggctaaggccagcttcgtgatcgagggcctgaaggaggccgacaaggacgagttctgcagatgcgagctgaagctgcagaagtggtacggggacctgcggggaaagcccttcgccatcgaagccgagaacagcatcctggacatcagcggcttcagcaagcagtacaactgtgccttcatctggcagaaggacggcgtgaagaagctgaacctgtacctgatcatcaactacttcaagggcggcaagctgcggttcaagaagatcaaacctgaagccttcgaagccaacagattctacaccgtgatcaacaaaaagagcggcgagatcgtgcccatggaggtgaacttcaacttcgacgaccccaacctgatcatcctgcctctggcctttggcaagagacagggcagagaattcatctggaacgacctgctgtccctggaaaccggcagcctgaagctggccaacggaagagtgatcgagaagacactgtacaacagaagaacccggcaggatgagcctgccctgttcgtggccctgaccttcgagcggcgggaggtcctggactcctccaatatcaaaccaatgaacctgatcggcgtggcaagaggcgaaaacatccccgccgtgatcgccctgaccgaccccgagggctgcccactgagccggtttaaggatagcctgggaaacccaacccacatcctgagaatcggcgagagctataaggagaagcagcggaccatccaggccaagaaggaggtggagcagcggagagccggcggctacagccggaagtacgccagcaaagccaagaatctggcagacgatatggtgagaaacaccgctagagatctgctgtactacgccgtgacccaggatgccatgctgatcttcgccaacctgagccggggcttcggccggcagggcaagcggaccttcatggccgagagacagtacacacggatggaggactggctgaccgccaagctggcctacgagggcctgagcaagacctacctgtccaagacactggcccagtacacctccaagacatgcagcaactgtgggtttaccatcaccagcgccgactacgacagggtgctggagaagctgaagaagacagcaacaggctggatgaccacaattaacggcaaggagctgaaggtggagggccagattacctactacaacagatacaagagacagaacgtagtcaaggacctgtccgtcgagctggatagactgagcgaagaatctgtgaacaacgacatctcctcctggacaaagggcagaagcggagaagctctgagcctcctgaagaaaagattctcccatagacccgtgcaggagaagttcgtgtgcctgaactgcggcttcgagacacacgcagccgagcaagccgccctgaacatcgccagatcctggctgttcctgcggagccaggagtacaagaaataccagacaaacaagacaaccggcaacaccgataagagagccttcgtcgagacctggcagtccttttaccggaagaagcttaaggaggtgtggaaacctgccgtgcggtctggcggatctggcggaggctcctagccaggtgagcctgaccttcagggacgtggccgtggacttcagccaggaggagtggggcctgctggagcccgcccagaaggacatgtacagggacgtgatgctggagaactacgagaacttcctgagcctgggcctgcccatcagcaagcccaacatgatcagccagctgaagaggagggaggcccccagctggatcgccgagggcaaggtgagcctgagcacctacctgggcaccctgaggggatctggctccggcagcggccccaagaaaaagagaaaagtctaagctgccttctgcggggcttgccttctggccatgcccttcttctctcccttgcacctgtacctcttggtctttgaataaagcctgagtaggaaggctagcaaaaaaaaaaaaaaaaaaaaaaaaaaaaaaaaaaaaaaaaaaaaaaaaaaaaaaaaaaaaaaaaaaaaaaaaaaaaaaaa

SEQ ID NO: 16547 - RNA, 9485 nt, synthetic construct
  source 1..9485: mol_type = other RNA
aggaaataagagagaaaagaagagtaagaagaaatataagagccaccatggcccctaagaagaagcgtaaagtgagccggatggaacgcctcgtctacgaggtgcggcagaagtgcagaaacatcgaggacatctgcatctcctgcggatctctgaacgtgaccctggagcacccactgttcatcggcggcatgtgccagaactgtaaaaactgttttctggagtgtgcctatcaatacgacgatgacggctaccagagctactgcaccatctgttgcggcggaagagaggtgctgatgtgtggaaataacaactgctgccggtgcttctgcgtggaatgcgtggacctgctggtgggccccggcgccgcccaggccgctattaaggaagatccttggaactgctacatgtgcggccacaagggcacatacggcctgctgagacggagagaggactggcctagcagactgcagatgttcttcgccaataaccacgaccaggagttcgacccccctaaggtgtaccctcccgtccccgccgagaagagaaagcccatccgggtcctgagcctgttcgatggcatcgccaccggtctgctggtgctgaaggacctgggcatccaggtggataggtacattgcctccgaggtgtgcgaggactccatcaccgtgggaatggtgcgtcatcagggcaagatcatgtacgtgggcgacgtgcggagcgtgacacagaagcatatccaggagtggggccctttcgacctggtgatcggcggcagcccttgcaatgacctgagcatcgtgaacccagcccggaagggcctgtacgagggaaccggcagactgttcttcgagttttacagactgctgcacgacgcccggcctaaggaaggcgacgaccggcccttcttttggctgttcgagaatgtggtggccatgggagtcagcgacaagcgggatattagccggttcctggagagcaaccccgtgatgatcgatgccaaggaagtgagcgccgcccaccgggccagatacttctggggcaatctgcctggcatgaacagacccctggccagcaccgtgaacgacaagctggagctgcaggagtgcctggagcacggccggatcgccaagttcagcaaggtgagaaccatcaccacccgaagcaacagcatcaaacaaggcaaggaccagcactttcctgtgttcatgaacgagaaggaggacatcctgtggtgtaccgagatggagagagtgttcgggttcccagtccactacacagatgtcagcaacatgtctagactggccagacagagactgctgggaagaagctggtccgtccctgtgatcagacacctgttcgcccctctgaaggagtacttcgcctgcgtgagcagcggcaacagcaacgccaacagccggggccccagcttctctagcggcctggtgccactgtccctgagagggagccacatgggccccatggagatctacaaaaccgtgagcgcctggaagcggcagcctgtgcgcgtgctgagcctgtttcggaatatcgataaagtcctgaaaagcctgggattcctggagagcggctctggctccggcggtggcaccctgaagtacgtggaggatgtgacaaacgtggtcagacgggatgtggagaagtggggccccttcgatctggtgtacggcagcacccaacccctgggcagctcttgtgaccggtgccctggctggtacatgtttcagttccaccggatcctgcagtacgccctgccgagacaggagtcccagcggccattcttttggattttcatggacaacttgctgctgaccgaggatgaccaggaaactaccactcggttcctgcagaccgaagccgtgaccctgcaggacgtgagaggccgggactaccagaacgccatgcgggtgtggtccaacatccctggactgaaaagcaagcacgcacctctgacccctaaagaagaggagtacctgcaggcccaggtgcggagcagaagcaagctggacgcccctaaggtggatctgctggtgaagaattgcctcctgcccctgagagagtacttcaagtatttcagccagaatagtctgcccctgggaggcagcggcggcggcgccctggtgacatttgaggacgtcgccgtgcggttcacccaggaggaatgggctctgctggatccttctcagaaaatcctgtaccgggacgtgatgagagagacataccggaatctgacctccgtgggcatcaactgggaatgttgggaccttgaagcctgcttcagaagcctgggaagaaacctgagagtgcaggtggtgaagagaaagtgcgagctgaccaacagcggcccctgcgccgagggcggcccaagcagcggcgcccctcctcccagcggcggcagcccagccggctccccaacctctaccgaggagggcacctctgagtccgccacccccgagagcggccctggcacctccaccgagcccagcgagggcagcgcacccggcagccctgccggcagccccacctccacagaggagggaaccagcaccgagcccagcgaaggcagcgccccaggcaccagcaccgagcctagtgagcaggagattaaacggatcaacaagatcagaagaagacttgtgaaagacagcaacaccaagaaggccggcaagacaggccccatgaaaaccctgctggttagagtgatgacacccgatctgagagagcggctggaaaacctgagaaagaagcctgaaaatatcccccagcccatcagcaatacatctagagccaacctgaataagctgctgaccgattacaccgaaatgaagaaggcgatcctgcatgtgtactgggaagagttccagaaggaccctgtgggcctgatgagccgggtggcccagcctgccagcaagaagatcgatcagaacaagctgaaacctgagatggacgagaagggcaacctgaccaccgccggctttgcctgctctcagtgtggccagcccctgttcgtgtacaagctggagcaggtgtctgagaagggcaaggcttacaccaactacttcggacggtgcaatgtggccgagcacgaaaagctgatcctgctggcccagctgaagcccgagaaggatagcgacgaagccgtgacatatagcctgggaaagtttgggcagagggccctggatttctacagcattcatgtgaccaaggagtccacccaccccgtgaagcccctggcccagatcgccggaaacagatacgcctccggacctgtgggaaaggccctgagcgacgcatgtatgggcacaatcgcctccttcctgtctaagtaccaggacatcatcatcgaacaccagaaggtggtgaagggcaaccagaagagactggagagcctgcgggagctggccggcaaggaaaacctggaataccctagcgtgaccctgccacctcagcctcacaccaaggagggcgttgatgcctacaacgaagtgatcgcccgggtgcgaatgtgggtgaacctgaacctgtggcagaagctgaagctaagcagagatgatgccaagcctctgctgagactgaagggattcccttcctttcctctggtcgagagacaggccaacgaagtggactggtgggacatggtgtgtaacgtgaagaagctgatcaacgagaaaaaggaggatggcaaggtgttttggcagaatctggctggctacaagagacaggaagccctgagaccatacctgagcagcgaggaagatcggaagaagggaaagaaattcgctcggtaccagctgggcgacctgctgctgcacctggaaaagaagcacggcgaggactggggaaaggtgtacgacgaggcctgggagcggattgacaagaaagtggaaggcctgagcaagcacatcaagctggaagaggaacggagaagcgaggacgcccagagcaaggccgccctgaccgactggctgcgggctaaggccagcttcgtgatcgagggcctgaaggaggccgacaaggacgagttctgcagatgcgagctgaagctgcagaagtggtacggggacctgcggggaaagcccttcgccatcgaagccgagaacagcatcctggacatcagcggcttcagcaagcagtacaactgtgccttcatctggcagaaggacggcgtgaagaagctgaacctgtacctgatcatcaactacttcaagggcggcaagctgcggttcaagaagatcaaacctgaagccttcgaagccaacagattctacaccgtgatcaacaaaaagagcggcgagatcgtgcccatggaggtgaacttcaacttcgacgaccccaacctgatcatcctgcctctggcctttggcaagagacagggcagagaattcatctggaacgacctgctgtccctggaaaccggcagcctgaagctggccaacggaagagtgatcgagaagacactgtacaacagaagaacccggcaggatgagcctgccctgttcgtggccctgaccttcgagcggcgggaggtcctggactcctccaatatcaaaccaatgaacctgatcggcgtggcaagaggcgaaaacatccccgccgtgatcgccctgaccgaccccgagggctgcccactgagccggtttaaggatagcctgggaaacccaacccacatcctgagaatcggcgagagctataaggagaagcagcggaccatccaggccaagaaggaggtggagcagcggagagccggcggctacagccggaagtacgccagcaaagccaagaatctggcagacgatatggtgagaaacaccgctagagatctgctgtactacgccgtgacccaggatgccatgctgatcttcgccaacctgagccggggcttcggccggcagggcaagcggaccttcatggccgagagacagtacacacggatggaggactggctgaccgccaagctggcctacgagggcctgagcaagacctacctgtccaagacactggcccagtacacctccaagacatgcagcaactgtgggtttaccatcaccagcgccgactacgacagggtgctggagaagctgaagaagacagcaacaggctggatgaccacaattaacggcaaggagctgaaggtggagggccagattacctactacaacagatacaagagacagaacgtagtcaaggacctgtccgtcgagctggatagactgagcgaagaatctgtgaacaacgacatctcctcctggacaaagggcagaagcggagaagctctgagcctcctgaagaaaagattctcccatagacccgtgcaggagaagttcgtgtgcctgaactgcggcttcgagacacacgcagccgagcaagccgccctgaacatcgccagatcctggctgttcctgcggagccaggagtacaagaaataccagacaaacaagacaaccggcaacaccgataagagagccttcgtcgagacctggcagtccttttaccggaagaagcttaaggaggtgtggaaacctgccgtgcggtctggcggatctggcggaggctcctacaaggagagcgtgatgttcagggacgtggccgtggacttcagccaggaggagtgggagtgcctggaccccgcccagagggacctgtacagggacgtgatgctggagaactacagcaacctgctgagcatgggcctgtacatccccaagccccaggtgatcagcctgctggagcagggcaaggagccctggatggtgggcagggagctgaccaggggcctgtgcagcgacctggagagcatgggcggcccaagcagcggcgcccctcctcccagcggcggcagcccagccggctccccaacctctaccgaggagggcacctctgagtccgccacccccgagagcggccctggcacctccaccgagcccagcgagggcagcgcacccggcagccctgccggcagccccacctccacagaggagggaaccagcaccgagcccagcgaaggcagcgccccaggcaccagcaccgagcctagtgagcaggagattaaacggatcaacaagatcagaagaagacttgtgaaagacagcaacaccaagaaggccggcaagacaggccccatgaaaaccctgctggttagagtgatgacacccgatctgagagagcggctggaaaacctgagaaagaagcctgaaaatatcccccagcccatcagcaatacatctagagccaacctgaataagctgctgaccgattacaccgaaatgaagaaggcgatcctgcatgtgtactgggaagagttccagaaggaccctgtgggcctgatgagccgggtggcccagcctgccagcaagaagatcgatcagaacaagctgaaacctgagatggacgagaagggcaacctgaccaccgccggctttgcctgctctcagtgtggccagcccctgttcgtgtacaagctggagcaggtgtctgagaagggcaaggcttacaccaactacttcggacggtgcaatgtggccgagcacgaaaagctgatcctgctggcccagctgaagcccgagaaggatagcgacgaagccgtgacatatagcctgggaaagtttgggcagagggccctggatttctacagcattcatgtgaccaaggagtccacccaccccgtgaagcccctggcccagatcgccggaaacagatacgcctccggacctgtgggaaaggccctgagcgacgcatgtatgggcacaatcgcctccttcctgtctaagtaccaggacatcatcatcgaacaccagaaggtggtgaagggcaaccagaagagactggagagcctgcgggagctggccggcaaggaaaacctggaataccctagcgtgaccctgccacctcagcctcacaccaaggagggcgttgatgcctacaacgaagtgatcgcccgggtgcgaatgtgggtgaacctgaacctgtggcagaagctgaagctaagcagagatgatgccaagcctctgctgagactgaagggattcccttcctttcctctggtcgagagacaggccaacgaagtggactggtgggacatggtgtgtaacgtgaagaagctgatcaacgagaaaaaggaggatggcaaggtgttttggcagaatctggctggctacaagagacaggaagccctgagaccatacctgagcagcgaggaagatcggaagaagggaaagaaattcgctcggtaccagctgggcgacctgctgctgcacctggaaaagaagcacggcgaggactggggaaaggtgtacgacgaggcctgggagcggattgacaagaaagtggaaggcctgagcaagcacatcaagctggaagaggaacggagaagcgaggacgcccagagcaaggccgccctgaccgactggctgcgggctaaggccagcttcgtgatcgagggcctgaaggaggccgacaaggacgagttctgcagatgcgagctgaagctgcagaagtggtacggggacctgcggggaaagcccttcgccatcgaagccgagaacagcatcctggacatcagcggcttcagcaagcagtacaactgtgccttcatctggcagaaggacggcgtgaagaagctgaacctgtacctgatcatcaactacttcaagggcggcaagctgcggttcaagaagatcaaacctgaagccttcgaagccaacagattctacaccgtgatcaacaaaaagagcggcgagatcgtgcccatggaggtgaacttcaacttcgacgaccccaacctgatcatcctgcctctggcctttggcaagagacagggcagagaattcatctggaacgacctgctgtccctggaaaccggcagcctgaagctggccaacggaagagtgatcgagaagacactgtacaacagaagaacccggcaggatgagcctgccctgttcgtggccctgaccttcgagcggcgggaggtcctggactcctccaatatcaaaccaatgaacctgatcggcgtggcaagaggcgaaaacatccccgccgtgatcgccctgaccgaccccgagggctgcccactgagccggtttaaggatagcctgggaaacccaacccacatcctgagaatcggcgagagctataaggagaagcagcggaccatccaggccaagaaggaggtggagcagcggagagccggcggctacagccggaagtacgccagcaaagccaagaatctggcagacgatatggtgagaaacaccgctagagatctgctgtactacgccgtgacccaggatgccatgctgatcttcgccaacctgagccggggcttcggccggcagggcaagcggaccttcatggccgagagacagtacacacggatggaggactggctgaccgccaagctggcctacgagggcctgagcaagacctacctgtccaagacactggcccagtacacctccaagacatgcagcaactgtgggtttaccatcaccagcgccgactacgacagggtgctggagaagctgaagaagacagcaacaggctggatgaccacaattaacggcaaggagctgaaggtggagggccagattacctactacaacagatacaagagacagaacgtagtcaaggacctgtccgtcgagctggatagactgagcgaagaatctgtgaacaacgacatctcctcctggacaaagggcagaagcggagaagctctgagcctcctgaagaaaagattctcccatagacccgtgcaggagaagttcgtgtgcctgaactgcggcttcgagacacacgcagccgagcaagccgccctgaacatcgccagatcctggctgttcctgcggagccaggagtacaagaaataccagacaaacaagacaaccggcaacaccgataagagagccttcgtcgagacctggcagtccttttaccggaagaagcttaaggaggtgtggaaacctgccgtgcggtctggcggatctggcggaggctccttacaaggagagcgtgatgttcagggacgtggccgtggacttcagccaggaggagtgggagtgcctggaccccgcccagagggacctgtacagggacgtgatgctggagaactacagcaacctgctgagcatgggcctgtacatccccaagccccaggtgatcagcctgctggagcagggcaaggagccctggatggtgggcagggagctgaccaggggcctgtgcagcgacctggagagcatgggatctggctccggcagcggccccaagaaaaagagaaaagtctaagctgccttctgcggggcttgccttctggccatgcccttcttctctcccttgcacctgtacctcttggtctttgaataaagcctgagtaggaaggctagcaaaaaaaaaaaaaaaaaaaaaaaaaaaaaaaaaaaaaaaaaaaaaaaaaaaaaaaaaaaaaaaaaaaaaaaaaaaaaaaa

SEQ ID NO: 16548 - RNA, 9485 nt, synthetic construct
  source 1..9485: mol_type = other RNA
aggaaataagagagaaaagaagagtaagaagaaatataagagccaccatggcccctaagaagaagcgtaaagtgagccggatggaacgcctcgtctacgaggtgcggcagaagtgcagaaacatcgaggacatctgcatctcctgcggatctctgaacgtgaccctggagcacccactgttcatcggcggcatgtgccagaactgtaaaaactgttttctggagtgtgcctatcaatacgacgatgacggctaccagagctactgcaccatctgttgcggcggaagagaggtgctgatgtgtggaaataacaactgctgccggtgcttctgcgtggaatgcgtggacctgctggtgggccccggcgccgcccaggccgctattaaggaagatccttggaactgctacatgtgcggccacaagggcacatacggcctgctgagacggagagaggactggcctagcagactgcagatgttcttcgccaataaccacgaccaggagttcgacccccctaaggtgtaccctcccgtccccgccgagaagagaaagcccatccgggtcctgagcctgttcgatggcatcgccaccggtctgctggtgctgaaggacctgggcatccaggtggataggtacattgcctccgaggtgtgcgaggactccatcaccgtgggaatggtgcgtcatcagggcaagatcatgtacgtgggcgacgtgcggagcgtgacacagaagcatatccaggagtggggccctttcgacctggtgatcggcggcagcccttgcaatgacctgagcatcgtgaacccagcccggaagggcctgtacgagggaaccggcagactgttcttcgagttttacagactgctgcacgacgcccggcctaaggaaggcgacgaccggcccttcttttggctgttcgagaatgtggtggccatgggagtcagcgacaagcgggatattagccggttcctggagagcaaccccgtgatgatcgatgccaaggaagtgagcgccgcccaccgggccagatacttctggggcaatctgcctggcatgaacagacccctggccagcaccgtgaacgacaagctggagctgcaggagtgcctggagcacggccggatcgccaagttcagcaaggtgagaaccatcaccacccgaagcaacagcatcaaacaaggcaaggaccagcactttcctgtgttcatgaacgagaaggaggacatcctgtggtgtaccgagatggagagagtgttcgggttcccagtccactacacagatgtcagcaacatgtctagactggccagacagagactgctgggaagaagctggtccgtccctgtgatcagacacctgttcgcccctctgaaggagtacttcgcctgcgtgagcagcggcaacagcaacgccaacagccggggccccagcttctctagcggcctggtgccactgtccctgagagggagccacatgggccccatggagatctacaaaaccgtgagcgcctggaagcggcagcctgtgcgcgtgctgagcctgtttcggaatatcgataaagtcctgaaaagcctgggattcctggagagcggctctggctccggcggtggcaccctgaagtacgtggaggatgtgacaaacgtggtcagacgggatgtggagaagtggggccccttcgatctggtgtacggcagcacccaacccctgggcagctcttgtgaccggtgccctggctggtacatgtttcagttccaccggatcctgcagtacgccctgccgagacaggagtcccagcggccattcttttggattttcatggacaacttgctgctgaccgaggatgaccaggaaactaccactcggttcctgcagaccgaagccgtgaccctgcaggacgtgagaggccgggactaccagaacgccatgcgggtgtggtccaacatccctggactgaaaagcaagcacgcacctctgacccctaaagaagaggagtacctgcaggcccaggtgcggagcagaagcaagctggacgcccctaaggtggatctgctggtgaagaattgcctcctgcccctgagagagtacttcaagtatttcagccagaatagtctgcccctgggaggcagcggcggcggcgccctggtgacatttgaggacgtcgccgtgcggttcacccaggaggaatgggctctgctggatccttctcagaaaatcctgtaccgggacgtgatgagagagacataccggaatctgacctccgtgggcatcaactgggaatgttgggaccttgaagcctgcttcagaagcctgggaagaaacctgagagtgcaggtggtgaagagaaagtgcgagctgaccaacagcggcccctgcgccgagggcggcccaagcagcggcgcccctcctcccagcggcggcagcccagccggctccccaacctctaccgaggagggcacctctgagtccgccacccccgagagcggccctggcacctccaccgagcccagcgagggcagcgcacccggcagccctgccggcagccccacctccacagaggagggaaccagcaccgagcccagcgaaggcagcgccccaggcaccagcaccgagcctagtgagcaggagattaaacggatcaacaagatcagaagaagacttgtgaaagacagcaacaccaagaaggccggcaagacaggccccatgaaaaccctgctggttagagtgatgacacccgatctgagagagcggctggaaaacctgagaaagaagcctgaaaatatcccccagcccatcagcaatacatctagagccaacctgaataagctgctgaccgattacaccgaaatgaagaaggcgatcctgcatgtgtactgggaagagttccagaaggaccctgtgggcctgatgagccgggtggcccagcctgccagcaagaagatcgatcagaacaagctgaaacctgagatggacgagaagggcaacctgaccaccgccggctttgcctgctctcagtgtggccagcccctgttcgtgtacaagctggagcaggtgtctgagaagggcaaggcttacaccaactacttcggacggtgcaatgtggccgagcacgaaaagctgatcctgctggcccagctgaagcccgagaaggatagcgacgaagccgtgacatatagcctgggaaagtttgggcagagggccctggatttctacagcattcatgtgaccaaggagtccacccaccccgtgaagcccctggcccagatcgccggaaacagatacgcctccggacctgtgggaaaggccctgagcgacgcatgtatgggcacaatcgcctccttcctgtctaagtaccaggacatcatcatcgaacaccagaaggtggtgaagggcaaccagaagagactggagagcctgcgggagctggccggcaaggaaaacctggaataccctagcgtgaccctgccacctcagcctcacaccaaggagggcgttgatgcctacaacgaagtgatcgcccgggtgcgaatgtgggtgaacctgaacctgtggcagaagctgaagctaagcagagatgatgccaagcctctgctgagactgaagggattcccttcctttcctctggtcgagagacaggccaacgaagtggactggtgggacatggtgtgtaacgtgaagaagctgatcaacgagaaaaaggaggatggcaaggtgttttggcagaatctggctggctacaagagacaggaagccctgagaccatacctgagcagcgaggaagatcggaagaagggaaagaaattcgctcggtaccagctgggcgacctgctgctgcacctggaaaagaagcacggcgaggactggggaaaggtgtacgacgaggcctgggagcggattgacaagaaagtggaaggcctgagcaagcacatcaagctggaagaggaacggagaagcgaggacgcccagagcaaggccgccctgaccgactggctgcgggctaaggccagcttcgtgatcgagggcctgaaggaggccgacaaggacgagttctgcagatgcgagctgaagctgcagaagtggtacggggacctgcggggaaagcccttcgccatcgaagccgagaacagcatcctggacatcagcggcttcagcaagcagtacaactgtgccttcatctggcagaaggacggcgtgaagaagctgaacctgtacctgatcatcaactacttcaagggcggcaagctgcggttcaagaagatcaaacctgaagccttcgaagccaacagattctacaccgtgatcaacaaaaagagcggcgagatcgtgcccatggaggtgaacttcaacttcgacgaccccaacctgatcatcctgcctctggcctttggcaagagacagggcagagaattcatctggaacgacctgctgtccctggaaaccggcagcctgaagctggccaacggaagagtgatcgagaagacactgtacaacagaagaacccggcaggatgagcctgccctgttcgtggccctgaccttcgagcggcgggaggtcctggactcctccaatatcaaaccaatgaacctgatcggcgtggcaagaggcgaaaacatccccgccgtgatcgccctgaccgaccccgagggctgcccactgagccggtttaaggatagcctgggaaacccaacccacatcctgagaatcggcgagagctataaggagaagcagcggaccatccaggccaagaaggaggtggagcagcggagagccggcggctacagccggaagtacgccagcaaagccaagaatctggcagacgatatggtgagaaacaccgctagagatctgctgtactacgccgtgacccaggatgccatgctgatcttcgccaacctgagccggggcttcggccggcagggcaagcggaccttcatggccgagagacagtacacacggatggaggactggctgaccgccaagctggcctacgagggcctgagcaagacctacctgtccaagacactggcccagtacacctccaagacatgcagcaactgtgggtttaccatcaccagcgccgactacgacagggtgctggagaagctgaagaagacagcaacaggctggatgaccacaattaacggcaaggagctgaaggtggagggccagattacctactacaacagatacaagagacagaacgtagtcaaggacctgtccgtcgagctggatagactgagcgaagaatctgtgaacaacgacatctcctcctggacaaagggcagaagcggagaagctctgagcctcctgaagaaaagattctcccatagacccgtgcaggagaagttcgtgtgcctgaactgcggcttcgagacacacgcagccgagcaagccgccctgaacatcgccagatcctggctgttcctgcggagccaggagtacaagaaataccagacaaacaagacaaccggcaacaccgataagagagccttcgtcgagacctggcagtccttttaccggaagaagcttaaggaggtgtggaaacctgccgtgcggtctggcggatctggcggaggctccgcccagatgcaggtgaccttcgaggacatcgccgtgttcttctgccacgaggagtggaagtacctggacgacggccagaaggagctgtacaaggaggtgatgaaggagaactacgagaccctgatcagcctgggcttcctgtgcgagaagcccagcctgatcagcaagatcgagagggaggaggacccctgcgtgagggaccagcaggacttcagggagaggaggaggaggctgaagagcttcggcggcccaagcagcggcgcccctcctcccagcggcggcagcccagccggctccccaacctctaccgaggagggcacctctgagtccgccacccccgagagcggccctggcacctccaccgagcccagcgagggcagcgcacccggcagccctgccggcagccccacctccacagaggagggaaccagcaccgagcccagcgaaggcagcgccccaggcaccagcaccgagcctagtgagcaggagattaaacggatcaacaagatcagaagaagacttgtgaaagacagcaacaccaagaaggccggcaagacaggccccatgaaaaccctgctggttagagtgatgacacccgatctgagagagcggctggaaaacctgagaaagaagcctgaaaatatcccccagcccatcagcaatacatctagagccaacctgaataagctgctgaccgattacaccgaaatgaagaaggcgatcctgcatgtgtactgggaagagttccagaaggaccctgtgggcctgatgagccgggtggcccagcctgccagcaagaagatcgatcagaacaagctgaaacctgagatggacgagaagggcaacctgaccaccgccggctttgcctgctctcagtgtggccagcccctgttcgtgtacaagctggagcaggtgtctgagaagggcaaggcttacaccaactacttcggacggtgcaatgtggccgagcacgaaaagctgatcctgctggcccagctgaagcccgagaaggatagcgacgaagccgtgacatatagcctgggaaagtttgggcagagggccctggatttctacagcattcatgtgaccaaggagtccacccaccccgtgaagcccctggcccagatcgccggaaacagatacgcctccggacctgtgggaaaggccctgagcgacgcatgtatgggcacaatcgcctccttcctgtctaagtaccaggacatcatcatcgaacaccagaaggtggtgaagggcaaccagaagagactggagagcctgcgggagctggccggcaaggaaaacctggaataccctagcgtgaccctgccacctcagcctcacaccaaggagggcgttgatgcctacaacgaagtgatcgcccgggtgcgaatgtgggtgaacctgaacctgtggcagaagctgaagctaagcagagatgatgccaagcctctgctgagactgaagggattcccttcctttcctctggtcgagagacaggccaacgaagtggactggtgggacatggtgtgtaacgtgaagaagctgatcaacgagaaaaaggaggatggcaaggtgttttggcagaatctggctggctacaagagacaggaagccctgagaccatacctgagcagcgaggaagatcggaagaagggaaagaaattcgctcggtaccagctgggcgacctgctgctgcacctggaaaagaagcacggcgaggactggggaaaggtgtacgacgaggcctgggagcggattgacaagaaagtggaaggcctgagcaagcacatcaagctggaagaggaacggagaagcgaggacgcccagagcaaggccgccctgaccgactggctgcgggctaaggccagcttcgtgatcgagggcctgaaggaggccgacaaggacgagttctgcagatgcgagctgaagctgcagaagtggtacggggacctgcggggaaagcccttcgccatcgaagccgagaacagcatcctggacatcagcggcttcagcaagcagtacaactgtgccttcatctggcagaaggacggcgtgaagaagctgaacctgtacctgatcatcaactacttcaagggcggcaagctgcggttcaagaagatcaaacctgaagccttcgaagccaacagattctacaccgtgatcaacaaaaagagcggcgagatcgtgcccatggaggtgaacttcaacttcgacgaccccaacctgatcatcctgcctctggcctttggcaagagacagggcagagaattcatctggaacgacctgctgtccctggaaaccggcagcctgaagctggccaacggaagagtgatcgagaagacactgtacaacagaagaacccggcaggatgagcctgccctgttcgtggccctgaccttcgagcggcgggaggtcctggactcctccaatatcaaaccaatgaacctgatcggcgtggcaagaggcgaaaacatccccgccgtgatcgccctgaccgaccccgagggctgcccactgagccggtttaaggatagcctgggaaacccaacccacatcctgagaatcggcgagagctataaggagaagcagcggaccatccaggccaagaaggaggtggagcagcggagagccggcggctacagccggaagtacgccagcaaagccaagaatctggcagacgatatggtgagaaacaccgctagagatctgctgtactacgccgtgacccaggatgccatgctgatcttcgccaacctgagccggggcttcggccggcagggcaagcggaccttcatggccgagagacagtacacacggatggaggactggctgaccgccaagctggcctacgagggcctgagcaagacctacctgtccaagacactggcccagtacacctccaagacatgcagcaactgtgggtttaccatcaccagcgccgactacgacagggtgctggagaagctgaagaagacagcaacaggctggatgaccacaattaacggcaaggagctgaaggtggagggccagattacctactacaacagatacaagagacagaacgtagtcaaggacctgtccgtcgagctggatagactgagcgaagaatctgtgaacaacgacatctcctcctggacaaagggcagaagcggagaagctctgagcctcctgaagaaaagattctcccatagacccgtgcaggagaagttcgtgtgcctgaactgcggcttcgagacacacgcagccgagcaagccgccctgaacatcgccagatcctggctgttcctgcggagccaggagtacaagaaataccagacaaacaagacaaccggcaacaccgataagagagccttcgtcgagacctggcagtccttttaccggaagaagcttaaggaggtgtggaaacctgccgtgcggtctggcggatctggcggaggctcctgcccagatgcaggtgaccttcgaggacatcgccgtgttcttctgccacgaggagtggaagtacctggacgacggccagaaggagctgtacaaggaggtgatgaaggagaactacgagaccctgatcagcctgggcttcctgtgcgagaagcccagcctgatcagcaagatcgagagggaggaggacccctgcgtgagggaccagcaggacttcagggagaggaggaggaggctgaagagcttcggatctggctccggcagcggccccaagaaaaagagaaaagtctaagctgccttctgcggggcttgccttctggccatgcccttcttctctcccttgcacctgtacctcttggtctttgaataaagcctgagtaggaaggctagcaaaaaaaaaaaaaaaaaaaaaaaaaaaaaaaaaaaaaaaaaaaaaaaaaaaaaaaaaaaaaaaaaaaaaaaaaaaaaaaa

SEQ ID NO: 16549 - RNA, 9485 nt, synthetic construct
  source 1..9485: mol_type = other RNA
aggaaataagagagaaaagaagagtaagaagaaatataagagccaccatggcccctaagaagaagcgtaaagtgagccggatggaacgcctcgtctacgaggtgcggcagaagtgcagaaacatcgaggacatctgcatctcctgcggatctctgaacgtgaccctggagcacccactgttcatcggcggcatgtgccagaactgtaaaaactgttttctggagtgtgcctatcaatacgacgatgacggctaccagagctactgcaccatctgttgcggcggaagagaggtgctgatgtgtggaaataacaactgctgccggtgcttctgcgtggaatgcgtggacctgctggtgggccccggcgccgcccaggccgctattaaggaagatccttggaactgctacatgtgcggccacaagggcacatacggcctgctgagacggagagaggactggcctagcagactgcagatgttcttcgccaataaccacgaccaggagttcgacccccctaaggtgtaccctcccgtccccgccgagaagagaaagcccatccgggtcctgagcctgttcgatggcatcgccaccggtctgctggtgctgaaggacctgggcatccaggtggataggtacattgcctccgaggtgtgcgaggactccatcaccgtgggaatggtgcgtcatcagggcaagatcatgtacgtgggcgacgtgcggagcgtgacacagaagcatatccaggagtggggccctttcgacctggtgatcggcggcagcccttgcaatgacctgagcatcgtgaacccagcccggaagggcctgtacgagggaaccggcagactgttcttcgagttttacagactgctgcacgacgcccggcctaaggaaggcgacgaccggcccttcttttggctgttcgagaatgtggtggccatgggagtcagcgacaagcgggatattagccggttcctggagagcaaccccgtgatgatcgatgccaaggaagtgagcgccgcccaccgggccagatacttctggggcaatctgcctggcatgaacagacccctggccagcaccgtgaacgacaagctggagctgcaggagtgcctggagcacggccggatcgccaagttcagcaaggtgagaaccatcaccacccgaagcaacagcatcaaacaaggcaaggaccagcactttcctgtgttcatgaacgagaaggaggacatcctgtggtgtaccgagatggagagagtgttcgggttcccagtccactacacagatgtcagcaacatgtctagactggccagacagagactgctgggaagaagctggtccgtccctgtgatcagacacctgttcgcccctctgaaggagtacttcgcctgcgtgagcagcggcaacagcaacgccaacagccggggccccagcttctctagcggcctggtgccactgtccctgagagggagccacatgggccccatggagatctacaaaaccgtgagcgcctggaagcggcagcctgtgcgcgtgctgagcctgtttcggaatatcgataaagtcctgaaaagcctgggattcctggagagcggctctggctccggcggtggcaccctgaagtacgtggaggatgtgacaaacgtggtcagacgggatgtggagaagtggggccccttcgatctggtgtacggcagcacccaacccctgggcagctcttgtgaccggtgccctggctggtacatgtttcagttccaccggatcctgcagtacgccctgccgagacaggagtcccagcggccattcttttggattttcatggacaacttgctgctgaccgaggatgaccaggaaactaccactcggttcctgcagaccgaagccgtgaccctgcaggacgtgagaggccgggactaccagaacgccatgcgggtgtggtccaacatccctggactgaaaagcaagcacgcacctctgacccctaaagaagaggagtacctgcaggcccaggtgcggagcagaagcaagctggacgcccctaaggtggatctgctggtgaagaattgcctcctgcccctgagagagtacttcaagtatttcagccagaatagtctgcccctgggaggcagcggcggcggcgccctggtgacatttgaggacgtcgccgtgcggttcacccaggaggaatgggctctgctggatccttctcagaaaatcctgtaccgggacgtgatgagagagacataccggaatctgacctccgtgggcatcaactgggaatgttgggaccttgaagcctgcttcagaagcctgggaagaaacctgagagtgcaggtggtgaagagaaagtgcgagctgaccaacagcggcccctgcgccgagggcggcccaagcagcggcgcccctcctcccagcggcggcagcccagccggctccccaacctctaccgaggagggcacctctgagtccgccacccccgagagcggccctggcacctccaccgagcccagcgagggcagcgcacccggcagccctgccggcagccccacctccacagaggagggaaccagcaccgagcccagcgaaggcagcgccccaggcaccagcaccgagcctagtgagcaggagattaaacggatcaacaagatcagaagaagacttgtgaaagacagcaacaccaagaaggccggcaagacaggccccatgaaaaccctgctggttagagtgatgacacccgatctgagagagcggctggaaaacctgagaaagaagcctgaaaatatcccccagcccatcagcaatacatctagagccaacctgaataagctgctgaccgattacaccgaaatgaagaaggcgatcctgcatgtgtactgggaagagttccagaaggaccctgtgggcctgatgagccgggtggcccagcctgccagcaagaagatcgatcagaacaagctgaaacctgagatggacgagaagggcaacctgaccaccgccggctttgcctgctctcagtgtggccagcccctgttcgtgtacaagctggagcaggtgtctgagaagggcaaggcttacaccaactacttcggacggtgcaatgtggccgagcacgaaaagctgatcctgctggcccagctgaagcccgagaaggatagcgacgaagccgtgacatatagcctgggaaagtttgggcagagggccctggatttctacagcattcatgtgaccaaggagtccacccaccccgtgaagcccctggcccagatcgccggaaacagatacgcctccggacctgtgggaaaggccctgagcgacgcatgtatgggcacaatcgcctccttcctgtctaagtaccaggacatcatcatcgaacaccagaaggtggtgaagggcaaccagaagagactggagagcctgcgggagctggccggcaaggaaaacctggaataccctagcgtgaccctgccacctcagcctcacaccaaggagggcgttgatgcctacaacgaagtgatcgcccgggtgcgaatgtgggtgaacctgaacctgtggcagaagctgaagctaagcagagatgatgccaagcctctgctgagactgaagggattcccttcctttcctctggtcgagagacaggccaacgaagtggactggtgggacatggtgtgtaacgtgaagaagctgatcaacgagaaaaaggaggatggcaaggtgttttggcagaatctggctggctacaagagacaggaagccctgagaccatacctgagcagcgaggaagatcggaagaagggaaagaaattcgctcggtaccagctgggcgacctgctgctgcacctggaaaagaagcacggcgaggactggggaaaggtgtacgacgaggcctgggagcggattgacaagaaagtggaaggcctgagcaagcacatcaagctggaagaggaacggagaagcgaggacgcccagagcaaggccgccctgaccgactggctgcgggctaaggccagcttcgtgatcgagggcctgaaggaggccgacaaggacgagttctgcagatgcgagctgaagctgcagaagtggtacggggacctgcggggaaagcccttcgccatcgaagccgagaacagcatcctggacatcagcggcttcagcaagcagtacaactgtgccttcatctggcagaaggacggcgtgaagaagctgaacctgtacctgatcatcaactacttcaagggcggcaagctgcggttcaagaagatcaaacctgaagccttcgaagccaacagattctacaccgtgatcaacaaaaagagcggcgagatcgtgcccatggaggtgaacttcaacttcgacgaccccaacctgatcatcctgcctctggcctttggcaagagacagggcagagaattcatctggaacgacctgctgtccctggaaaccggcagcctgaagctggccaacggaagagtgatcgagaagacactgtacaacagaagaacccggcaggatgagcctgccctgttcgtggccctgaccttcgagcggcgggaggtcctggactcctccaatatcaaaccaatgaacctgatcggcgtggcaagaggcgaaaacatccccgccgtgatcgccctgaccgaccccgagggctgcccactgagccggtttaaggatagcctgggaaacccaacccacatcctgagaatcggcgagagctataaggagaagcagcggaccatccaggccaagaaggaggtggagcagcggagagccggcggctacagccggaagtacgccagcaaagccaagaatctggcagacgatatggtgagaaacaccgctagagatctgctgtactacgccgtgacccaggatgccatgctgatcttcgccaacctgagccggggcttcggccggcagggcaagcggaccttcatggccgagagacagtacacacggatggaggactggctgaccgccaagctggcctacgagggcctgagcaagacctacctgtccaagacactggcccagtacacctccaagacatgcagcaactgtgggtttaccatcaccagcgccgactacgacagggtgctggagaagctgaagaagacagcaacaggctggatgaccacaattaacggcaaggagctgaaggtggagggccagattacctactacaacagatacaagagacagaacgtagtcaaggacctgtccgtcgagctggatagactgagcgaagaatctgtgaacaacgacatctcctcctggacaaagggcagaagcggagaagctctgagcctcctgaagaaaagattctcccatagacccgtgcaggagaagttcgtgtgcctgaactgcggcttcgagacacacgcagccgagcaagccgccctgaacatcgccagatcctggctgttcctgcggagccaggagtacaagaaataccagacaaacaagacaaccggcaacaccgataagagagccttcgtcgagacctggcagtccttttaccggaagaagcttaaggaggtgtggaaacctgccgtgcggtctggcggatctggcggaggctccaaggagaacgccgtgacctacgacgacatccacatcgacttcaccagggaggagtggaccctgctggaccccagccagaagaacctgtacaaggacgtgatgctggagacctacaggcacctgaccaccatcggctacagctgggaggaccacaacatcgagaagtactgcgagagcagcaggaggcacaagagcaccgtgcagaggcacaagaggaccaacaccaacgagaacccctacgagggcggcccaagcagcggcgcccctcctcccagcggcggcagcccagccggctccccaacctctaccgaggagggcacctctgagtccgccacccccgagagcggccctggcacctccaccgagcccagcgagggcagcgcacccggcagccctgccggcagccccacctccacagaggagggaaccagcaccgagcccagcgaaggcagcgccccaggcaccagcaccgagcctagtgagcaggagattaaacggatcaacaagatcagaagaagacttgtgaaagacagcaacaccaagaaggccggcaagacaggccccatgaaaaccctgctggttagagtgatgacacccgatctgagagagcggctggaaaacctgagaaagaagcctgaaaatatcccccagcccatcagcaatacatctagagccaacctgaataagctgctgaccgattacaccgaaatgaagaaggcgatcctgcatgtgtactgggaagagttccagaaggaccctgtgggcctgatgagccgggtggcccagcctgccagcaagaagatcgatcagaacaagctgaaacctgagatggacgagaagggcaacctgaccaccgccggctttgcctgctctcagtgtggccagcccctgttcgtgtacaagctggagcaggtgtctgagaagggcaaggcttacaccaactacttcggacggtgcaatgtggccgagcacgaaaagctgatcctgctggcccagctgaagcccgagaaggatagcgacgaagccgtgacatatagcctgggaaagtttgggcagagggccctggatttctacagcattcatgtgaccaaggagtccacccaccccgtgaagcccctggcccagatcgccggaaacagatacgcctccggacctgtgggaaaggccctgagcgacgcatgtatgggcacaatcgcctccttcctgtctaagtaccaggacatcatcatcgaacaccagaaggtggtgaagggcaaccagaagagactggagagcctgcgggagctggccggcaaggaaaacctggaataccctagcgtgaccctgccacctcagcctcacaccaaggagggcgttgatgcctacaacgaagtgatcgcccgggtgcgaatgtgggtgaacctgaacctgtggcagaagctgaagctaagcagagatgatgccaagcctctgctgagactgaagggattcccttcctttcctctggtcgagagacaggccaacgaagtggactggtgggacatggtgtgtaacgtgaagaagctgatcaacgagaaaaaggaggatggcaaggtgttttggcagaatctggctggctacaagagacaggaagccctgagaccatacctgagcagcgaggaagatcggaagaagggaaagaaattcgctcggtaccagctgggcgacctgctgctgcacctggaaaagaagcacggcgaggactggggaaaggtgtacgacgaggcctgggagcggattgacaagaaagtggaaggcctgagcaagcacatcaagctggaagaggaacggagaagcgaggacgcccagagcaaggccgccctgaccgactggctgcgggctaaggccagcttcgtgatcgagggcctgaaggaggccgacaaggacgagttctgcagatgcgagctgaagctgcagaagtggtacggggacctgcggggaaagcccttcgccatcgaagccgagaacagcatcctggacatcagcggcttcagcaagcagtacaactgtgccttcatctggcagaaggacggcgtgaagaagctgaacctgtacctgatcatcaactacttcaagggcggcaagctgcggttcaagaagatcaaacctgaagccttcgaagccaacagattctacaccgtgatcaacaaaaagagcggcgagatcgtgcccatggaggtgaacttcaacttcgacgaccccaacctgatcatcctgcctctggcctttggcaagagacagggcagagaattcatctggaacgacctgctgtccctggaaaccggcagcctgaagctggccaacggaagagtgatcgagaagacactgtacaacagaagaacccggcaggatgagcctgccctgttcgtggccctgaccttcgagcggcgggaggtcctggactcctccaatatcaaaccaatgaacctgatcggcgtggcaagaggcgaaaacatccccgccgtgatcgccctgaccgaccccgagggctgcccactgagccggtttaaggatagcctgggaaacccaacccacatcctgagaatcggcgagagctataaggagaagcagcggaccatccaggccaagaaggaggtggagcagcggagagccggcggctacagccggaagtacgccagcaaagccaagaatctggcagacgatatggtgagaaacaccgctagagatctgctgtactacgccgtgacccaggatgccatgctgatcttcgccaacctgagccggggcttcggccggcagggcaagcggaccttcatggccgagagacagtacacacggatggaggactggctgaccgccaagctggcctacgagggcctgagcaagacctacctgtccaagacactggcccagtacacctccaagacatgcagcaactgtgggtttaccatcaccagcgccgactacgacagggtgctggagaagctgaagaagacagcaacaggctggatgaccacaattaacggcaaggagctgaaggtggagggccagattacctactacaacagatacaagagacagaacgtagtcaaggacctgtccgtcgagctggatagactgagcgaagaatctgtgaacaacgacatctcctcctggacaaagggcagaagcggagaagctctgagcctcctgaagaaaagattctcccatagacccgtgcaggagaagttcgtgtgcctgaactgcggcttcgagacacacgcagccgagcaagccgccctgaacatcgccagatcctggctgttcctgcggagccaggagtacaagaaataccagacaaacaagacaaccggcaacaccgataagagagccttcgtcgagacctggcagtccttttaccggaagaagcttaaggaggtgtggaaacctgccgtgcggtctggcggatctggcggaggctcctaaggagaacgccgtgacctacgacgacatccacatcgacttcaccagggaggagtggaccctgctggaccccagccagaagaacctgtacaaggacgtgatgctggagacctacaggcacctgaccaccatcggctacagctgggaggaccacaacatcgagaagtactgcgagagcagcaggaggcacaagagcaccgtgcagaggcacaagaggaccaacaccaacgagaacccctacgagggatctggctccggcagcggccccaagaaaaagagaaaagtctaagctgccttctgcggggcttgccttctggccatgcccttcttctctcccttgcacctgtacctcttggtctttgaataaagcctgagtaggaaggctagcaaaaaaaaaaaaaaaaaaaaaaaaaaaaaaaaaaaaaaaaaaaaaaaaaaaaaaaaaaaaaaaaaaaaaaaaaaaaaaaa

SEQ ID NO: 16550 - RNA, 9485 nt, synthetic construct
  source 1..9485: mol_type = other RNA
aggaaataagagagaaaagaagagtaagaagaaatataagagccaccatggcccctaagaagaagcgtaaagtgagccggatggaacgcctcgtctacgaggtgcggcagaagtgcagaaacatcgaggacatctgcatctcctgcggatctctgaacgtgaccctggagcacccactgttcatcggcggcatgtgccagaactgtaaaaactgttttctggagtgtgcctatcaatacgacgatgacggctaccagagctactgcaccatctgttgcggcggaagagaggtgctgatgtgtggaaataacaactgctgccggtgcttctgcgtggaatgcgtggacctgctggtgggccccggcgccgcccaggccgctattaaggaagatccttggaactgctacatgtgcggccacaagggcacatacggcctgctgagacggagagaggactggcctagcagactgcagatgttcttcgccaataaccacgaccaggagttcgacccccctaaggtgtaccctcccgtccccgccgagaagagaaagcccatccgggtcctgagcctgttcgatggcatcgccaccggtctgctggtgctgaaggacctgggcatccaggtggataggtacattgcctccgaggtgtgcgaggactccatcaccgtgggaatggtgcgtcatcagggcaagatcatgtacgtgggcgacgtgcggagcgtgacacagaagcatatccaggagtggggccctttcgacctggtgatcggcggcagcccttgcaatgacctgagcatcgtgaacccagcccggaagggcctgtacgagggaaccggcagactgttcttcgagttttacagactgctgcacgacgcccggcctaaggaaggcgacgaccggcccttcttttggctgttcgagaatgtggtggccatgggagtcagcgacaagcgggatattagccggttcctggagagcaaccccgtgatgatcgatgccaaggaagtgagcgccgcccaccgggccagatacttctggggcaatctgcctggcatgaacagacccctggccagcaccgtgaacgacaagctggagctgcaggagtgcctggagcacggccggatcgccaagttcagcaaggtgagaaccatcaccacccgaagcaacagcatcaaacaaggcaaggaccagcactttcctgtgttcatgaacgagaaggaggacatcctgtggtgtaccgagatggagagagtgttcgggttcccagtccactacacagatgtcagcaacatgtctagactggccagacagagactgctgggaagaagctggtccgtccctgtgatcagacacctgttcgcccctctgaaggagtacttcgcctgcgtgagcagcggcaacagcaacgccaacagccggggccccagcttctctagcggcctggtgccactgtccctgagagggagccacatgggccccatggagatctacaaaaccgtgagcgcctggaagcggcagcctgtgcgcgtgctgagcctgtttcggaatatcgataaagtcctgaaaagcctgggattcctggagagcggctctggctccggcggtggcaccctgaagtacgtggaggatgtgacaaacgtggtcagacgggatgtggagaagtggggccccttcgatctggtgtacggcagcacccaacccctgggcagctcttgtgaccggtgccctggctggtacatgtttcagttccaccggatcctgcagtacgccctgccgagacaggagtcccagcggccattcttttggattttcatggacaacttgctgctgaccgaggatgaccaggaaactaccactcggttcctgcagaccgaagccgtgaccctgcaggacgtgagaggccgggactaccagaacgccatgcgggtgtggtccaacatccctggactgaaaagcaagcacgcacctctgacccctaaagaagaggagtacctgcaggcccaggtgcggagcagaagcaagctggacgcccctaaggtggatctgctggtgaagaattgcctcctgcccctgagagagtacttcaagtatttcagccagaatagtctgcccctgggaggcagcggcggcggcgccctggtgacatttgaggacgtcgccgtgcggttcacccaggaggaatgggctctgctggatccttctcagaaaatcctgtaccgggacgtgatgagagagacataccggaatctgacctccgtgggcatcaactgggaatgttgggaccttgaagcctgcttcagaagcctgggaagaaacctgagagtgcaggtggtgaagagaaagtgcgagctgaccaacagcggcccctgcgccgagggcggcccaagcagcggcgcccctcctcccagcggcggcagcccagccggctccccaacctctaccgaggagggcacctctgagtccgccacccccgagagcggccctggcacctccaccgagcccagcgagggcagcgcacccggcagccctgccggcagccccacctccacagaggagggaaccagcaccgagcccagcgaaggcagcgccccaggcaccagcaccgagcctagtgagcaggagattaaacggatcaacaagatcagaagaagacttgtgaaagacagcaacaccaagaaggccggcaagacaggccccatgaaaaccctgctggttagagtgatgacacccgatctgagagagcggctggaaaacctgagaaagaagcctgaaaatatcccccagcccatcagcaatacatctagagccaacctgaataagctgctgaccgattacaccgaaatgaagaaggcgatcctgcatgtgtactgggaagagttccagaaggaccctgtgggcctgatgagccgggtggcccagcctgccagcaagaagatcgatcagaacaagctgaaacctgagatggacgagaagggcaacctgaccaccgccggctttgcctgctctcagtgtggccagcccctgttcgtgtacaagctggagcaggtgtctgagaagggcaaggcttacaccaactacttcggacggtgcaatgtggccgagcacgaaaagctgatcctgctggcccagctgaagcccgagaaggatagcgacgaagccgtgacatatagcctgggaaagtttgggcagagggccctggatttctacagcattcatgtgaccaaggagtccacccaccccgtgaagcccctggcccagatcgccggaaacagatacgcctccggacctgtgggaaaggccctgagcgacgcatgtatgggcacaatcgcctccttcctgtctaagtaccaggacatcatcatcgaacaccagaaggtggtgaagggcaaccagaagagactggagagcctgcgggagctggccggcaaggaaaacctggaataccctagcgtgaccctgccacctcagcctcacaccaaggagggcgttgatgcctacaacgaagtgatcgcccgggtgcgaatgtgggtgaacctgaacctgtggcagaagctgaagctaagcagagatgatgccaagcctctgctgagactgaagggattcccttcctttcctctggtcgagagacaggccaacgaagtggactggtgggacatggtgtgtaacgtgaagaagctgatcaacgagaaaaaggaggatggcaaggtgttttggcagaatctggctggctacaagagacaggaagccctgagaccatacctgagcagcgaggaagatcggaagaagggaaagaaattcgctcggtaccagctgggcgacctgctgctgcacctggaaaagaagcacggcgaggactggggaaaggtgtacgacgaggcctgggagcggattgacaagaaagtggaaggcctgagcaagcacatcaagctggaagaggaacggagaagcgaggacgcccagagcaaggccgccctgaccgactggctgcgggctaaggccagcttcgtgatcgagggcctgaaggaggccgacaaggacgagttctgcagatgcgagctgaagctgcagaagtggtacggggacctgcggggaaagcccttcgccatcgaagccgagaacagcatcctggacatcagcggcttcagcaagcagtacaactgtgccttcatctggcagaaggacggcgtgaagaagctgaacctgtacctgatcatcaactacttcaagggcggcaagctgcggttcaagaagatcaaacctgaagccttcgaagccaacagattctacaccgtgatcaacaaaaagagcggcgagatcgtgcccatggaggtgaacttcaacttcgacgaccccaacctgatcatcctgcctctggcctttggcaagagacagggcagagaattcatctggaacgacctgctgtccctggaaaccggcagcctgaagctggccaacggaagagtgatcgagaagacactgtacaacagaagaacccggcaggatgagcctgccctgttcgtggccctgaccttcgagcggcgggaggtcctggactcctccaatatcaaaccaatgaacctgatcggcgtggcaagaggcgaaaacatccccgccgtgatcgccctgaccgaccccgagggctgcccactgagccggtttaaggatagcctgggaaacccaacccacatcctgagaatcggcgagagctataaggagaagcagcggaccatccaggccaagaaggaggtggagcagcggagagccggcggctacagccggaagtacgccagcaaagccaagaatctggcagacgatatggtgagaaacaccgctagagatctgctgtactacgccgtgacccaggatgccatgctgatcttcgccaacctgagccggggcttcggccggcagggcaagcggaccttcatggccgagagacagtacacacggatggaggactggctgaccgccaagctggcctacgagggcctgagcaagacctacctgtccaagacactggcccagtacacctccaagacatgcagcaactgtgggtttaccatcaccagcgccgactacgacagggtgctggagaagctgaagaagacagcaacaggctggatgaccacaattaacggcaaggagctgaaggtggagggccagattacctactacaacagatacaagagacagaacgtagtcaaggacctgtccgtcgagctggatagactgagcgaagaatctgtgaacaacgacatctcctcctggacaaagggcagaagcggagaagctctgagcctcctgaagaaaagattctcccatagacccgtgcaggagaagttcgtgtgcctgaactgcggcttcgagacacacgcagccgagcaagccgccctgaacatcgccagatcctggctgttcctgcggagccaggagtacaagaaataccagacaaacaagacaaccggcaacaccgataagagagccttcgtcgagacctggcagtccttttaccggaagaagcttaaggaggtgtggaaacctgccgtgcggtctggcggatctggcggaggctccccccaggtgagcctgaccttcgaggacgtggccgtgctgttcaccagggacgagtggaggaagctggcccccagccagaggaacctgtacagggacgtgatgctggagaactacaggaacctggtgagcctgggcctgcccttcaccaagcccaaggtgatcagcctgctgcagcagggcgaggacccctggaaggtggagaaggacagcagcggcggctgcagccccggctgcaagagcaacggcggcccaagcagcggcgcccctcctcccagcggcggcagcccagccggctccccaacctctaccgaggagggcacctctgagtccgccacccccgagagcggccctggcacctccaccgagcccagcgagggcagcgcacccggcagccctgccggcagccccacctccacagaggagggaaccagcaccgagcccagcgaaggcagcgccccaggcaccagcaccgagcctagtgagcaggagattaaacggatcaacaagatcagaagaagacttgtgaaagacagcaacaccaagaaggccggcaagacaggccccatgaaaaccctgctggttagagtgatgacacccgatctgagagagcggctggaaaacctgagaaagaagcctgaaaatatcccccagcccatcagcaatacatctagagccaacctgaataagctgctgaccgattacaccgaaatgaagaaggcgatcctgcatgtgtactgggaagagttccagaaggaccctgtgggcctgatgagccgggtggcccagcctgccagcaagaagatcgatcagaacaagctgaaacctgagatggacgagaagggcaacctgaccaccgccggctttgcctgctctcagtgtggccagcccctgttcgtgtacaagctggagcaggtgtctgagaagggcaaggcttacaccaactacttcggacggtgcaatgtggccgagcacgaaaagctgatcctgctggcccagctgaagcccgagaaggatagcgacgaagccgtgacatatagcctgggaaagtttgggcagagggccctggatttctacagcattcatgtgaccaaggagtccacccaccccgtgaagcccctggcccagatcgccggaaacagatacgcctccggacctgtgggaaaggccctgagcgacgcatgtatgggcacaatcgcctccttcctgtctaagtaccaggacatcatcatcgaacaccagaaggtggtgaagggcaaccagaagagactggagagcctgcgggagctggccggcaaggaaaacctggaataccctagcgtgaccctgccacctcagcctcacaccaaggagggcgttgatgcctacaacgaagtgatcgcccgggtgcgaatgtgggtgaacctgaacctgtggcagaagctgaagctaagcagagatgatgccaagcctctgctgagactgaagggattcccttcctttcctctggtcgagagacaggccaacgaagtggactggtgggacatggtgtgtaacgtgaagaagctgatcaacgagaaaaaggaggatggcaaggtgttttggcagaatctggctggctacaagagacaggaagccctgagaccatacctgagcagcgaggaagatcggaagaagggaaagaaattcgctcggtaccagctgggcgacctgctgctgcacctggaaaagaagcacggcgaggactggggaaaggtgtacgacgaggcctgggagcggattgacaagaaagtggaaggcctgagcaagcacatcaagctggaagaggaacggagaagcgaggacgcccagagcaaggccgccctgaccgactggctgcgggctaaggccagcttcgtgatcgagggcctgaaggaggccgacaaggacgagttctgcagatgcgagctgaagctgcagaagtggtacggggacctgcggggaaagcccttcgccatcgaagccgagaacagcatcctggacatcagcggcttcagcaagcagtacaactgtgccttcatctggcagaaggacggcgtgaagaagctgaacctgtacctgatcatcaactacttcaagggcggcaagctgcggttcaagaagatcaaacctgaagccttcgaagccaacagattctacaccgtgatcaacaaaaagagcggcgagatcgtgcccatggaggtgaacttcaacttcgacgaccccaacctgatcatcctgcctctggcctttggcaagagacagggcagagaattcatctggaacgacctgctgtccctggaaaccggcagcctgaagctggccaacggaagagtgatcgagaagacactgtacaacagaagaacccggcaggatgagcctgccctgttcgtggccctgaccttcgagcggcgggaggtcctggactcctccaatatcaaaccaatgaacctgatcggcgtggcaagaggcgaaaacatccccgccgtgatcgccctgaccgaccccgagggctgcccactgagccggtttaaggatagcctgggaaacccaacccacatcctgagaatcggcgagagctataaggagaagcagcggaccatccaggccaagaaggaggtggagcagcggagagccggcggctacagccggaagtacgccagcaaagccaagaatctggcagacgatatggtgagaaacaccgctagagatctgctgtactacgccgtgacccaggatgccatgctgatcttcgccaacctgagccggggcttcggccggcagggcaagcggaccttcatggccgagagacagtacacacggatggaggactggctgaccgccaagctggcctacgagggcctgagcaagacctacctgtccaagacactggcccagtacacctccaagacatgcagcaactgtgggtttaccatcaccagcgccgactacgacagggtgctggagaagctgaagaagacagcaacaggctggatgaccacaattaacggcaaggagctgaaggtggagggccagattacctactacaacagatacaagagacagaacgtagtcaaggacctgtccgtcgagctggatagactgagcgaagaatctgtgaacaacgacatctcctcctggacaaagggcagaagcggagaagctctgagcctcctgaagaaaagattctcccatagacccgtgcaggagaagttcgtgtgcctgaactgcggcttcgagacacacgcagccgagcaagccgccctgaacatcgccagatcctggctgttcctgcggagccaggagtacaagaaataccagacaaacaagacaaccggcaacaccgataagagagccttcgtcgagacctggcagtccttttaccggaagaagcttaaggaggtgtggaaacctgccgtgcggtctggcggatctggcggaggctcctccccaggtgagcctgaccttcgaggacgtggccgtgctgttcaccagggacgagtggaggaagctggcccccagccagaggaacctgtacagggacgtgatgctggagaactacaggaacctggtgagcctgggcctgcccttcaccaagcccaaggtgatcagcctgctgcagcagggcgaggacccctggaaggtggagaaggacagcagcggcggctgcagccccggctgcaagagcaacggatctggctccggcagcggccccaagaaaaagagaaaagtctaagctgccttctgcggggcttgccttctggccatgcccttcttctctcccttgcacctgtacctcttggtctttgaataaagcctgagtaggaaggctagcaaaaaaaaaaaaaaaaaaaaaaaaaaaaaaaaaaaaaaaaaaaaaaaaaaaaaaaaaaaaaaaaaaaaaaaaaaaaaaaa

SEQ ID NO: 16551 - RNA, 9485 nt, synthetic construct
  source 1..9485: mol_type = other RNA
aggaaataagagagaaaagaagagtaagaagaaatataagagccaccatggcccctaagaagaagcgtaaagtgagccggatggaacgcctcgtctacgaggtgcggcagaagtgcagaaacatcgaggacatctgcatctcctgcggatctctgaacgtgaccctggagcacccactgttcatcggcggcatgtgccagaactgtaaaaactgttttctggagtgtgcctatcaatacgacgatgacggctaccagagctactgcaccatctgttgcggcggaagagaggtgctgatgtgtggaaataacaactgctgccggtgcttctgcgtggaatgcgtggacctgctggtgggccccggcgccgcccaggccgctattaaggaagatccttggaactgctacatgtgcggccacaagggcacatacggcctgctgagacggagagaggactggcctagcagactgcagatgttcttcgccaataaccacgaccaggagttcgacccccctaaggtgtaccctcccgtccccgccgagaagagaaagcccatccgggtcctgagcctgttcgatggcatcgccaccggtctgctggtgctgaaggacctgggcatccaggtggataggtacattgcctccgaggtgtgcgaggactccatcaccgtgggaatggtgcgtcatcagggcaagatcatgtacgtgggcgacgtgcggagcgtgacacagaagcatatccaggagtggggccctttcgacctggtgatcggcggcagcccttgcaatgacctgagcatcgtgaacccagcccggaagggcctgtacgagggaaccggcagactgttcttcgagttttacagactgctgcacgacgcccggcctaaggaaggcgacgaccggcccttcttttggctgttcgagaatgtggtggccatgggagtcagcgacaagcgggatattagccggttcctggagagcaaccccgtgatgatcgatgccaaggaagtgagcgccgcccaccgggccagatacttctggggcaatctgcctggcatgaacagacccctggccagcaccgtgaacgacaagctggagctgcaggagtgcctggagcacggccggatcgccaagttcagcaaggtgagaaccatcaccacccgaagcaacagcatcaaacaaggcaaggaccagcactttcctgtgttcatgaacgagaaggaggacatcctgtggtgtaccgagatggagagagtgttcgggttcccagtccactacacagatgtcagcaacatgtctagactggccagacagagactgctgggaagaagctggtccgtccctgtgatcagacacctgttcgcccctctgaaggagtacttcgcctgcgtgagcagcggcaacagcaacgccaacagccggggccccagcttctctagcggcctggtgccactgtccctgagagggagccacatgggccccatggagatctacaaaaccgtgagcgcctggaagcggcagcctgtgcgcgtgctgagcctgtttcggaatatcgataaagtcctgaaaagcctgggattcctggagagcggctctggctccggcggtggcaccctgaagtacgtggaggatgtgacaaacgtggtcagacgggatgtggagaagtggggccccttcgatctggtgtacggcagcacccaacccctgggcagctcttgtgaccggtgccctggctggtacatgtttcagttccaccggatcctgcagtacgccctgccgagacaggagtcccagcggccattcttttggattttcatggacaacttgctgctgaccgaggatgaccaggaaactaccactcggttcctgcagaccgaagccgtgaccctgcaggacgtgagaggccgggactaccagaacgccatgcgggtgtggtccaacatccctggactgaaaagcaagcacgcacctctgacccctaaagaagaggagtacctgcaggcccaggtgcggagcagaagcaagctggacgcccctaaggtggatctgctggtgaagaattgcctcctgcccctgagagagtacttcaagtatttcagccagaatagtctgcccctgggaggcagcggcggcggcgccctggtgacatttgaggacgtcgccgtgcggttcacccaggaggaatgggctctgctggatccttctcagaaaatcctgtaccgggacgtgatgagagagacataccggaatctgacctccgtgggcatcaactgggaatgttgggaccttgaagcctgcttcagaagcctgggaagaaacctgagagtgcaggtggtgaagagaaagtgcgagctgaccaacagcggcccctgcgccgagggcggcccaagcagcggcgcccctcctcccagcggcggcagcccagccggctccccaacctctaccgaggagggcacctctgagtccgccacccccgagagcggccctggcacctccaccgagcccagcgagggcagcgcacccggcagccctgccggcagccccacctccacagaggagggaaccagcaccgagcccagcgaaggcagcgccccaggcaccagcaccgagcctagtgagcaggagattaaacggatcaacaagatcagaagaagacttgtgaaagacagcaacaccaagaaggccggcaagacaggccccatgaaaaccctgctggttagagtgatgacacccgatctgagagagcggctggaaaacctgagaaagaagcctgaaaatatcccccagcccatcagcaatacatctagagccaacctgaataagctgctgaccgattacaccgaaatgaagaaggcgatcctgcatgtgtactgggaagagttccagaaggaccctgtgggcctgatgagccgggtggcccagcctgccagcaagaagatcgatcagaacaagctgaaacctgagatggacgagaagggcaacctgaccaccgccggctttgcctgctctcagtgtggccagcccctgttcgtgtacaagctggagcaggtgtctgagaagggcaaggcttacaccaactacttcggacggtgcaatgtggccgagcacgaaaagctgatcctgctggcccagctgaagcccgagaaggatagcgacgaagccgtgacatatagcctgggaaagtttgggcagagggccctggatttctacagcattcatgtgaccaaggagtccacccaccccgtgaagcccctggcccagatcgccggaaacagatacgcctccggacctgtgggaaaggccctgagcgacgcatgtatgggcacaatcgcctccttcctgtctaagtaccaggacatcatcatcgaacaccagaaggtggtgaagggcaaccagaagagactggagagcctgcgggagctggccggcaaggaaaacctggaataccctagcgtgaccctgccacctcagcctcacaccaaggagggcgttgatgcctacaacgaagtgatcgcccgggtgcgaatgtgggtgaacctgaacctgtggcagaagctgaagctaagcagagatgatgccaagcctctgctgagactgaagggattcccttcctttcctctggtcgagagacaggccaacgaagtggactggtgggacatggtgtgtaacgtgaagaagctgatcaacgagaaaaaggaggatggcaaggtgttttggcagaatctggctggctacaagagacaggaagccctgagaccatacctgagcagcgaggaagatcggaagaagggaaagaaattcgctcggtaccagctgggcgacctgctgctgcacctggaaaagaagcacggcgaggactggggaaaggtgtacgacgaggcctgggagcggattgacaagaaagtggaaggcctgagcaagcacatcaagctggaagaggaacggagaagcgaggacgcccagagcaaggccgccctgaccgactggctgcgggctaaggccagcttcgtgatcgagggcctgaaggaggccgacaaggacgagttctgcagatgcgagctgaagctgcagaagtggtacggggacctgcggggaaagcccttcgccatcgaagccgagaacagcatcctggacatcagcggcttcagcaagcagtacaactgtgccttcatctggcagaaggacggcgtgaagaagctgaacctgtacctgatcatcaactacttcaagggcggcaagctgcggttcaagaagatcaaacctgaagccttcgaagccaacagattctacaccgtgatcaacaaaaagagcggcgagatcgtgcccatggaggtgaacttcaacttcgacgaccccaacctgatcatcctgcctctggcctttggcaagagacagggcagagaattcatctggaacgacctgctgtccctggaaaccggcagcctgaagctggccaacggaagagtgatcgagaagacactgtacaacagaagaacccggcaggatgagcctgccctgttcgtggccctgaccttcgagcggcgggaggtcctggactcctccaatatcaaaccaatgaacctgatcggcgtggcaagaggcgaaaacatccccgccgtgatcgccctgaccgaccccgagggctgcccactgagccggtttaaggatagcctgggaaacccaacccacatcctgagaatcggcgagagctataaggagaagcagcggaccatccaggccaagaaggaggtggagcagcggagagccggcggctacagccggaagtacgccagcaaagccaagaatctggcagacgatatggtgagaaacaccgctagagatctgctgtactacgccgtgacccaggatgccatgctgatcttcgccaacctgagccggggcttcggccggcagggcaagcggaccttcatggccgagagacagtacacacggatggaggactggctgaccgccaagctggcctacgagggcctgagcaagacctacctgtccaagacactggcccagtacacctccaagacatgcagcaactgtgggtttaccatcaccagcgccgactacgacagggtgctggagaagctgaagaagacagcaacaggctggatgaccacaattaacggcaaggagctgaaggtggagggccagattacctactacaacagatacaagagacagaacgtagtcaaggacctgtccgtcgagctggatagactgagcgaagaatctgtgaacaacgacatctcctcctggacaaagggcagaagcggagaagctctgagcctcctgaagaaaagattctcccatagacccgtgcaggagaagttcgtgtgcctgaactgcggcttcgagacacacgcagccgagcaagccgccctgaacatcgccagatcctggctgttcctgcggagccaggagtacaagaaataccagacaaacaagacaaccggcaacaccgataagagagccttcgtcgagacctggcagtccttttaccggaagaagcttaaggaggtgtggaaacctgccgtgcggtctggcggatctggcggaggctccgcccacagcatggtgatgttcagggacgtgaccgtggacttcagccaggaggagtgggagtgcctgagcagctacgagagggacctgtacagggacgtgatgctggagaactacagccacctggtgagcctggccggctgcagcatcagcaagcccgacgtgatcaccctgctggagcagggcaaggagccctggatgatcgtgagggccgagaagaggaggtggagcagggacctggagagcggcggcccaagcagcggcgcccctcctcccagcggcggcagcccagccggctccccaacctctaccgaggagggcacctctgagtccgccacccccgagagcggccctggcacctccaccgagcccagcgagggcagcgcacccggcagccctgccggcagccccacctccacagaggagggaaccagcaccgagcccagcgaaggcagcgccccaggcaccagcaccgagcctagtgagcaggagattaaacggatcaacaagatcagaagaagacttgtgaaagacagcaacaccaagaaggccggcaagacaggccccatgaaaaccctgctggttagagtgatgacacccgatctgagagagcggctggaaaacctgagaaagaagcctgaaaatatcccccagcccatcagcaatacatctagagccaacctgaataagctgctgaccgattacaccgaaatgaagaaggcgatcctgcatgtgtactgggaagagttccagaaggaccctgtgggcctgatgagccgggtggcccagcctgccagcaagaagatcgatcagaacaagctgaaacctgagatggacgagaagggcaacctgaccaccgccggctttgcctgctctcagtgtggccagcccctgttcgtgtacaagctggagcaggtgtctgagaagggcaaggcttacaccaactacttcggacggtgcaatgtggccgagcacgaaaagctgatcctgctggcccagctgaagcccgagaaggatagcgacgaagccgtgacatatagcctgggaaagtttgggcagagggccctggatttctacagcattcatgtgaccaaggagtccacccaccccgtgaagcccctggcccagatcgccggaaacagatacgcctccggacctgtgggaaaggccctgagcgacgcatgtatgggcacaatcgcctccttcctgtctaagtaccaggacatcatcatcgaacaccagaaggtggtgaagggcaaccagaagagactggagagcctgcgggagctggccggcaaggaaaacctggaataccctagcgtgaccctgccacctcagcctcacaccaaggagggcgttgatgcctacaacgaagtgatcgcccgggtgcgaatgtgggtgaacctgaacctgtggcagaagctgaagctaagcagagatgatgccaagcctctgctgagactgaagggattcccttcctttcctctggtcgagagacaggccaacgaagtggactggtgggacatggtgtgtaacgtgaagaagctgatcaacgagaaaaaggaggatggcaaggtgttttggcagaatctggctggctacaagagacaggaagccctgagaccatacctgagcagcgaggaagatcggaagaagggaaagaaattcgctcggtaccagctgggcgacctgctgctgcacctggaaaagaagcacggcgaggactggggaaaggtgtacgacgaggcctgggagcggattgacaagaaagtggaaggcctgagcaagcacatcaagctggaagaggaacggagaagcgaggacgcccagagcaaggccgccctgaccgactggctgcgggctaaggccagcttcgtgatcgagggcctgaaggaggccgacaaggacgagttctgcagatgcgagctgaagctgcagaagtggtacggggacctgcggggaaagcccttcgccatcgaagccgagaacagcatcctggacatcagcggcttcagcaagcagtacaactgtgccttcatctggcagaaggacggcgtgaagaagctgaacctgtacctgatcatcaactacttcaagggcggcaagctgcggttcaagaagatcaaacctgaagccttcgaagccaacagattctacaccgtgatcaacaaaaagagcggcgagatcgtgcccatggaggtgaacttcaacttcgacgaccccaacctgatcatcctgcctctggcctttggcaagagacagggcagagaattcatctggaacgacctgctgtccctggaaaccggcagcctgaagctggccaacggaagagtgatcgagaagacactgtacaacagaagaacccggcaggatgagcctgccctgttcgtggccctgaccttcgagcggcgggaggtcctggactcctccaatatcaaaccaatgaacctgatcggcgtggcaagaggcgaaaacatccccgccgtgatcgccctgaccgaccccgagggctgcccactgagccggtttaaggatagcctgggaaacccaacccacatcctgagaatcggcgagagctataaggagaagcagcggaccatccaggccaagaaggaggtggagcagcggagagccggcggctacagccggaagtacgccagcaaagccaagaatctggcagacgatatggtgagaaacaccgctagagatctgctgtactacgccgtgacccaggatgccatgctgatcttcgccaacctgagccggggcttcggccggcagggcaagcggaccttcatggccgagagacagtacacacggatggaggactggctgaccgccaagctggcctacgagggcctgagcaagacctacctgtccaagacactggcccagtacacctccaagacatgcagcaactgtgggtttaccatcaccagcgccgactacgacagggtgctggagaagctgaagaagacagcaacaggctggatgaccacaattaacggcaaggagctgaaggtggagggccagattacctactacaacagatacaagagacagaacgtagtcaaggacctgtccgtcgagctggatagactgagcgaagaatctgtgaacaacgacatctcctcctggacaaagggcagaagcggagaagctctgagcctcctgaagaaaagattctcccatagacccgtgcaggagaagttcgtgtgcctgaactgcggcttcgagacacacgcagccgagcaagccgccctgaacatcgccagatcctggctgttcctgcggagccaggagtacaagaaataccagacaaacaagacaaccggcaacaccgataagagagccttcgtcgagacctggcagtccttttaccggaagaagcttaaggaggtgtggaaacctgccgtgcggtctggcggatctggcggaggctcctgcccacagcatggtgatgttcagggacgtgaccgtggacttcagccaggaggagtgggagtgcctgagcagctacgagagggacctgtacagggacgtgatgctggagaactacagccacctggtgagcctggccggctgcagcatcagcaagcccgacgtgatcaccctgctggagcagggcaaggagccctggatgatcgtgagggccgagaagaggaggtggagcagggacctggagagcggatctggctccggcagcggccccaagaaaaagagaaaagtctaagctgccttctgcggggcttgccttctggccatgcccttcttctctcccttgcacctgtacctcttggtctttgaataaagcctgagtaggaaggctagcaaaaaaaaaaaaaaaaaaaaaaaaaaaaaaaaaaaaaaaaaaaaaaaaaaaaaaaaaaaaaaaaaaaaaaaaaaaaaaaa

SEQ ID NO: 16552 - RNA, 9485 nt, synthetic construct
  source 1..9485: mol_type = other RNA
aggaaataagagagaaaagaagagtaagaagaaatataagagccaccatggcccctaagaagaagcgtaaagtgagccggatggaacgcctcgtctacgaggtgcggcagaagtgcagaaacatcgaggacatctgcatctcctgcggatctctgaacgtgaccctggagcacccactgttcatcggcggcatgtgccagaactgtaaaaactgttttctggagtgtgcctatcaatacgacgatgacggctaccagagctactgcaccatctgttgcggcggaagagaggtgctgatgtgtggaaataacaactgctgccggtgcttctgcgtggaatgcgtggacctgctggtgggccccggcgccgcccaggccgctattaaggaagatccttggaactgctacatgtgcggccacaagggcacatacggcctgctgagacggagagaggactggcctagcagactgcagatgttcttcgccaataaccacgaccaggagttcgacccccctaaggtgtaccctcccgtccccgccgagaagagaaagcccatccgggtcctgagcctgttcgatggcatcgccaccggtctgctggtgctgaaggacctgggcatccaggtggataggtacattgcctccgaggtgtgcgaggactccatcaccgtgggaatggtgcgtcatcagggcaagatcatgtacgtgggcgacgtgcggagcgtgacacagaagcatatccaggagtggggccctttcgacctggtgatcggcggcagcccttgcaatgacctgagcatcgtgaacccagcccggaagggcctgtacgagggaaccggcagactgttcttcgagttttacagactgctgcacgacgcccggcctaaggaaggcgacgaccggcccttcttttggctgttcgagaatgtggtggccatgggagtcagcgacaagcgggatattagccggttcctggagagcaaccccgtgatgatcgatgccaaggaagtgagcgccgcccaccgggccagatacttctggggcaatctgcctggcatgaacagacccctggccagcaccgtgaacgacaagctggagctgcaggagtgcctggagcacggccggatcgccaagttcagcaaggtgagaaccatcaccacccgaagcaacagcatcaaacaaggcaaggaccagcactttcctgtgttcatgaacgagaaggaggacatcctgtggtgtaccgagatggagagagtgttcgggttcccagtccactacacagatgtcagcaacatgtctagactggccagacagagactgctgggaagaagctggtccgtccctgtgatcagacacctgttcgcccctctgaaggagtacttcgcctgcgtgagcagcggcaacagcaacgccaacagccggggccccagcttctctagcggcctggtgccactgtccctgagagggagccacatgggccccatggagatctacaaaaccgtgagcgcctggaagcggcagcctgtgcgcgtgctgagcctgtttcggaatatcgataaagtcctgaaaagcctgggattcctggagagcggctctggctccggcggtggcaccctgaagtacgtggaggatgtgacaaacgtggtcagacgggatgtggagaagtggggccccttcgatctggtgtacggcagcacccaacccctgggcagctcttgtgaccggtgccctggctggtacatgtttcagttccaccggatcctgcagtacgccctgccgagacaggagtcccagcggccattcttttggattttcatggacaacttgctgctgaccgaggatgaccaggaaactaccactcggttcctgcagaccgaagccgtgaccctgcaggacgtgagaggccgggactaccagaacgccatgcgggtgtggtccaacatccctggactgaaaagcaagcacgcacctctgacccctaaagaagaggagtacctgcaggcccaggtgcggagcagaagcaagctggacgcccctaaggtggatctgctggtgaagaattgcctcctgcccctgagagagtacttcaagtatttcagccagaatagtctgcccctgggaggcagcggcggcggcgccctggtgacatttgaggacgtcgccgtgcggttcacccaggaggaatgggctctgctggatccttctcagaaaatcctgtaccgggacgtgatgagagagacataccggaatctgacctccgtgggcatcaactgggaatgttgggaccttgaagcctgcttcagaagcctgggaagaaacctgagagtgcaggtggtgaagagaaagtgcgagctgaccaacagcggcccctgcgccgagggcggcccaagcagcggcgcccctcctcccagcggcggcagcccagccggctccccaacctctaccgaggagggcacctctgagtccgccacccccgagagcggccctggcacctccaccgagcccagcgagggcagcgcacccggcagccctgccggcagccccacctccacagaggagggaaccagcaccgagcccagcgaaggcagcgccccaggcaccagcaccgagcctagtgagcaggagattaaacggatcaacaagatcagaagaagacttgtgaaagacagcaacaccaagaaggccggcaagacaggccccatgaaaaccctgctggttagagtgatgacacccgatctgagagagcggctggaaaacctgagaaagaagcctgaaaatatcccccagcccatcagcaatacatctagagccaacctgaataagctgctgaccgattacaccgaaatgaagaaggcgatcctgcatgtgtactgggaagagttccagaaggaccctgtgggcctgatgagccgggtggcccagcctgccagcaagaagatcgatcagaacaagctgaaacctgagatggacgagaagggcaacctgaccaccgccggctttgcctgctctcagtgtggccagcccctgttcgtgtacaagctggagcaggtgtctgagaagggcaaggcttacaccaactacttcggacggtgcaatgtggccgagcacgaaaagctgatcctgctggcccagctgaagcccgagaaggatagcgacgaagccgtgacatatagcctgggaaagtttgggcagagggccctggatttctacagcattcatgtgaccaaggagtccacccaccccgtgaagcccctggcccagatcgccggaaacagatacgcctccggacctgtgggaaaggccctgagcgacgcatgtatgggcacaatcgcctccttcctgtctaagtaccaggacatcatcatcgaacaccagaaggtggtgaagggcaaccagaagagactggagagcctgcgggagctggccggcaaggaaaacctggaataccctagcgtgaccctgccacctcagcctcacaccaaggagggcgttgatgcctacaacgaagtgatcgcccgggtgcgaatgtgggtgaacctgaacctgtggcagaagctgaagctaagcagagatgatgccaagcctctgctgagactgaagggattcccttcctttcctctggtcgagagacaggccaacgaagtggactggtgggacatggtgtgtaacgtgaagaagctgatcaacgagaaaaaggaggatggcaaggtgttttggcagaatctggctggctacaagagacaggaagccctgagaccatacctgagcagcgaggaagatcggaagaagggaaagaaattcgctcggtaccagctgggcgacctgctgctgcacctggaaaagaagcacggcgaggactggggaaaggtgtacgacgaggcctgggagcggattgacaagaaagtggaaggcctgagcaagcacatcaagctggaagaggaacggagaagcgaggacgcccagagcaaggccgccctgaccgactggctgcgggctaaggccagcttcgtgatcgagggcctgaaggaggccgacaaggacgagttctgcagatgcgagctgaagctgcagaagtggtacggggacctgcggggaaagcccttcgccatcgaagccgagaacagcatcctggacatcagcggcttcagcaagcagtacaactgtgccttcatctggcagaaggacggcgtgaagaagctgaacctgtacctgatcatcaactacttcaagggcggcaagctgcggttcaagaagatcaaacctgaagccttcgaagccaacagattctacaccgtgatcaacaaaaagagcggcgagatcgtgcccatggaggtgaacttcaacttcgacgaccccaacctgatcatcctgcctctggcctttggcaagagacagggcagagaattcatctggaacgacctgctgtccctggaaaccggcagcctgaagctggccaacggaagagtgatcgagaagacactgtacaacagaagaacccggcaggatgagcctgccctgttcgtggccctgaccttcgagcggcgggaggtcctggactcctccaatatcaaaccaatgaacctgatcggcgtggcaagaggcgaaaacatccccgccgtgatcgccctgaccgaccccgagggctgcccactgagccggtttaaggatagcctgggaaacccaacccacatcctgagaatcggcgagagctataaggagaagcagcggaccatccaggccaagaaggaggtggagcagcggagagccggcggctacagccggaagtacgccagcaaagccaagaatctggcagacgatatggtgagaaacaccgctagagatctgctgtactacgccgtgacccaggatgccatgctgatcttcgccaacctgagccggggcttcggccggcagggcaagcggaccttcatggccgagagacagtacacacggatggaggactggctgaccgccaagctggcctacgagggcctgagcaagacctacctgtccaagacactggcccagtacacctccaagacatgcagcaactgtgggtttaccatcaccagcgccgactacgacagggtgctggagaagctgaagaagacagcaacaggctggatgaccacaattaacggcaaggagctgaaggtggagggccagattacctactacaacagatacaagagacagaacgtagtcaaggacctgtccgtcgagctggatagactgagcgaagaatctgtgaacaacgacatctcctcctggacaaagggcagaagcggagaagctctgagcctcctgaagaaaagattctcccatagacccgtgcaggagaagttcgtgtgcctgaactgcggcttcgagacacacgcagccgagcaagccgccctgaacatcgccagatcctggctgttcctgcggagccaggagtacaagaaataccagacaaacaagacaaccggcaacaccgataagagagccttcgtcgagacctggcagtccttttaccggaagaagcttaaggaggtgtggaaacctgccgtgcggtctggcggatctggcggaggctcccaggtgcccgtgaccttcgaggacatcgccgtgagcttcagccaggaggagtggaagtacctggacgagggccagaagaacctgtactgggaggtgatgaaggagaactacgagaccctgatcagcctggccgacagcgaggtggagcaggaggacaagagggccaagaacagggaggagtgccccatgctgtggggcctgatccccaggcagagcaggaagaacagcgagaaggtgagctggggcggcccaagcagcggcgcccctcctcccagcggcggcagcccagccggctccccaacctctaccgaggagggcacctctgagtccgccacccccgagagcggccctggcacctccaccgagcccagcgagggcagcgcacccggcagccctgccggcagccccacctccacagaggagggaaccagcaccgagcccagcgaaggcagcgccccaggcaccagcaccgagcctagtgagcaggagattaaacggatcaacaagatcagaagaagacttgtgaaagacagcaacaccaagaaggccggcaagacaggccccatgaaaaccctgctggttagagtgatgacacccgatctgagagagcggctggaaaacctgagaaagaagcctgaaaatatcccccagcccatcagcaatacatctagagccaacctgaataagctgctgaccgattacaccgaaatgaagaaggcgatcctgcatgtgtactgggaagagttccagaaggaccctgtgggcctgatgagccgggtggcccagcctgccagcaagaagatcgatcagaacaagctgaaacctgagatggacgagaagggcaacctgaccaccgccggctttgcctgctctcagtgtggccagcccctgttcgtgtacaagctggagcaggtgtctgagaagggcaaggcttacaccaactacttcggacggtgcaatgtggccgagcacgaaaagctgatcctgctggcccagctgaagcccgagaaggatagcgacgaagccgtgacatatagcctgggaaagtttgggcagagggccctggatttctacagcattcatgtgaccaaggagtccacccaccccgtgaagcccctggcccagatcgccggaaacagatacgcctccggacctgtgggaaaggccctgagcgacgcatgtatgggcacaatcgcctccttcctgtctaagtaccaggacatcatcatcgaacaccagaaggtggtgaagggcaaccagaagagactggagagcctgcgggagctggccggcaaggaaaacctggaataccctagcgtgaccctgccacctcagcctcacaccaaggagggcgttgatgcctacaacgaagtgatcgcccgggtgcgaatgtgggtgaacctgaacctgtggcagaagctgaagctaagcagagatgatgccaagcctctgctgagactgaagggattcccttcctttcctctggtcgagagacaggccaacgaagtggactggtgggacatggtgtgtaacgtgaagaagctgatcaacgagaaaaaggaggatggcaaggtgttttggcagaatctggctggctacaagagacaggaagccctgagaccatacctgagcagcgaggaagatcggaagaagggaaagaaattcgctcggtaccagctgggcgacctgctgctgcacctggaaaagaagcacggcgaggactggggaaaggtgtacgacgaggcctgggagcggattgacaagaaagtggaaggcctgagcaagcacatcaagctggaagaggaacggagaagcgaggacgcccagagcaaggccgccctgaccgactggctgcgggctaaggccagcttcgtgatcgagggcctgaaggaggccgacaaggacgagttctgcagatgcgagctgaagctgcagaagtggtacggggacctgcggggaaagcccttcgccatcgaagccgagaacagcatcctggacatcagcggcttcagcaagcagtacaactgtgccttcatctggcagaaggacggcgtgaagaagctgaacctgtacctgatcatcaactacttcaagggcggcaagctgcggttcaagaagatcaaacctgaagccttcgaagccaacagattctacaccgtgatcaacaaaaagagcggcgagatcgtgcccatggaggtgaacttcaacttcgacgaccccaacctgatcatcctgcctctggcctttggcaagagacagggcagagaattcatctggaacgacctgctgtccctggaaaccggcagcctgaagctggccaacggaagagtgatcgagaagacactgtacaacagaagaacccggcaggatgagcctgccctgttcgtggccctgaccttcgagcggcgggaggtcctggactcctccaatatcaaaccaatgaacctgatcggcgtggcaagaggcgaaaacatccccgccgtgatcgccctgaccgaccccgagggctgcccactgagccggtttaaggatagcctgggaaacccaacccacatcctgagaatcggcgagagctataaggagaagcagcggaccatccaggccaagaaggaggtggagcagcggagagccggcggctacagccggaagtacgccagcaaagccaagaatctggcagacgatatggtgagaaacaccgctagagatctgctgtactacgccgtgacccaggatgccatgctgatcttcgccaacctgagccggggcttcggccggcagggcaagcggaccttcatggccgagagacagtacacacggatggaggactggctgaccgccaagctggcctacgagggcctgagcaagacctacctgtccaagacactggcccagtacacctccaagacatgcagcaactgtgggtttaccatcaccagcgccgactacgacagggtgctggagaagctgaagaagacagcaacaggctggatgaccacaattaacggcaaggagctgaaggtggagggccagattacctactacaacagatacaagagacagaacgtagtcaaggacctgtccgtcgagctggatagactgagcgaagaatctgtgaacaacgacatctcctcctggacaaagggcagaagcggagaagctctgagcctcctgaagaaaagattctcccatagacccgtgcaggagaagttcgtgtgcctgaactgcggcttcgagacacacgcagccgagcaagccgccctgaacatcgccagatcctggctgttcctgcggagccaggagtacaagaaataccagacaaacaagacaaccggcaacaccgataagagagccttcgtcgagacctggcagtccttttaccggaagaagcttaaggaggtgtggaaacctgccgtgcggtctggcggatctggcggaggctcctcaggtgcccgtgaccttcgaggacatcgccgtgagcttcagccaggaggagtggaagtacctggacgagggccagaagaacctgtactgggaggtgatgaaggagaactacgagaccctgatcagcctggccgacagcgaggtggagcaggaggacaagagggccaagaacagggaggagtgccccatgctgtggggcctgatccccaggcagagcaggaagaacagcgagaaggtgagctggggatctggctccggcagcggccccaagaaaaagagaaaagtctaagctgccttctgcggggcttgccttctggccatgcccttcttctctcccttgcacctgtacctcttggtctttgaataaagcctgagtaggaaggctagcaaaaaaaaaaaaaaaaaaaaaaaaaaaaaaaaaaaaaaaaaaaaaaaaaaaaaaaaaaaaaaaaaaaaaaaaaaaaaaaa

SEQ ID NO: 16553 - RNA, 9485 nt, synthetic construct
  source 1..9485: mol_type = other RNA
aggaaataagagagaaaagaagagtaagaagaaatataagagccaccatggcccctaagaagaagcgtaaagtgagccggatggaacgcctcgtctacgaggtgcggcagaagtgcagaaacatcgaggacatctgcatctcctgcggatctctgaacgtgaccctggagcacccactgttcatcggcggcatgtgccagaactgtaaaaactgttttctggagtgtgcctatcaatacgacgatgacggctaccagagctactgcaccatctgttgcggcggaagagaggtgctgatgtgtggaaataacaactgctgccggtgcttctgcgtggaatgcgtggacctgctggtgggccccggcgccgcccaggccgctattaaggaagatccttggaactgctacatgtgcggccacaagggcacatacggcctgctgagacggagagaggactggcctagcagactgcagatgttcttcgccaataaccacgaccaggagttcgacccccctaaggtgtaccctcccgtccccgccgagaagagaaagcccatccgggtcctgagcctgttcgatggcatcgccaccggtctgctggtgctgaaggacctgggcatccaggtggataggtacattgcctccgaggtgtgcgaggactccatcaccgtgggaatggtgcgtcatcagggcaagatcatgtacgtgggcgacgtgcggagcgtgacacagaagcatatccaggagtggggccctttcgacctggtgatcggcggcagcccttgcaatgacctgagcatcgtgaacccagcccggaagggcctgtacgagggaaccggcagactgttcttcgagttttacagactgctgcacgacgcccggcctaaggaaggcgacgaccggcccttcttttggctgttcgagaatgtggtggccatgggagtcagcgacaagcgggatattagccggttcctggagagcaaccccgtgatgatcgatgccaaggaagtgagcgccgcccaccgggccagatacttctggggcaatctgcctggcatgaacagacccctggccagcaccgtgaacgacaagctggagctgcaggagtgcctggagcacggccggatcgccaagttcagcaaggtgagaaccatcaccacccgaagcaacagcatcaaacaaggcaaggaccagcactttcctgtgttcatgaacgagaaggaggacatcctgtggtgtaccgagatggagagagtgttcgggttcccagtccactacacagatgtcagcaacatgtctagactggccagacagagactgctgggaagaagctggtccgtccctgtgatcagacacctgttcgcccctctgaaggagtacttcgcctgcgtgagcagcggcaacagcaacgccaacagccggggccccagcttctctagcggcctggtgccactgtccctgagagggagccacatgggccccatggagatctacaaaaccgtgagcgcctggaagcggcagcctgtgcgcgtgctgagcctgtttcggaatatcgataaagtcctgaaaagcctgggattcctggagagcggctctggctccggcggtggcaccctgaagtacgtggaggatgtgacaaacgtggtcagacgggatgtggagaagtggggccccttcgatctggtgtacggcagcacccaacccctgggcagctcttgtgaccggtgccctggctggtacatgtttcagttccaccggatcctgcagtacgccctgccgagacaggagtcccagcggccattcttttggattttcatggacaacttgctgctgaccgaggatgaccaggaaactaccactcggttcctgcagaccgaagccgtgaccctgcaggacgtgagaggccgggactaccagaacgccatgcgggtgtggtccaacatccctggactgaaaagcaagcacgcacctctgacccctaaagaagaggagtacctgcaggcccaggtgcggagcagaagcaagctggacgcccctaaggtggatctgctggtgaagaattgcctcctgcccctgagagagtacttcaagtatttcagccagaatagtctgcccctgggaggcagcggcggcggcgccctggtgacatttgaggacgtcgccgtgcggttcacccaggaggaatgggctctgctggatccttctcagaaaatcctgtaccgggacgtgatgagagagacataccggaatctgacctccgtgggcatcaactgggaatgttgggaccttgaagcctgcttcagaagcctgggaagaaacctgagagtgcaggtggtgaagagaaagtgcgagctgaccaacagcggcccctgcgccgagggcggcccaagcagcggcgcccctcctcccagcggcggcagcccagccggctccccaacctctaccgaggagggcacctctgagtccgccacccccgagagcggccctggcacctccaccgagcccagcgagggcagcgcacccggcagccctgccggcagccccacctccacagaggagggaaccagcaccgagcccagcgaaggcagcgccccaggcaccagcaccgagcctagtgagcaggagattaaacggatcaacaagatcagaagaagacttgtgaaagacagcaacaccaagaaggccggcaagacaggccccatgaaaaccctgctggttagagtgatgacacccgatctgagagagcggctggaaaacctgagaaagaagcctgaaaatatcccccagcccatcagcaatacatctagagccaacctgaataagctgctgaccgattacaccgaaatgaagaaggcgatcctgcatgtgtactgggaagagttccagaaggaccctgtgggcctgatgagccgggtggcccagcctgccagcaagaagatcgatcagaacaagctgaaacctgagatggacgagaagggcaacctgaccaccgccggctttgcctgctctcagtgtggccagcccctgttcgtgtacaagctggagcaggtgtctgagaagggcaaggcttacaccaactacttcggacggtgcaatgtggccgagcacgaaaagctgatcctgctggcccagctgaagcccgagaaggatagcgacgaagccgtgacatatagcctgggaaagtttgggcagagggccctggatttctacagcattcatgtgaccaaggagtccacccaccccgtgaagcccctggcccagatcgccggaaacagatacgcctccggacctgtgggaaaggccctgagcgacgcatgtatgggcacaatcgcctccttcctgtctaagtaccaggacatcatcatcgaacaccagaaggtggtgaagggcaaccagaagagactggagagcctgcgggagctggccggcaaggaaaacctggaataccctagcgtgaccctgccacctcagcctcacaccaaggagggcgttgatgcctacaacgaagtgatcgcccgggtgcgaatgtgggtgaacctgaacctgtggcagaagctgaagctaagcagagatgatgccaagcctctgctgagactgaagggattcccttcctttcctctggtcgagagacaggccaacgaagtggactggtgggacatggtgtgtaacgtgaagaagctgatcaacgagaaaaaggaggatggcaaggtgttttggcagaatctggctggctacaagagacaggaagccctgagaccatacctgagcagcgaggaagatcggaagaagggaaagaaattcgctcggtaccagctgggcgacctgctgctgcacctggaaaagaagcacggcgaggactggggaaaggtgtacgacgaggcctgggagcggattgacaagaaagtggaaggcctgagcaagcacatcaagctggaagaggaacggagaagcgaggacgcccagagcaaggccgccctgaccgactggctgcgggctaaggccagcttcgtgatcgagggcctgaaggaggccgacaaggacgagttctgcagatgcgagctgaagctgcagaagtggtacggggacctgcggggaaagcccttcgccatcgaagccgagaacagcatcctggacatcagcggcttcagcaagcagtacaactgtgccttcatctggcagaaggacggcgtgaagaagctgaacctgtacctgatcatcaactacttcaagggcggcaagctgcggttcaagaagatcaaacctgaagccttcgaagccaacagattctacaccgtgatcaacaaaaagagcggcgagatcgtgcccatggaggtgaacttcaacttcgacgaccccaacctgatcatcctgcctctggcctttggcaagagacagggcagagaattcatctggaacgacctgctgtccctggaaaccggcagcctgaagctggccaacggaagagtgatcgagaagacactgtacaacagaagaacccggcaggatgagcctgccctgttcgtggccctgaccttcgagcggcgggaggtcctggactcctccaatatcaaaccaatgaacctgatcggcgtggcaagaggcgaaaacatccccgccgtgatcgccctgaccgaccccgagggctgcccactgagccggtttaaggatagcctgggaaacccaacccacatcctgagaatcggcgagagctataaggagaagcagcggaccatccaggccaagaaggaggtggagcagcggagagccggcggctacagccggaagtacgccagcaaagccaagaatctggcagacgatatggtgagaaacaccgctagagatctgctgtactacgccgtgacccaggatgccatgctgatcttcgccaacctgagccggggcttcggccggcagggcaagcggaccttcatggccgagagacagtacacacggatggaggactggctgaccgccaagctggcctacgagggcctgagcaagacctacctgtccaagacactggcccagtacacctccaagacatgcagcaactgtgggtttaccatcaccagcgccgactacgacagggtgctggagaagctgaagaagacagcaacaggctggatgaccacaattaacggcaaggagctgaaggtggagggccagattacctactacaacagatacaagagacagaacgtagtcaaggacctgtccgtcgagctggatagactgagcgaagaatctgtgaacaacgacatctcctcctggacaaagggcagaagcggagaagctctgagcctcctgaagaaaagattctcccatagacccgtgcaggagaagttcgtgtgcctgaactgcggcttcgagacacacgcagccgagcaagccgccctgaacatcgccagatcctggctgttcctgcggagccaggagtacaagaaataccagacaaacaagacaaccggcaacaccgataagagagccttcgtcgagacctggcagtccttttaccggaagaagcttaaggaggtgtggaaacctgccgtgcggtctggcggatctggcggaggctccatggaggagctgctgagcttccccgacgtggccatcgacttcagcgccgaggagtgcgagtgcctggacctggcccagtggaacctgtacaaggaggtgatgctggagaactacagcaacctggtgttcctgggcctgagcttcagcaagccctacctggtgaccttcctggagcagagcagcgagccctggagcgtgaagaggaagagcgccgccgccagccaccccggcagcaagccccacggcggcccaagcagcggcgcccctcctcccagcggcggcagcccagccggctccccaacctctaccgaggagggcacctctgagtccgccacccccgagagcggccctggcacctccaccgagcccagcgagggcagcgcacccggcagccctgccggcagccccacctccacagaggagggaaccagcaccgagcccagcgaaggcagcgccccaggcaccagcaccgagcctagtgagcaggagattaaacggatcaacaagatcagaagaagacttgtgaaagacagcaacaccaagaaggccggcaagacaggccccatgaaaaccctgctggttagagtgatgacacccgatctgagagagcggctggaaaacctgagaaagaagcctgaaaatatcccccagcccatcagcaatacatctagagccaacctgaataagctgctgaccgattacaccgaaatgaagaaggcgatcctgcatgtgtactgggaagagttccagaaggaccctgtgggcctgatgagccgggtggcccagcctgccagcaagaagatcgatcagaacaagctgaaacctgagatggacgagaagggcaacctgaccaccgccggctttgcctgctctcagtgtggccagcccctgttcgtgtacaagctggagcaggtgtctgagaagggcaaggcttacaccaactacttcggacggtgcaatgtggccgagcacgaaaagctgatcctgctggcccagctgaagcccgagaaggatagcgacgaagccgtgacatatagcctgggaaagtttgggcagagggccctggatttctacagcattcatgtgaccaaggagtccacccaccccgtgaagcccctggcccagatcgccggaaacagatacgcctccggacctgtgggaaaggccctgagcgacgcatgtatgggcacaatcgcctccttcctgtctaagtaccaggacatcatcatcgaacaccagaaggtggtgaagggcaaccagaagagactggagagcctgcgggagctggccggcaaggaaaacctggaataccctagcgtgaccctgccacctcagcctcacaccaaggagggcgttgatgcctacaacgaagtgatcgcccgggtgcgaatgtgggtgaacctgaacctgtggcagaagctgaagctaagcagagatgatgccaagcctctgctgagactgaagggattcccttcctttcctctggtcgagagacaggccaacgaagtggactggtgggacatggtgtgtaacgtgaagaagctgatcaacgagaaaaaggaggatggcaaggtgttttggcagaatctggctggctacaagagacaggaagccctgagaccatacctgagcagcgaggaagatcggaagaagggaaagaaattcgctcggtaccagctgggcgacctgctgctgcacctggaaaagaagcacggcgaggactggggaaaggtgtacgacgaggcctgggagcggattgacaagaaagtggaaggcctgagcaagcacatcaagctggaagaggaacggagaagcgaggacgcccagagcaaggccgccctgaccgactggctgcgggctaaggccagcttcgtgatcgagggcctgaaggaggccgacaaggacgagttctgcagatgcgagctgaagctgcagaagtggtacggggacctgcggggaaagcccttcgccatcgaagccgagaacagcatcctggacatcagcggcttcagcaagcagtacaactgtgccttcatctggcagaaggacggcgtgaagaagctgaacctgtacctgatcatcaactacttcaagggcggcaagctgcggttcaagaagatcaaacctgaagccttcgaagccaacagattctacaccgtgatcaacaaaaagagcggcgagatcgtgcccatggaggtgaacttcaacttcgacgaccccaacctgatcatcctgcctctggcctttggcaagagacagggcagagaattcatctggaacgacctgctgtccctggaaaccggcagcctgaagctggccaacggaagagtgatcgagaagacactgtacaacagaagaacccggcaggatgagcctgccctgttcgtggccctgaccttcgagcggcgggaggtcctggactcctccaatatcaaaccaatgaacctgatcggcgtggcaagaggcgaaaacatccccgccgtgatcgccctgaccgaccccgagggctgcccactgagccggtttaaggatagcctgggaaacccaacccacatcctgagaatcggcgagagctataaggagaagcagcggaccatccaggccaagaaggaggtggagcagcggagagccggcggctacagccggaagtacgccagcaaagccaagaatctggcagacgatatggtgagaaacaccgctagagatctgctgtactacgccgtgacccaggatgccatgctgatcttcgccaacctgagccggggcttcggccggcagggcaagcggaccttcatggccgagagacagtacacacggatggaggactggctgaccgccaagctggcctacgagggcctgagcaagacctacctgtccaagacactggcccagtacacctccaagacatgcagcaactgtgggtttaccatcaccagcgccgactacgacagggtgctggagaagctgaagaagacagcaacaggctggatgaccacaattaacggcaaggagctgaaggtggagggccagattacctactacaacagatacaagagacagaacgtagtcaaggacctgtccgtcgagctggatagactgagcgaagaatctgtgaacaacgacatctcctcctggacaaagggcagaagcggagaagctctgagcctcctgaagaaaagattctcccatagacccgtgcaggagaagttcgtgtgcctgaactgcggcttcgagacacacgcagccgagcaagccgccctgaacatcgccagatcctggctgttcctgcggagccaggagtacaagaaataccagacaaacaagacaaccggcaacaccgataagagagccttcgtcgagacctggcagtccttttaccggaagaagcttaaggaggtgtggaaacctgccgtgcggtctggcggatctggcggaggctcctatggaggagctgctgagcttccccgacgtggccatcgacttcagcgccgaggagtgcgagtgcctggacctggcccagtggaacctgtacaaggaggtgatgctggagaactacagcaacctggtgttcctgggcctgagcttcagcaagccctacctggtgaccttcctggagcagagcagcgagccctggagcgtgaagaggaagagcgccgccgccagccaccccggcagcaagccccacggatctggctccggcagcggccccaagaaaaagagaaaagtctaagctgccttctgcggggcttgccttctggccatgcccttcttctctcccttgcacctgtacctcttggtctttgaataaagcctgagtaggaaggctagcaaaaaaaaaaaaaaaaaaaaaaaaaaaaaaaaaaaaaaaaaaaaaaaaaaaaaaaaaaaaaaaaaaaaaaaaaaaaaaaa

SEQ ID NO: 16554 - RNA, 9485 nt, synthetic construct
  source 1..9485: mol_type = other RNA
aggaaataagagagaaaagaagagtaagaagaaatataagagccaccatggcccctaagaagaagcgtaaagtgagccggatggaacgcctcgtctacgaggtgcggcagaagtgcagaaacatcgaggacatctgcatctcctgcggatctctgaacgtgaccctggagcacccactgttcatcggcggcatgtgccagaactgtaaaaactgttttctggagtgtgcctatcaatacgacgatgacggctaccagagctactgcaccatctgttgcggcggaagagaggtgctgatgtgtggaaataacaactgctgccggtgcttctgcgtggaatgcgtggacctgctggtgggccccggcgccgcccaggccgctattaaggaagatccttggaactgctacatgtgcggccacaagggcacatacggcctgctgagacggagagaggactggcctagcagactgcagatgttcttcgccaataaccacgaccaggagttcgacccccctaaggtgtaccctcccgtccccgccgagaagagaaagcccatccgggtcctgagcctgttcgatggcatcgccaccggtctgctggtgctgaaggacctgggcatccaggtggataggtacattgcctccgaggtgtgcgaggactccatcaccgtgggaatggtgcgtcatcagggcaagatcatgtacgtgggcgacgtgcggagcgtgacacagaagcatatccaggagtggggccctttcgacctggtgatcggcggcagcccttgcaatgacctgagcatcgtgaacccagcccggaagggcctgtacgagggaaccggcagactgttcttcgagttttacagactgctgcacgacgcccggcctaaggaaggcgacgaccggcccttcttttggctgttcgagaatgtggtggccatgggagtcagcgacaagcgggatattagccggttcctggagagcaaccccgtgatgatcgatgccaaggaagtgagcgccgcccaccgggccagatacttctggggcaatctgcctggcatgaacagacccctggccagcaccgtgaacgacaagctggagctgcaggagtgcctggagcacggccggatcgccaagttcagcaaggtgagaaccatcaccacccgaagcaacagcatcaaacaaggcaaggaccagcactttcctgtgttcatgaacgagaaggaggacatcctgtggtgtaccgagatggagagagtgttcgggttcccagtccactacacagatgtcagcaacatgtctagactggccagacagagactgctgggaagaagctggtccgtccctgtgatcagacacctgttcgcccctctgaaggagtacttcgcctgcgtgagcagcggcaacagcaacgccaacagccggggccccagcttctctagcggcctggtgccactgtccctgagagggagccacatgggccccatggagatctacaaaaccgtgagcgcctggaagcggcagcctgtgcgcgtgctgagcctgtttcggaatatcgataaagtcctgaaaagcctgggattcctggagagcggctctggctccggcggtggcaccctgaagtacgtggaggatgtgacaaacgtggtcagacgggatgtggagaagtggggccccttcgatctggtgtacggcagcacccaacccctgggcagctcttgtgaccggtgccctggctggtacatgtttcagttccaccggatcctgcagtacgccctgccgagacaggagtcccagcggccattcttttggattttcatggacaacttgctgctgaccgaggatgaccaggaaactaccactcggttcctgcagaccgaagccgtgaccctgcaggacgtgagaggccgggactaccagaacgccatgcgggtgtggtccaacatccctggactgaaaagcaagcacgcacctctgacccctaaagaagaggagtacctgcaggcccaggtgcggagcagaagcaagctggacgcccctaaggtggatctgctggtgaagaattgcctcctgcccctgagagagtacttcaagtatttcagccagaatagtctgcccctgggaggcagcggcggcggcgccctggtgacatttgaggacgtcgccgtgcggttcacccaggaggaatgggctctgctggatccttctcagaaaatcctgtaccgggacgtgatgagagagacataccggaatctgacctccgtgggcatcaactgggaatgttgggaccttgaagcctgcttcagaagcctgggaagaaacctgagagtgcaggtggtgaagagaaagtgcgagctgaccaacagcggcccctgcgccgagggcggcccaagcagcggcgcccctcctcccagcggcggcagcccagccggctccccaacctctaccgaggagggcacctctgagtccgccacccccgagagcggccctggcacctccaccgagcccagcgagggcagcgcacccggcagccctgccggcagccccacctccacagaggagggaaccagcaccgagcccagcgaaggcagcgccccaggcaccagcaccgagcctagtgagcaggagattaaacggatcaacaagatcagaagaagacttgtgaaagacagcaacaccaagaaggccggcaagacaggccccatgaaaaccctgctggttagagtgatgacacccgatctgagagagcggctggaaaacctgagaaagaagcctgaaaatatcccccagcccatcagcaatacatctagagccaacctgaataagctgctgaccgattacaccgaaatgaagaaggcgatcctgcatgtgtactgggaagagttccagaaggaccctgtgggcctgatgagccgggtggcccagcctgccagcaagaagatcgatcagaacaagctgaaacctgagatggacgagaagggcaacctgaccaccgccggctttgcctgctctcagtgtggccagcccctgttcgtgtacaagctggagcaggtgtctgagaagggcaaggcttacaccaactacttcggacggtgcaatgtggccgagcacgaaaagctgatcctgctggcccagctgaagcccgagaaggatagcgacgaagccgtgacatatagcctgggaaagtttgggcagagggccctggatttctacagcattcatgtgaccaaggagtccacccaccccgtgaagcccctggcccagatcgccggaaacagatacgcctccggacctgtgggaaaggccctgagcgacgcatgtatgggcacaatcgcctccttcctgtctaagtaccaggacatcatcatcgaacaccagaaggtggtgaagggcaaccagaagagactggagagcctgcgggagctggccggcaaggaaaacctggaataccctagcgtgaccctgccacctcagcctcacaccaaggagggcgttgatgcctacaacgaagtgatcgcccgggtgcgaatgtgggtgaacctgaacctgtggcagaagctgaagctaagcagagatgatgccaagcctctgctgagactgaagggattcccttcctttcctctggtcgagagacaggccaacgaagtggactggtgggacatggtgtgtaacgtgaagaagctgatcaacgagaaaaaggaggatggcaaggtgttttggcagaatctggctggctacaagagacaggaagccctgagaccatacctgagcagcgaggaagatcggaagaagggaaagaaattcgctcggtaccagctgggcgacctgctgctgcacctggaaaagaagcacggcgaggactggggaaaggtgtacgacgaggcctgggagcggattgacaagaaagtggaaggcctgagcaagcacatcaagctggaagaggaacggagaagcgaggacgcccagagcaaggccgccctgaccgactggctgcgggctaaggccagcttcgtgatcgagggcctgaaggaggccgacaaggacgagttctgcagatgcgagctgaagctgcagaagtggtacggggacctgcggggaaagcccttcgccatcgaagccgagaacagcatcctggacatcagcggcttcagcaagcagtacaactgtgccttcatctggcagaaggacggcgtgaagaagctgaacctgtacctgatcatcaactacttcaagggcggcaagctgcggttcaagaagatcaaacctgaagccttcgaagccaacagattctacaccgtgatcaacaaaaagagcggcgagatcgtgcccatggaggtgaacttcaacttcgacgaccccaacctgatcatcctgcctctggcctttggcaagagacagggcagagaattcatctggaacgacctgctgtccctggaaaccggcagcctgaagctggccaacggaagagtgatcgagaagacactgtacaacagaagaacccggcaggatgagcctgccctgttcgtggccctgaccttcgagcggcgggaggtcctggactcctccaatatcaaaccaatgaacctgatcggcgtggcaagaggcgaaaacatccccgccgtgatcgccctgaccgaccccgagggctgcccactgagccggtttaaggatagcctgggaaacccaacccacatcctgagaatcggcgagagctataaggagaagcagcggaccatccaggccaagaaggaggtggagcagcggagagccggcggctacagccggaagtacgccagcaaagccaagaatctggcagacgatatggtgagaaacaccgctagagatctgctgtactacgccgtgacccaggatgccatgctgatcttcgccaacctgagccggggcttcggccggcagggcaagcggaccttcatggccgagagacagtacacacggatggaggactggctgaccgccaagctggcctacgagggcctgagcaagacctacctgtccaagacactggcccagtacacctccaagacatgcagcaactgtgggtttaccatcaccagcgccgactacgacagggtgctggagaagctgaagaagacagcaacaggctggatgaccacaattaacggcaaggagctgaaggtggagggccagattacctactacaacagatacaagagacagaacgtagtcaaggacctgtccgtcgagctggatagactgagcgaagaatctgtgaacaacgacatctcctcctggacaaagggcagaagcggagaagctctgagcctcctgaagaaaagattctcccatagacccgtgcaggagaagttcgtgtgcctgaactgcggcttcgagacacacgcagccgagcaagccgccctgaacatcgccagatcctggctgttcctgcggagccaggagtacaagaaataccagacaaacaagacaaccggcaacaccgataagagagccttcgtcgagacctggcagtccttttaccggaagaagcttaaggaggtgtggaaacctgccgtgcggtctggcggatctggcggaggctccctgcccgacagcctgaccttcaccgacgtggccatcgacttcagccaggacgagtgggagtggctgagcctggcccagaggagcctgtacaggaaggtgatgctggagaactacatgaacctggtgagcgtgggcctgtgcatcagcaagcccgacgtgatcagcctgctggagcaggagaaggagccctggatggtgaccgagcagatcaccaggggcctgtgcgccgacctggagtacatgggcggcccaagcagcggcgcccctcctcccagcggcggcagcccagccggctccccaacctctaccgaggagggcacctctgagtccgccacccccgagagcggccctggcacctccaccgagcccagcgagggcagcgcacccggcagccctgccggcagccccacctccacagaggagggaaccagcaccgagcccagcgaaggcagcgccccaggcaccagcaccgagcctagtgagcaggagattaaacggatcaacaagatcagaagaagacttgtgaaagacagcaacaccaagaaggccggcaagacaggccccatgaaaaccctgctggttagagtgatgacacccgatctgagagagcggctggaaaacctgagaaagaagcctgaaaatatcccccagcccatcagcaatacatctagagccaacctgaataagctgctgaccgattacaccgaaatgaagaaggcgatcctgcatgtgtactgggaagagttccagaaggaccctgtgggcctgatgagccgggtggcccagcctgccagcaagaagatcgatcagaacaagctgaaacctgagatggacgagaagggcaacctgaccaccgccggctttgcctgctctcagtgtggccagcccctgttcgtgtacaagctggagcaggtgtctgagaagggcaaggcttacaccaactacttcggacggtgcaatgtggccgagcacgaaaagctgatcctgctggcccagctgaagcccgagaaggatagcgacgaagccgtgacatatagcctgggaaagtttgggcagagggccctggatttctacagcattcatgtgaccaaggagtccacccaccccgtgaagcccctggcccagatcgccggaaacagatacgcctccggacctgtgggaaaggccctgagcgacgcatgtatgggcacaatcgcctccttcctgtctaagtaccaggacatcatcatcgaacaccagaaggtggtgaagggcaaccagaagagactggagagcctgcgggagctggccggcaaggaaaacctggaataccctagcgtgaccctgccacctcagcctcacaccaaggagggcgttgatgcctacaacgaagtgatcgcccgggtgcgaatgtgggtgaacctgaacctgtggcagaagctgaagctaagcagagatgatgccaagcctctgctgagactgaagggattcccttcctttcctctggtcgagagacaggccaacgaagtggactggtgggacatggtgtgtaacgtgaagaagctgatcaacgagaaaaaggaggatggcaaggtgttttggcagaatctggctggctacaagagacaggaagccctgagaccatacctgagcagcgaggaagatcggaagaagggaaagaaattcgctcggtaccagctgggcgacctgctgctgcacctggaaaagaagcacggcgaggactggggaaaggtgtacgacgaggcctgggagcggattgacaagaaagtggaaggcctgagcaagcacatcaagctggaagaggaacggagaagcgaggacgcccagagcaaggccgccctgaccgactggctgcgggctaaggccagcttcgtgatcgagggcctgaaggaggccgacaaggacgagttctgcagatgcgagctgaagctgcagaagtggtacggggacctgcggggaaagcccttcgccatcgaagccgagaacagcatcctggacatcagcggcttcagcaagcagtacaactgtgccttcatctggcagaaggacggcgtgaagaagctgaacctgtacctgatcatcaactacttcaagggcggcaagctgcggttcaagaagatcaaacctgaagccttcgaagccaacagattctacaccgtgatcaacaaaaagagcggcgagatcgtgcccatggaggtgaacttcaacttcgacgaccccaacctgatcatcctgcctctggcctttggcaagagacagggcagagaattcatctggaacgacctgctgtccctggaaaccggcagcctgaagctggccaacggaagagtgatcgagaagacactgtacaacagaagaacccggcaggatgagcctgccctgttcgtggccctgaccttcgagcggcgggaggtcctggactcctccaatatcaaaccaatgaacctgatcggcgtggcaagaggcgaaaacatccccgccgtgatcgccctgaccgaccccgagggctgcccactgagccggtttaaggatagcctgggaaacccaacccacatcctgagaatcggcgagagctataaggagaagcagcggaccatccaggccaagaaggaggtggagcagcggagagccggcggctacagccggaagtacgccagcaaagccaagaatctggcagacgatatggtgagaaacaccgctagagatctgctgtactacgccgtgacccaggatgccatgctgatcttcgccaacctgagccggggcttcggccggcagggcaagcggaccttcatggccgagagacagtacacacggatggaggactggctgaccgccaagctggcctacgagggcctgagcaagacctacctgtccaagacactggcccagtacacctccaagacatgcagcaactgtgggtttaccatcaccagcgccgactacgacagggtgctggagaagctgaagaagacagcaacaggctggatgaccacaattaacggcaaggagctgaaggtggagggccagattacctactacaacagatacaagagacagaacgtagtcaaggacctgtccgtcgagctggatagactgagcgaagaatctgtgaacaacgacatctcctcctggacaaagggcagaagcggagaagctctgagcctcctgaagaaaagattctcccatagacccgtgcaggagaagttcgtgtgcctgaactgcggcttcgagacacacgcagccgagcaagccgccctgaacatcgccagatcctggctgttcctgcggagccaggagtacaagaaataccagacaaacaagacaaccggcaacaccgataagagagccttcgtcgagacctggcagtccttttaccggaagaagcttaaggaggtgtggaaacctgccgtgcggtctggcggatctggcggaggctcctctgcccgacagcctgaccttcaccgacgtggccatcgacttcagccaggacgagtgggagtggctgagcctggcccagaggagcctgtacaggaaggtgatgctggagaactacatgaacctggtgagcgtgggcctgtgcatcagcaagcccgacgtgatcagcctgctggagcaggagaaggagccctggatggtgaccgagcagatcaccaggggcctgtgcgccgacctggagtacatgggatctggctccggcagcggccccaagaaaaagagaaaagtctaagctgccttctgcggggcttgccttctggccatgcccttcttctctcccttgcacctgtacctcttggtctttgaataaagcctgagtaggaaggctagcaaaaaaaaaaaaaaaaaaaaaaaaaaaaaaaaaaaaaaaaaaaaaaaaaaaaaaaaaaaaaaaaaaaaaaaaaaaaaaaa

SEQ ID NO: 16555 - RNA, 9485 nt, synthetic construct
  source 1..9485: mol_type = other RNA
aggaaataagagagaaaagaagagtaagaagaaatataagagccaccatggcccctaagaagaagcgtaaagtgagccggatggaacgcctcgtctacgaggtgcggcagaagtgcagaaacatcgaggacatctgcatctcctgcggatctctgaacgtgaccctggagcacccactgttcatcggcggcatgtgccagaactgtaaaaactgttttctggagtgtgcctatcaatacgacgatgacggctaccagagctactgcaccatctgttgcggcggaagagaggtgctgatgtgtggaaataacaactgctgccggtgcttctgcgtggaatgcgtggacctgctggtgggccccggcgccgcccaggccgctattaaggaagatccttggaactgctacatgtgcggccacaagggcacatacggcctgctgagacggagagaggactggcctagcagactgcagatgttcttcgccaataaccacgaccaggagttcgacccccctaaggtgtaccctcccgtccccgccgagaagagaaagcccatccgggtcctgagcctgttcgatggcatcgccaccggtctgctggtgctgaaggacctgggcatccaggtggataggtacattgcctccgaggtgtgcgaggactccatcaccgtgggaatggtgcgtcatcagggcaagatcatgtacgtgggcgacgtgcggagcgtgacacagaagcatatccaggagtggggccctttcgacctggtgatcggcggcagcccttgcaatgacctgagcatcgtgaacccagcccggaagggcctgtacgagggaaccggcagactgttcttcgagttttacagactgctgcacgacgcccggcctaaggaaggcgacgaccggcccttcttttggctgttcgagaatgtggtggccatgggagtcagcgacaagcgggatattagccggttcctggagagcaaccccgtgatgatcgatgccaaggaagtgagcgccgcccaccgggccagatacttctggggcaatctgcctggcatgaacagacccctggccagcaccgtgaacgacaagctggagctgcaggagtgcctggagcacggccggatcgccaagttcagcaaggtgagaaccatcaccacccgaagcaacagcatcaaacaaggcaaggaccagcactttcctgtgttcatgaacgagaaggaggacatcctgtggtgtaccgagatggagagagtgttcgggttcccagtccactacacagatgtcagcaacatgtctagactggccagacagagactgctgggaagaagctggtccgtccctgtgatcagacacctgttcgcccctctgaaggagtacttcgcctgcgtgagcagcggcaacagcaacgccaacagccggggccccagcttctctagcggcctggtgccactgtccctgagagggagccacatgggccccatggagatctacaaaaccgtgagcgcctggaagcggcagcctgtgcgcgtgctgagcctgtttcggaatatcgataaagtcctgaaaagcctgggattcctggagagcggctctggctccggcggtggcaccctgaagtacgtggaggatgtgacaaacgtggtcagacgggatgtggagaagtggggccccttcgatctggtgtacggcagcacccaacccctgggcagctcttgtgaccggtgccctggctggtacatgtttcagttccaccggatcctgcagtacgccctgccgagacaggagtcccagcggccattcttttggattttcatggacaacttgctgctgaccgaggatgaccaggaaactaccactcggttcctgcagaccgaagccgtgaccctgcaggacgtgagaggccgggactaccagaacgccatgcgggtgtggtccaacatccctggactgaaaagcaagcacgcacctctgacccctaaagaagaggagtacctgcaggcccaggtgcggagcagaagcaagctggacgcccctaaggtggatctgctggtgaagaattgcctcctgcccctgagagagtacttcaagtatttcagccagaatagtctgcccctgggaggcagcggcggcggcgccctggtgacatttgaggacgtcgccgtgcggttcacccaggaggaatgggctctgctggatccttctcagaaaatcctgtaccgggacgtgatgagagagacataccggaatctgacctccgtgggcatcaactgggaatgttgggaccttgaagcctgcttcagaagcctgggaagaaacctgagagtgcaggtggtgaagagaaagtgcgagctgaccaacagcggcccctgcgccgagggcggcccaagcagcggcgcccctcctcccagcggcggcagcccagccggctccccaacctctaccgaggagggcacctctgagtccgccacccccgagagcggccctggcacctccaccgagcccagcgagggcagcgcacccggcagccctgccggcagccccacctccacagaggagggaaccagcaccgagcccagcgaaggcagcgccccaggcaccagcaccgagcctagtgagcaggagattaaacggatcaacaagatcagaagaagacttgtgaaagacagcaacaccaagaaggccggcaagacaggccccatgaaaaccctgctggttagagtgatgacacccgatctgagagagcggctggaaaacctgagaaagaagcctgaaaatatcccccagcccatcagcaatacatctagagccaacctgaataagctgctgaccgattacaccgaaatgaagaaggcgatcctgcatgtgtactgggaagagttccagaaggaccctgtgggcctgatgagccgggtggcccagcctgccagcaagaagatcgatcagaacaagctgaaacctgagatggacgagaagggcaacctgaccaccgccggctttgcctgctctcagtgtggccagcccctgttcgtgtacaagctggagcaggtgtctgagaagggcaaggcttacaccaactacttcggacggtgcaatgtggccgagcacgaaaagctgatcctgctggcccagctgaagcccgagaaggatagcgacgaagccgtgacatatagcctgggaaagtttgggcagagggccctggatttctacagcattcatgtgaccaaggagtccacccaccccgtgaagcccctggcccagatcgccggaaacagatacgcctccggacctgtgggaaaggccctgagcgacgcatgtatgggcacaatcgcctccttcctgtctaagtaccaggacatcatcatcgaacaccagaaggtggtgaagggcaaccagaagagactggagagcctgcgggagctggccggcaaggaaaacctggaataccctagcgtgaccctgccacctcagcctcacaccaaggagggcgttgatgcctacaacgaagtgatcgcccgggtgcgaatgtgggtgaacctgaacctgtggcagaagctgaagctaagcagagatgatgccaagcctctgctgagactgaagggattcccttcctttcctctggtcgagagacaggccaacgaagtggactggtgggacatggtgtgtaacgtgaagaagctgatcaacgagaaaaaggaggatggcaaggtgttttggcagaatctggctggctacaagagacaggaagccctgagaccatacctgagcagcgaggaagatcggaagaagggaaagaaattcgctcggtaccagctgggcgacctgctgctgcacctggaaaagaagcacggcgaggactggggaaaggtgtacgacgaggcctgggagcggattgacaagaaagtggaaggcctgagcaagcacatcaagctggaagaggaacggagaagcgaggacgcccagagcaaggccgccctgaccgactggctgcgggctaaggccagcttcgtgatcgagggcctgaaggaggccgacaaggacgagttctgcagatgcgagctgaagctgcagaagtggtacggggacctgcggggaaagcccttcgccatcgaagccgagaacagcatcctggacatcagcggcttcagcaagcagtacaactgtgccttcatctggcagaaggacggcgtgaagaagctgaacctgtacctgatcatcaactacttcaagggcggcaagctgcggttcaagaagatcaaacctgaagccttcgaagccaacagattctacaccgtgatcaacaaaaagagcggcgagatcgtgcccatggaggtgaacttcaacttcgacgaccccaacctgatcatcctgcctctggcctttggcaagagacagggcagagaattcatctggaacgacctgctgtccctggaaaccggcagcctgaagctggccaacggaagagtgatcgagaagacactgtacaacagaagaacccggcaggatgagcctgccctgttcgtggccctgaccttcgagcggcgggaggtcctggactcctccaatatcaaaccaatgaacctgatcggcgtggcaagaggcgaaaacatccccgccgtgatcgccctgaccgaccccgagggctgcccactgagccggtttaaggatagcctgggaaacccaacccacatcctgagaatcggcgagagctataaggagaagcagcggaccatccaggccaagaaggaggtggagcagcggagagccggcggctacagccggaagtacgccagcaaagccaagaatctggcagacgatatggtgagaaacaccgctagagatctgctgtactacgccgtgacccaggatgccatgctgatcttcgccaacctgagccggggcttcggccggcagggcaagcggaccttcatggccgagagacagtacacacggatggaggactggctgaccgccaagctggcctacgagggcctgagcaagacctacctgtccaagacactggcccagtacacctccaagacatgcagcaactgtgggtttaccatcaccagcgccgactacgacagggtgctggagaagctgaagaagacagcaacaggctggatgaccacaattaacggcaaggagctgaaggtggagggccagattacctactacaacagatacaagagacagaacgtagtcaaggacctgtccgtcgagctggatagactgagcgaagaatctgtgaacaacgacatctcctcctggacaaagggcagaagcggagaagctctgagcctcctgaagaaaagattctcccatagacccgtgcaggagaagttcgtgtgcctgaactgcggcttcgagacacacgcagccgagcaagccgccctgaacatcgccagatcctggctgttcctgcggagccaggagtacaagaaataccagacaaacaagacaaccggcaacaccgataagagagccttcgtcgagacctggcagtccttttaccggaagaagcttaaggaggtgtggaaacctgccgtgcggtctggcggatctggcggaggctccgaggagacccagggcgagctgaccagcagctgcggcagcaagaccatggccaacgtgagcctggccttcagggacgtgagcatcgacctgagccaggaggagtgggagtgcctggaccccgtgcagagggacctgtacaaggacgtgatgctggagaactacagcaacctggtgagcctgggctacaccatccccaagcccgacgtgatcaccctgctggagcaggagaaggagccctggatcggcggcccaagcagcggcgcccctcctcccagcggcggcagcccagccggctccccaacctctaccgaggagggcacctctgagtccgccacccccgagagcggccctggcacctccaccgagcccagcgagggcagcgcacccggcagccctgccggcagccccacctccacagaggagggaaccagcaccgagcccagcgaaggcagcgccccaggcaccagcaccgagcctagtgagcaggagattaaacggatcaacaagatcagaagaagacttgtgaaagacagcaacaccaagaaggccggcaagacaggccccatgaaaaccctgctggttagagtgatgacacccgatctgagagagcggctggaaaacctgagaaagaagcctgaaaatatcccccagcccatcagcaatacatctagagccaacctgaataagctgctgaccgattacaccgaaatgaagaaggcgatcctgcatgtgtactgggaagagttccagaaggaccctgtgggcctgatgagccgggtggcccagcctgccagcaagaagatcgatcagaacaagctgaaacctgagatggacgagaagggcaacctgaccaccgccggctttgcctgctctcagtgtggccagcccctgttcgtgtacaagctggagcaggtgtctgagaagggcaaggcttacaccaactacttcggacggtgcaatgtggccgagcacgaaaagctgatcctgctggcccagctgaagcccgagaaggatagcgacgaagccgtgacatatagcctgggaaagtttgggcagagggccctggatttctacagcattcatgtgaccaaggagtccacccaccccgtgaagcccctggcccagatcgccggaaacagatacgcctccggacctgtgggaaaggccctgagcgacgcatgtatgggcacaatcgcctccttcctgtctaagtaccaggacatcatcatcgaacaccagaaggtggtgaagggcaaccagaagagactggagagcctgcgggagctggccggcaaggaaaacctggaataccctagcgtgaccctgccacctcagcctcacaccaaggagggcgttgatgcctacaacgaagtgatcgcccgggtgcgaatgtgggtgaacctgaacctgtggcagaagctgaagctaagcagagatgatgccaagcctctgctgagactgaagggattcccttcctttcctctggtcgagagacaggccaacgaagtggactggtgggacatggtgtgtaacgtgaagaagctgatcaacgagaaaaaggaggatggcaaggtgttttggcagaatctggctggctacaagagacaggaagccctgagaccatacctgagcagcgaggaagatcggaagaagggaaagaaattcgctcggtaccagctgggcgacctgctgctgcacctggaaaagaagcacggcgaggactggggaaaggtgtacgacgaggcctgggagcggattgacaagaaagtggaaggcctgagcaagcacatcaagctggaagaggaacggagaagcgaggacgcccagagcaaggccgccctgaccgactggctgcgggctaaggccagcttcgtgatcgagggcctgaaggaggccgacaaggacgagttctgcagatgcgagctgaagctgcagaagtggtacggggacctgcggggaaagcccttcgccatcgaagccgagaacagcatcctggacatcagcggcttcagcaagcagtacaactgtgccttcatctggcagaaggacggcgtgaagaagctgaacctgtacctgatcatcaactacttcaagggcggcaagctgcggttcaagaagatcaaacctgaagccttcgaagccaacagattctacaccgtgatcaacaaaaagagcggcgagatcgtgcccatggaggtgaacttcaacttcgacgaccccaacctgatcatcctgcctctggcctttggcaagagacagggcagagaattcatctggaacgacctgctgtccctggaaaccggcagcctgaagctggccaacggaagagtgatcgagaagacactgtacaacagaagaacccggcaggatgagcctgccctgttcgtggccctgaccttcgagcggcgggaggtcctggactcctccaatatcaaaccaatgaacctgatcggcgtggcaagaggcgaaaacatccccgccgtgatcgccctgaccgaccccgagggctgcccactgagccggtttaaggatagcctgggaaacccaacccacatcctgagaatcggcgagagctataaggagaagcagcggaccatccaggccaagaaggaggtggagcagcggagagccggcggctacagccggaagtacgccagcaaagccaagaatctggcagacgatatggtgagaaacaccgctagagatctgctgtactacgccgtgacccaggatgccatgctgatcttcgccaacctgagccggggcttcggccggcagggcaagcggaccttcatggccgagagacagtacacacggatggaggactggctgaccgccaagctggcctacgagggcctgagcaagacctacctgtccaagacactggcccagtacacctccaagacatgcagcaactgtgggtttaccatcaccagcgccgactacgacagggtgctggagaagctgaagaagacagcaacaggctggatgaccacaattaacggcaaggagctgaaggtggagggccagattacctactacaacagatacaagagacagaacgtagtcaaggacctgtccgtcgagctggatagactgagcgaagaatctgtgaacaacgacatctcctcctggacaaagggcagaagcggagaagctctgagcctcctgaagaaaagattctcccatagacccgtgcaggagaagttcgtgtgcctgaactgcggcttcgagacacacgcagccgagcaagccgccctgaacatcgccagatcctggctgttcctgcggagccaggagtacaagaaataccagacaaacaagacaaccggcaacaccgataagagagccttcgtcgagacctggcagtccttttaccggaagaagcttaaggaggtgtggaaacctgccgtgcggtctggcggatctggcggaggctcctgaggagacccagggcgagctgaccagcagctgcggcagcaagaccatggccaacgtgagcctggccttcagggacgtgagcatcgacctgagccaggaggagtgggagtgcctggaccccgtgcagagggacctgtacaaggacgtgatgctggagaactacagcaacctggtgagcctgggctacaccatccccaagcccgacgtgatcaccctgctggagcaggagaaggagccctggatcggatctggctccggcagcggccccaagaaaaagagaaaagtctaagctgccttctgcggggcttgccttctggccatgcccttcttctctcccttgcacctgtacctcttggtctttgaataaagcctgagtaggaaggctagcaaaaaaaaaaaaaaaaaaaaaaaaaaaaaaaaaaaaaaaaaaaaaaaaaaaaaaaaaaaaaaaaaaaaaaaaaaaaaaaa

SEQ ID NO: 16556 - RNA, 9485 nt, synthetic construct
  source 1..9485: mol_type = other RNA
aggaaataagagagaaaagaagagtaagaagaaatataagagccaccatggcccctaagaagaagcgtaaagtgagccggatggaacgcctcgtctacgaggtgcggcagaagtgcagaaacatcgaggacatctgcatctcctgcggatctctgaacgtgaccctggagcacccactgttcatcggcggcatgtgccagaactgtaaaaactgttttctggagtgtgcctatcaatacgacgatgacggctaccagagctactgcaccatctgttgcggcggaagagaggtgctgatgtgtggaaataacaactgctgccggtgcttctgcgtggaatgcgtggacctgctggtgggccccggcgccgcccaggccgctattaaggaagatccttggaactgctacatgtgcggccacaagggcacatacggcctgctgagacggagagaggactggcctagcagactgcagatgttcttcgccaataaccacgaccaggagttcgacccccctaaggtgtaccctcccgtccccgccgagaagagaaagcccatccgggtcctgagcctgttcgatggcatcgccaccggtctgctggtgctgaaggacctgggcatccaggtggataggtacattgcctccgaggtgtgcgaggactccatcaccgtgggaatggtgcgtcatcagggcaagatcatgtacgtgggcgacgtgcggagcgtgacacagaagcatatccaggagtggggccctttcgacctggtgatcggcggcagcccttgcaatgacctgagcatcgtgaacccagcccggaagggcctgtacgagggaaccggcagactgttcttcgagttttacagactgctgcacgacgcccggcctaaggaaggcgacgaccggcccttcttttggctgttcgagaatgtggtggccatgggagtcagcgacaagcgggatattagccggttcctggagagcaaccccgtgatgatcgatgccaaggaagtgagcgccgcccaccgggccagatacttctggggcaatctgcctggcatgaacagacccctggccagcaccgtgaacgacaagctggagctgcaggagtgcctggagcacggccggatcgccaagttcagcaaggtgagaaccatcaccacccgaagcaacagcatcaaacaaggcaaggaccagcactttcctgtgttcatgaacgagaaggaggacatcctgtggtgtaccgagatggagagagtgttcgggttcccagtccactacacagatgtcagcaacatgtctagactggccagacagagactgctgggaagaagctggtccgtccctgtgatcagacacctgttcgcccctctgaaggagtacttcgcctgcgtgagcagcggcaacagcaacgccaacagccggggccccagcttctctagcggcctggtgccactgtccctgagagggagccacatgggccccatggagatctacaaaaccgtgagcgcctggaagcggcagcctgtgcgcgtgctgagcctgtttcggaatatcgataaagtcctgaaaagcctgggattcctggagagcggctctggctccggcggtggcaccctgaagtacgtggaggatgtgacaaacgtggtcagacgggatgtggagaagtggggccccttcgatctggtgtacggcagcacccaacccctgggcagctcttgtgaccggtgccctggctggtacatgtttcagttccaccggatcctgcagtacgccctgccgagacaggagtcccagcggccattcttttggattttcatggacaacttgctgctgaccgaggatgaccaggaaactaccactcggttcctgcagaccgaagccgtgaccctgcaggacgtgagaggccgggactaccagaacgccatgcgggtgtggtccaacatccctggactgaaaagcaagcacgcacctctgacccctaaagaagaggagtacctgcaggcccaggtgcggagcagaagcaagctggacgcccctaaggtggatctgctggtgaagaattgcctcctgcccctgagagagtacttcaagtatttcagccagaatagtctgcccctgggaggcagcggcggcggcgccctggtgacatttgaggacgtcgccgtgcggttcacccaggaggaatgggctctgctggatccttctcagaaaatcctgtaccgggacgtgatgagagagacataccggaatctgacctccgtgggcatcaactgggaatgttgggaccttgaagcctgcttcagaagcctgggaagaaacctgagagtgcaggtggtgaagagaaagtgcgagctgaccaacagcggcccctgcgccgagggcggcccaagcagcggcgcccctcctcccagcggcggcagcccagccggctccccaacctctaccgaggagggcacctctgagtccgccacccccgagagcggccctggcacctccaccgagcccagcgagggcagcgcacccggcagccctgccggcagccccacctccacagaggagggaaccagcaccgagcccagcgaaggcagcgccccaggcaccagcaccgagcctagtgagcaggagattaaacggatcaacaagatcagaagaagacttgtgaaagacagcaacaccaagaaggccggcaagacaggccccatgaaaaccctgctggttagagtgatgacacccgatctgagagagcggctggaaaacctgagaaagaagcctgaaaatatcccccagcccatcagcaatacatctagagccaacctgaataagctgctgaccgattacaccgaaatgaagaaggcgatcctgcatgtgtactgggaagagttccagaaggaccctgtgggcctgatgagccgggtggcccagcctgccagcaagaagatcgatcagaacaagctgaaacctgagatggacgagaagggcaacctgaccaccgccggctttgcctgctctcagtgtggccagcccctgttcgtgtacaagctggagcaggtgtctgagaagggcaaggcttacaccaactacttcggacggtgcaatgtggccgagcacgaaaagctgatcctgctggcccagctgaagcccgagaaggatagcgacgaagccgtgacatatagcctgggaaagtttgggcagagggccctggatttctacagcattcatgtgaccaaggagtccacccaccccgtgaagcccctggcccagatcgccggaaacagatacgcctccggacctgtgggaaaggccctgagcgacgcatgtatgggcacaatcgcctccttcctgtctaagtaccaggacatcatcatcgaacaccagaaggtggtgaagggcaaccagaagagactggagagcctgcgggagctggccggcaaggaaaacctggaataccctagcgtgaccctgccacctcagcctcacaccaaggagggcgttgatgcctacaacgaagtgatcgcccgggtgcgaatgtgggtgaacctgaacctgtggcagaagctgaagctaagcagagatgatgccaagcctctgctgagactgaagggattcccttcctttcctctggtcgagagacaggccaacgaagtggactggtgggacatggtgtgtaacgtgaagaagctgatcaacgagaaaaaggaggatggcaaggtgttttggcagaatctggctggctacaagagacaggaagccctgagaccatacctgagcagcgaggaagatcggaagaagggaaagaaattcgctcggtaccagctgggcgacctgctgctgcacctggaaaagaagcacggcgaggactggggaaaggtgtacgacgaggcctgggagcggattgacaagaaagtggaaggcctgagcaagcacatcaagctggaagaggaacggagaagcgaggacgcccagagcaaggccgccctgaccgactggctgcgggctaaggccagcttcgtgatcgagggcctgaaggaggccgacaaggacgagttctgcagatgcgagctgaagctgcagaagtggtacggggacctgcggggaaagcccttcgccatcgaagccgagaacagcatcctggacatcagcggcttcagcaagcagtacaactgtgccttcatctggcagaaggacggcgtgaagaagctgaacctgtacctgatcatcaactacttcaagggcggcaagctgcggttcaagaagatcaaacctgaagccttcgaagccaacagattctacaccgtgatcaacaaaaagagcggcgagatcgtgcccatggaggtgaacttcaacttcgacgaccccaacctgatcatcctgcctctggcctttggcaagagacagggcagagaattcatctggaacgacctgctgtccctggaaaccggcagcctgaagctggccaacggaagagtgatcgagaagacactgtacaacagaagaacccggcaggatgagcctgccctgttcgtggccctgaccttcgagcggcgggaggtcctggactcctccaatatcaaaccaatgaacctgatcggcgtggcaagaggcgaaaacatccccgccgtgatcgccctgaccgaccccgagggctgcccactgagccggtttaaggatagcctgggaaacccaacccacatcctgagaatcggcgagagctataaggagaagcagcggaccatccaggccaagaaggaggtggagcagcggagagccggcggctacagccggaagtacgccagcaaagccaagaatctggcagacgatatggtgagaaacaccgctagagatctgctgtactacgccgtgacccaggatgccatgctgatcttcgccaacctgagccggggcttcggccggcagggcaagcggaccttcatggccgagagacagtacacacggatggaggactggctgaccgccaagctggcctacgagggcctgagcaagacctacctgtccaagacactggcccagtacacctccaagacatgcagcaactgtgggtttaccatcaccagcgccgactacgacagggtgctggagaagctgaagaagacagcaacaggctggatgaccacaattaacggcaaggagctgaaggtggagggccagattacctactacaacagatacaagagacagaacgtagtcaaggacctgtccgtcgagctggatagactgagcgaagaatctgtgaacaacgacatctcctcctggacaaagggcagaagcggagaagctctgagcctcctgaagaaaagattctcccatagacccgtgcaggagaagttcgtgtgcctgaactgcggcttcgagacacacgcagccgagcaagccgccctgaacatcgccagatcctggctgttcctgcggagccaggagtacaagaaataccagacaaacaagacaaccggcaacaccgataagagagccttcgtcgagacctggcagtccttttaccggaagaagcttaaggaggtgtggaaacctgccgtgcggtctggcggatctggcggaggctcctgctggggcctgctgagcttcaaggacatcagcatggagttcacctgggaggagtggcagctgctggacagcgcccagaagtacctgtacagggacgtgatcctggagaactacagccacctggtgagcctgggctaccacggcaccaagcccgacctgatcttcaagctggagcagggcgaggagccctggatgatcaacgccagggtgagcaggcagagctaccccgagggctggaaggagggcggcccaagcagcggcgcccctcctcccagcggcggcagcccagccggctccccaacctctaccgaggagggcacctctgagtccgccacccccgagagcggccctggcacctccaccgagcccagcgagggcagcgcacccggcagccctgccggcagccccacctccacagaggagggaaccagcaccgagcccagcgaaggcagcgccccaggcaccagcaccgagcctagtgagcaggagattaaacggatcaacaagatcagaagaagacttgtgaaagacagcaacaccaagaaggccggcaagacaggccccatgaaaaccctgctggttagagtgatgacacccgatctgagagagcggctggaaaacctgagaaagaagcctgaaaatatcccccagcccatcagcaatacatctagagccaacctgaataagctgctgaccgattacaccgaaatgaagaaggcgatcctgcatgtgtactgggaagagttccagaaggaccctgtgggcctgatgagccgggtggcccagcctgccagcaagaagatcgatcagaacaagctgaaacctgagatggacgagaagggcaacctgaccaccgccggctttgcctgctctcagtgtggccagcccctgttcgtgtacaagctggagcaggtgtctgagaagggcaaggcttacaccaactacttcggacggtgcaatgtggccgagcacgaaaagctgatcctgctggcccagctgaagcccgagaaggatagcgacgaagccgtgacatatagcctgggaaagtttgggcagagggccctggatttctacagcattcatgtgaccaaggagtccacccaccccgtgaagcccctggcccagatcgccggaaacagatacgcctccggacctgtgggaaaggccctgagcgacgcatgtatgggcacaatcgcctccttcctgtctaagtaccaggacatcatcatcgaacaccagaaggtggtgaagggcaaccagaagagactggagagcctgcgggagctggccggcaaggaaaacctggaataccctagcgtgaccctgccacctcagcctcacaccaaggagggcgttgatgcctacaacgaagtgatcgcccgggtgcgaatgtgggtgaacctgaacctgtggcagaagctgaagctaagcagagatgatgccaagcctctgctgagactgaagggattcccttcctttcctctggtcgagagacaggccaacgaagtggactggtgggacatggtgtgtaacgtgaagaagctgatcaacgagaaaaaggaggatggcaaggtgttttggcagaatctggctggctacaagagacaggaagccctgagaccatacctgagcagcgaggaagatcggaagaagggaaagaaattcgctcggtaccagctgggcgacctgctgctgcacctggaaaagaagcacggcgaggactggggaaaggtgtacgacgaggcctgggagcggattgacaagaaagtggaaggcctgagcaagcacatcaagctggaagaggaacggagaagcgaggacgcccagagcaaggccgccctgaccgactggctgcgggctaaggccagcttcgtgatcgagggcctgaaggaggccgacaaggacgagttctgcagatgcgagctgaagctgcagaagtggtacggggacctgcggggaaagcccttcgccatcgaagccgagaacagcatcctggacatcagcggcttcagcaagcagtacaactgtgccttcatctggcagaaggacggcgtgaagaagctgaacctgtacctgatcatcaactacttcaagggcggcaagctgcggttcaagaagatcaaacctgaagccttcgaagccaacagattctacaccgtgatcaacaaaaagagcggcgagatcgtgcccatggaggtgaacttcaacttcgacgaccccaacctgatcatcctgcctctggcctttggcaagagacagggcagagaattcatctggaacgacctgctgtccctggaaaccggcagcctgaagctggccaacggaagagtgatcgagaagacactgtacaacagaagaacccggcaggatgagcctgccctgttcgtggccctgaccttcgagcggcgggaggtcctggactcctccaatatcaaaccaatgaacctgatcggcgtggcaagaggcgaaaacatccccgccgtgatcgccctgaccgaccccgagggctgcccactgagccggtttaaggatagcctgggaaacccaacccacatcctgagaatcggcgagagctataaggagaagcagcggaccatccaggccaagaaggaggtggagcagcggagagccggcggctacagccggaagtacgccagcaaagccaagaatctggcagacgatatggtgagaaacaccgctagagatctgctgtactacgccgtgacccaggatgccatgctgatcttcgccaacctgagccggggcttcggccggcagggcaagcggaccttcatggccgagagacagtacacacggatggaggactggctgaccgccaagctggcctacgagggcctgagcaagacctacctgtccaagacactggcccagtacacctccaagacatgcagcaactgtgggtttaccatcaccagcgccgactacgacagggtgctggagaagctgaagaagacagcaacaggctggatgaccacaattaacggcaaggagctgaaggtggagggccagattacctactacaacagatacaagagacagaacgtagtcaaggacctgtccgtcgagctggatagactgagcgaagaatctgtgaacaacgacatctcctcctggacaaagggcagaagcggagaagctctgagcctcctgaagaaaagattctcccatagacccgtgcaggagaagttcgtgtgcctgaactgcggcttcgagacacacgcagccgagcaagccgccctgaacatcgccagatcctggctgttcctgcggagccaggagtacaagaaataccagacaaacaagacaaccggcaacaccgataagagagccttcgtcgagacctggcagtccttttaccggaagaagcttaaggaggtgtggaaacctgccgtgcggtctggcggatctggcggaggctccttgctggggcctgctgagcttcaaggacatcagcatggagttcacctgggaggagtggcagctgctggacagcgcccagaagtacctgtacagggacgtgatcctggagaactacagccacctggtgagcctgggctaccacggcaccaagcccgacctgatcttcaagctggagcagggcgaggagccctggatgatcaacgccagggtgagcaggcagagctaccccgagggctggaaggagggatctggctccggcagcggccccaagaaaaagagaaaagtctaagctgccttctgcggggcttgccttctggccatgcccttcttctctcccttgcacctgtacctcttggtctttgaataaagcctgagtaggaaggctagcaaaaaaaaaaaaaaaaaaaaaaaaaaaaaaaaaaaaaaaaaaaaaaaaaaaaaaaaaaaaaaaaaaaaaaaaaaaaaaaa

SEQ ID NO: 16557 - RNA, 9485 nt, synthetic construct
  source 1..9485: mol_type = other RNA
aggaaataagagagaaaagaagagtaagaagaaatataagagccaccatggcccctaagaagaagcgtaaagtgagccggatggaacgcctcgtctacgaggtgcggcagaagtgcagaaacatcgaggacatctgcatctcctgcggatctctgaacgtgaccctggagcacccactgttcatcggcggcatgtgccagaactgtaaaaactgttttctggagtgtgcctatcaatacgacgatgacggctaccagagctactgcaccatctgttgcggcggaagagaggtgctgatgtgtggaaataacaactgctgccggtgcttctgcgtggaatgcgtggacctgctggtgggccccggcgccgcccaggccgctattaaggaagatccttggaactgctacatgtgcggccacaagggcacatacggcctgctgagacggagagaggactggcctagcagactgcagatgttcttcgccaataaccacgaccaggagttcgacccccctaaggtgtaccctcccgtccccgccgagaagagaaagcccatccgggtcctgagcctgttcgatggcatcgccaccggtctgctggtgctgaaggacctgggcatccaggtggataggtacattgcctccgaggtgtgcgaggactccatcaccgtgggaatggtgcgtcatcagggcaagatcatgtacgtgggcgacgtgcggagcgtgacacagaagcatatccaggagtggggccctttcgacctggtgatcggcggcagcccttgcaatgacctgagcatcgtgaacccagcccggaagggcctgtacgagggaaccggcagactgttcttcgagttttacagactgctgcacgacgcccggcctaaggaaggcgacgaccggcccttcttttggctgttcgagaatgtggtggccatgggagtcagcgacaagcgggatattagccggttcctggagagcaaccccgtgatgatcgatgccaaggaagtgagcgccgcccaccgggccagatacttctggggcaatctgcctggcatgaacagacccctggccagcaccgtgaacgacaagctggagctgcaggagtgcctggagcacggccggatcgccaagttcagcaaggtgagaaccatcaccacccgaagcaacagcatcaaacaaggcaaggaccagcactttcctgtgttcatgaacgagaaggaggacatcctgtggtgtaccgagatggagagagtgttcgggttcccagtccactacacagatgtcagcaacatgtctagactggccagacagagactgctgggaagaagctggtccgtccctgtgatcagacacctgttcgcccctctgaaggagtacttcgcctgcgtgagcagcggcaacagcaacgccaacagccggggccccagcttctctagcggcctggtgccactgtccctgagagggagccacatgggccccatggagatctacaaaaccgtgagcgcctggaagcggcagcctgtgcgcgtgctgagcctgtttcggaatatcgataaagtcctgaaaagcctgggattcctggagagcggctctggctccggcggtggcaccctgaagtacgtggaggatgtgacaaacgtggtcagacgggatgtggagaagtggggccccttcgatctggtgtacggcagcacccaacccctgggcagctcttgtgaccggtgccctggctggtacatgtttcagttccaccggatcctgcagtacgccctgccgagacaggagtcccagcggccattcttttggattttcatggacaacttgctgctgaccgaggatgaccaggaaactaccactcggttcctgcagaccgaagccgtgaccctgcaggacgtgagaggccgggactaccagaacgccatgcgggtgtggtccaacatccctggactgaaaagcaagcacgcacctctgacccctaaagaagaggagtacctgcaggcccaggtgcggagcagaagcaagctggacgcccctaaggtggatctgctggtgaagaattgcctcctgcccctgagagagtacttcaagtatttcagccagaatagtctgcccctgggaggcagcggcggcggcgccctggtgacatttgaggacgtcgccgtgcggttcacccaggaggaatgggctctgctggatccttctcagaaaatcctgtaccgggacgtgatgagagagacataccggaatctgacctccgtgggcatcaactgggaatgttgggaccttgaagcctgcttcagaagcctgggaagaaacctgagagtgcaggtggtgaagagaaagtgcgagctgaccaacagcggcccctgcgccgagggcggcccaagcagcggcgcccctcctcccagcggcggcagcccagccggctccccaacctctaccgaggagggcacctctgagtccgccacccccgagagcggccctggcacctccaccgagcccagcgagggcagcgcacccggcagccctgccggcagccccacctccacagaggagggaaccagcaccgagcccagcgaaggcagcgccccaggcaccagcaccgagcctagtgagcaggagattaaacggatcaacaagatcagaagaagacttgtgaaagacagcaacaccaagaaggccggcaagacaggccccatgaaaaccctgctggttagagtgatgacacccgatctgagagagcggctggaaaacctgagaaagaagcctgaaaatatcccccagcccatcagcaatacatctagagccaacctgaataagctgctgaccgattacaccgaaatgaagaaggcgatcctgcatgtgtactgggaagagttccagaaggaccctgtgggcctgatgagccgggtggcccagcctgccagcaagaagatcgatcagaacaagctgaaacctgagatggacgagaagggcaacctgaccaccgccggctttgcctgctctcagtgtggccagcccctgttcgtgtacaagctggagcaggtgtctgagaagggcaaggcttacaccaactacttcggacggtgcaatgtggccgagcacgaaaagctgatcctgctggcccagctgaagcccgagaaggatagcgacgaagccgtgacatatagcctgggaaagtttgggcagagggccctggatttctacagcattcatgtgaccaaggagtccacccaccccgtgaagcccctggcccagatcgccggaaacagatacgcctccggacctgtgggaaaggccctgagcgacgcatgtatgggcacaatcgcctccttcctgtctaagtaccaggacatcatcatcgaacaccagaaggtggtgaagggcaaccagaagagactggagagcctgcgggagctggccggcaaggaaaacctggaataccctagcgtgaccctgccacctcagcctcacaccaaggagggcgttgatgcctacaacgaagtgatcgcccgggtgcgaatgtgggtgaacctgaacctgtggcagaagctgaagctaagcagagatgatgccaagcctctgctgagactgaagggattcccttcctttcctctggtcgagagacaggccaacgaagtggactggtgggacatggtgtgtaacgtgaagaagctgatcaacgagaaaaaggaggatggcaaggtgttttggcagaatctggctggctacaagagacaggaagccctgagaccatacctgagcagcgaggaagatcggaagaagggaaagaaattcgctcggtaccagctgggcgacctgctgctgcacctggaaaagaagcacggcgaggactggggaaaggtgtacgacgaggcctgggagcggattgacaagaaagtggaaggcctgagcaagcacatcaagctggaagaggaacggagaagcgaggacgcccagagcaaggccgccctgaccgactggctgcgggctaaggccagcttcgtgatcgagggcctgaaggaggccgacaaggacgagttctgcagatgcgagctgaagctgcagaagtggtacggggacctgcggggaaagcccttcgccatcgaagccgagaacagcatcctggacatcagcggcttcagcaagcagtacaactgtgccttcatctggcagaaggacggcgtgaagaagctgaacctgtacctgatcatcaactacttcaagggcggcaagctgcggttcaagaagatcaaacctgaagccttcgaagccaacagattctacaccgtgatcaacaaaaagagcggcgagatcgtgcccatggaggtgaacttcaacttcgacgaccccaacctgatcatcctgcctctggcctttggcaagagacagggcagagaattcatctggaacgacctgctgtccctggaaaccggcagcctgaagctggccaacggaagagtgatcgagaagacactgtacaacagaagaacccggcaggatgagcctgccctgttcgtggccctgaccttcgagcggcgggaggtcctggactcctccaatatcaaaccaatgaacctgatcggcgtggcaagaggcgaaaacatccccgccgtgatcgccctgaccgaccccgagggctgcccactgagccggtttaaggatagcctgggaaacccaacccacatcctgagaatcggcgagagctataaggagaagcagcggaccatccaggccaagaaggaggtggagcagcggagagccggcggctacagccggaagtacgccagcaaagccaagaatctggcagacgatatggtgagaaacaccgctagagatctgctgtactacgccgtgacccaggatgccatgctgatcttcgccaacctgagccggggcttcggccggcagggcaagcggaccttcatggccgagagacagtacacacggatggaggactggctgaccgccaagctggcctacgagggcctgagcaagacctacctgtccaagacactggcccagtacacctccaagacatgcagcaactgtgggtttaccatcaccagcgccgactacgacagggtgctggagaagctgaagaagacagcaacaggctggatgaccacaattaacggcaaggagctgaaggtggagggccagattacctactacaacagatacaagagacagaacgtagtcaaggacctgtccgtcgagctggatagactgagcgaagaatctgtgaacaacgacatctcctcctggacaaagggcagaagcggagaagctctgagcctcctgaagaaaagattctcccatagacccgtgcaggagaagttcgtgtgcctgaactgcggcttcgagacacacgcagccgagcaagccgccctgaacatcgccagatcctggctgttcctgcggagccaggagtacaagaaataccagacaaacaagacaaccggcaacaccgataagagagccttcgtcgagacctggcagtccttttaccggaagaagcttaaggaggtgtggaaacctgccgtgcggtctggcggatctggcggaggctccagccacgagagcgtgaccttcaaggacgtggccgtggacttcacctgggaggagtggggctacctggacaccagccagaaggagctgtactgggaggtgatgctggagaactacaggaacctggtgagcctgggcctggccgacagcaacgtggacatgatcagccagctggagagcggcgaggcccacggcatccccgtggacagcgtgctgaggagctgctggcccgacggcgacaccaggggcggcccaagcagcggcgcccctcctcccagcggcggcagcccagccggctccccaacctctaccgaggagggcacctctgagtccgccacccccgagagcggccctggcacctccaccgagcccagcgagggcagcgcacccggcagccctgccggcagccccacctccacagaggagggaaccagcaccgagcccagcgaaggcagcgccccaggcaccagcaccgagcctagtgagcaggagattaaacggatcaacaagatcagaagaagacttgtgaaagacagcaacaccaagaaggccggcaagacaggccccatgaaaaccctgctggttagagtgatgacacccgatctgagagagcggctggaaaacctgagaaagaagcctgaaaatatcccccagcccatcagcaatacatctagagccaacctgaataagctgctgaccgattacaccgaaatgaagaaggcgatcctgcatgtgtactgggaagagttccagaaggaccctgtgggcctgatgagccgggtggcccagcctgccagcaagaagatcgatcagaacaagctgaaacctgagatggacgagaagggcaacctgaccaccgccggctttgcctgctctcagtgtggccagcccctgttcgtgtacaagctggagcaggtgtctgagaagggcaaggcttacaccaactacttcggacggtgcaatgtggccgagcacgaaaagctgatcctgctggcccagctgaagcccgagaaggatagcgacgaagccgtgacatatagcctgggaaagtttgggcagagggccctggatttctacagcattcatgtgaccaaggagtccacccaccccgtgaagcccctggcccagatcgccggaaacagatacgcctccggacctgtgggaaaggccctgagcgacgcatgtatgggcacaatcgcctccttcctgtctaagtaccaggacatcatcatcgaacaccagaaggtggtgaagggcaaccagaagagactggagagcctgcgggagctggccggcaaggaaaacctggaataccctagcgtgaccctgccacctcagcctcacaccaaggagggcgttgatgcctacaacgaagtgatcgcccgggtgcgaatgtgggtgaacctgaacctgtggcagaagctgaagctaagcagagatgatgccaagcctctgctgagactgaagggattcccttcctttcctctggtcgagagacaggccaacgaagtggactggtgggacatggtgtgtaacgtgaagaagctgatcaacgagaaaaaggaggatggcaaggtgttttggcagaatctggctggctacaagagacaggaagccctgagaccatacctgagcagcgaggaagatcggaagaagggaaagaaattcgctcggtaccagctgggcgacctgctgctgcacctggaaaagaagcacggcgaggactggggaaaggtgtacgacgaggcctgggagcggattgacaagaaagtggaaggcctgagcaagcacatcaagctggaagaggaacggagaagcgaggacgcccagagcaaggccgccctgaccgactggctgcgggctaaggccagcttcgtgatcgagggcctgaaggaggccgacaaggacgagttctgcagatgcgagctgaagctgcagaagtggtacggggacctgcggggaaagcccttcgccatcgaagccgagaacagcatcctggacatcagcggcttcagcaagcagtacaactgtgccttcatctggcagaaggacggcgtgaagaagctgaacctgtacctgatcatcaactacttcaagggcggcaagctgcggttcaagaagatcaaacctgaagccttcgaagccaacagattctacaccgtgatcaacaaaaagagcggcgagatcgtgcccatggaggtgaacttcaacttcgacgaccccaacctgatcatcctgcctctggcctttggcaagagacagggcagagaattcatctggaacgacctgctgtccctggaaaccggcagcctgaagctggccaacggaagagtgatcgagaagacactgtacaacagaagaacccggcaggatgagcctgccctgttcgtggccctgaccttcgagcggcgggaggtcctggactcctccaatatcaaaccaatgaacctgatcggcgtggcaagaggcgaaaacatccccgccgtgatcgccctgaccgaccccgagggctgcccactgagccggtttaaggatagcctgggaaacccaacccacatcctgagaatcggcgagagctataaggagaagcagcggaccatccaggccaagaaggaggtggagcagcggagagccggcggctacagccggaagtacgccagcaaagccaagaatctggcagacgatatggtgagaaacaccgctagagatctgctgtactacgccgtgacccaggatgccatgctgatcttcgccaacctgagccggggcttcggccggcagggcaagcggaccttcatggccgagagacagtacacacggatggaggactggctgaccgccaagctggcctacgagggcctgagcaagacctacctgtccaagacactggcccagtacacctccaagacatgcagcaactgtgggtttaccatcaccagcgccgactacgacagggtgctggagaagctgaagaagacagcaacaggctggatgaccacaattaacggcaaggagctgaaggtggagggccagattacctactacaacagatacaagagacagaacgtagtcaaggacctgtccgtcgagctggatagactgagcgaagaatctgtgaacaacgacatctcctcctggacaaagggcagaagcggagaagctctgagcctcctgaagaaaagattctcccatagacccgtgcaggagaagttcgtgtgcctgaactgcggcttcgagacacacgcagccgagcaagccgccctgaacatcgccagatcctggctgttcctgcggagccaggagtacaagaaataccagacaaacaagacaaccggcaacaccgataagagagccttcgtcgagacctggcagtccttttaccggaagaagcttaaggaggtgtggaaacctgccgtgcggtctggcggatctggcggaggctcctagccacgagagcgtgaccttcaaggacgtggccgtggacttcacctgggaggagtggggctacctggacaccagccagaaggagctgtactgggaggtgatgctggagaactacaggaacctggtgagcctgggcctggccgacagcaacgtggacatgatcagccagctggagagcggcgaggcccacggcatccccgtggacagcgtgctgaggagctgctggcccgacggcgacaccaggggatctggctccggcagcggccccaagaaaaagagaaaagtctaagctgccttctgcggggcttgccttctggccatgcccttcttctctcccttgcacctgtacctcttggtctttgaataaagcctgagtaggaaggctagcaaaaaaaaaaaaaaaaaaaaaaaaaaaaaaaaaaaaaaaaaaaaaaaaaaaaaaaaaaaaaaaaaaaaaaaaaaaaaaaa

SEQ ID NO: 16558 - RNA, 9485 nt, synthetic construct
  source 1..9485: mol_type = other RNA
aggaaataagagagaaaagaagagtaagaagaaatataagagccaccatggcccctaagaagaagcgtaaagtgagccggatggaacgcctcgtctacgaggtgcggcagaagtgcagaaacatcgaggacatctgcatctcctgcggatctctgaacgtgaccctggagcacccactgttcatcggcggcatgtgccagaactgtaaaaactgttttctggagtgtgcctatcaatacgacgatgacggctaccagagctactgcaccatctgttgcggcggaagagaggtgctgatgtgtggaaataacaactgctgccggtgcttctgcgtggaatgcgtggacctgctggtgggccccggcgccgcccaggccgctattaaggaagatccttggaactgctacatgtgcggccacaagggcacatacggcctgctgagacggagagaggactggcctagcagactgcagatgttcttcgccaataaccacgaccaggagttcgacccccctaaggtgtaccctcccgtccccgccgagaagagaaagcccatccgggtcctgagcctgttcgatggcatcgccaccggtctgctggtgctgaaggacctgggcatccaggtggataggtacattgcctccgaggtgtgcgaggactccatcaccgtgggaatggtgcgtcatcagggcaagatcatgtacgtgggcgacgtgcggagcgtgacacagaagcatatccaggagtggggccctttcgacctggtgatcggcggcagcccttgcaatgacctgagcatcgtgaacccagcccggaagggcctgtacgagggaaccggcagactgttcttcgagttttacagactgctgcacgacgcccggcctaaggaaggcgacgaccggcccttcttttggctgttcgagaatgtggtggccatgggagtcagcgacaagcgggatattagccggttcctggagagcaaccccgtgatgatcgatgccaaggaagtgagcgccgcccaccgggccagatacttctggggcaatctgcctggcatgaacagacccctggccagcaccgtgaacgacaagctggagctgcaggagtgcctggagcacggccggatcgccaagttcagcaaggtgagaaccatcaccacccgaagcaacagcatcaaacaaggcaaggaccagcactttcctgtgttcatgaacgagaaggaggacatcctgtggtgtaccgagatggagagagtgttcgggttcccagtccactacacagatgtcagcaacatgtctagactggccagacagagactgctgggaagaagctggtccgtccctgtgatcagacacctgttcgcccctctgaaggagtacttcgcctgcgtgagcagcggcaacagcaacgccaacagccggggccccagcttctctagcggcctggtgccactgtccctgagagggagccacatgggccccatggagatctacaaaaccgtgagcgcctggaagcggcagcctgtgcgcgtgctgagcctgtttcggaatatcgataaagtcctgaaaagcctgggattcctggagagcggctctggctccggcggtggcaccctgaagtacgtggaggatgtgacaaacgtggtcagacgggatgtggagaagtggggccccttcgatctggtgtacggcagcacccaacccctgggcagctcttgtgaccggtgccctggctggtacatgtttcagttccaccggatcctgcagtacgccctgccgagacaggagtcccagcggccattcttttggattttcatggacaacttgctgctgaccgaggatgaccaggaaactaccactcggttcctgcagaccgaagccgtgaccctgcaggacgtgagaggccgggactaccagaacgccatgcgggtgtggtccaacatccctggactgaaaagcaagcacgcacctctgacccctaaagaagaggagtacctgcaggcccaggtgcggagcagaagcaagctggacgcccctaaggtggatctgctggtgaagaattgcctcctgcccctgagagagtacttcaagtatttcagccagaatagtctgcccctgggaggcagcggcggcggcgccctggtgacatttgaggacgtcgccgtgcggttcacccaggaggaatgggctctgctggatccttctcagaaaatcctgtaccgggacgtgatgagagagacataccggaatctgacctccgtgggcatcaactgggaatgttgggaccttgaagcctgcttcagaagcctgggaagaaacctgagagtgcaggtggtgaagagaaagtgcgagctgaccaacagcggcccctgcgccgagggcggcccaagcagcggcgcccctcctcccagcggcggcagcccagccggctccccaacctctaccgaggagggcacctctgagtccgccacccccgagagcggccctggcacctccaccgagcccagcgagggcagcgcacccggcagccctgccggcagccccacctccacagaggagggaaccagcaccgagcccagcgaaggcagcgccccaggcaccagcaccgagcctagtgagcaggagattaaacggatcaacaagatcagaagaagacttgtgaaagacagcaacaccaagaaggccggcaagacaggccccatgaaaaccctgctggttagagtgatgacacccgatctgagagagcggctggaaaacctgagaaagaagcctgaaaatatcccccagcccatcagcaatacatctagagccaacctgaataagctgctgaccgattacaccgaaatgaagaaggcgatcctgcatgtgtactgggaagagttccagaaggaccctgtgggcctgatgagccgggtggcccagcctgccagcaagaagatcgatcagaacaagctgaaacctgagatggacgagaagggcaacctgaccaccgccggctttgcctgctctcagtgtggccagcccctgttcgtgtacaagctggagcaggtgtctgagaagggcaaggcttacaccaactacttcggacggtgcaatgtggccgagcacgaaaagctgatcctgctggcccagctgaagcccgagaaggatagcgacgaagccgtgacatatagcctgggaaagtttgggcagagggccctggatttctacagcattcatgtgaccaaggagtccacccaccccgtgaagcccctggcccagatcgccggaaacagatacgcctccggacctgtgggaaaggccctgagcgacgcatgtatgggcacaatcgcctccttcctgtctaagtaccaggacatcatcatcgaacaccagaaggtggtgaagggcaaccagaagagactggagagcctgcgggagctggccggcaaggaaaacctggaataccctagcgtgaccctgccacctcagcctcacaccaaggagggcgttgatgcctacaacgaagtgatcgcccgggtgcgaatgtgggtgaacctgaacctgtggcagaagctgaagctaagcagagatgatgccaagcctctgctgagactgaagggattcccttcctttcctctggtcgagagacaggccaacgaagtggactggtgggacatggtgtgtaacgtgaagaagctgatcaacgagaaaaaggaggatggcaaggtgttttggcagaatctggctggctacaagagacaggaagccctgagaccatacctgagcagcgaggaagatcggaagaagggaaagaaattcgctcggtaccagctgggcgacctgctgctgcacctggaaaagaagcacggcgaggactggggaaaggtgtacgacgaggcctgggagcggattgacaagaaagtggaaggcctgagcaagcacatcaagctggaagaggaacggagaagcgaggacgcccagagcaaggccgccctgaccgactggctgcgggctaaggccagcttcgtgatcgagggcctgaaggaggccgacaaggacgagttctgcagatgcgagctgaagctgcagaagtggtacggggacctgcggggaaagcccttcgccatcgaagccgagaacagcatcctggacatcagcggcttcagcaagcagtacaactgtgccttcatctggcagaaggacggcgtgaagaagctgaacctgtacctgatcatcaactacttcaagggcggcaagctgcggttcaagaagatcaaacctgaagccttcgaagccaacagattctacaccgtgatcaacaaaaagagcggcgagatcgtgcccatggaggtgaacttcaacttcgacgaccccaacctgatcatcctgcctctggcctttggcaagagacagggcagagaattcatctggaacgacctgctgtccctggaaaccggcagcctgaagctggccaacggaagagtgatcgagaagacactgtacaacagaagaacccggcaggatgagcctgccctgttcgtggccctgaccttcgagcggcgggaggtcctggactcctccaatatcaaaccaatgaacctgatcggcgtggcaagaggcgaaaacatccccgccgtgatcgccctgaccgaccccgagggctgcccactgagccggtttaaggatagcctgggaaacccaacccacatcctgagaatcggcgagagctataaggagaagcagcggaccatccaggccaagaaggaggtggagcagcggagagccggcggctacagccggaagtacgccagcaaagccaagaatctggcagacgatatggtgagaaacaccgctagagatctgctgtactacgccgtgacccaggatgccatgctgatcttcgccaacctgagccggggcttcggccggcagggcaagcggaccttcatggccgagagacagtacacacggatggaggactggctgaccgccaagctggcctacgagggcctgagcaagacctacctgtccaagacactggcccagtacacctccaagacatgcagcaactgtgggtttaccatcaccagcgccgactacgacagggtgctggagaagctgaagaagacagcaacaggctggatgaccacaattaacggcaaggagctgaaggtggagggccagattacctactacaacagatacaagagacagaacgtagtcaaggacctgtccgtcgagctggatagactgagcgaagaatctgtgaacaacgacatctcctcctggacaaagggcagaagcggagaagctctgagcctcctgaagaaaagattctcccatagacccgtgcaggagaagttcgtgtgcctgaactgcggcttcgagacacacgcagccgagcaagccgccctgaacatcgccagatcctggctgttcctgcggagccaggagtacaagaaataccagacaaacaagacaaccggcaacaccgataagagagccttcgtcgagacctggcagtccttttaccggaagaagcttaaggaggtgtggaaacctgccgtgcggtctggcggatctggcggaggctccaggctggagagcgtgaccttcgaggacgtggccgtgtacttcacccagaaccagtgggccagcctgaaccccgcccagagggccctgtacggcgaggtgatgctggagaactacgccaacgtggccagcctggtggccttccccttccccaagcccgccctgatcagccacctggagaggggcgaggccccctggggccccgacccctgggacaccaagatccccaggggcatcggccagggcggcggcccaagcagcggcgcccctcctcccagcggcggcagcccagccggctccccaacctctaccgaggagggcacctctgagtccgccacccccgagagcggccctggcacctccaccgagcccagcgagggcagcgcacccggcagccctgccggcagccccacctccacagaggagggaaccagcaccgagcccagcgaaggcagcgccccaggcaccagcaccgagcctagtgagcaggagattaaacggatcaacaagatcagaagaagacttgtgaaagacagcaacaccaagaaggccggcaagacaggccccatgaaaaccctgctggttagagtgatgacacccgatctgagagagcggctggaaaacctgagaaagaagcctgaaaatatcccccagcccatcagcaatacatctagagccaacctgaataagctgctgaccgattacaccgaaatgaagaaggcgatcctgcatgtgtactgggaagagttccagaaggaccctgtgggcctgatgagccgggtggcccagcctgccagcaagaagatcgatcagaacaagctgaaacctgagatggacgagaagggcaacctgaccaccgccggctttgcctgctctcagtgtggccagcccctgttcgtgtacaagctggagcaggtgtctgagaagggcaaggcttacaccaactacttcggacggtgcaatgtggccgagcacgaaaagctgatcctgctggcccagctgaagcccgagaaggatagcgacgaagccgtgacatatagcctgggaaagtttgggcagagggccctggatttctacagcattcatgtgaccaaggagtccacccaccccgtgaagcccctggcccagatcgccggaaacagatacgcctccggacctgtgggaaaggccctgagcgacgcatgtatgggcacaatcgcctccttcctgtctaagtaccaggacatcatcatcgaacaccagaaggtggtgaagggcaaccagaagagactggagagcctgcgggagctggccggcaaggaaaacctggaataccctagcgtgaccctgccacctcagcctcacaccaaggagggcgttgatgcctacaacgaagtgatcgcccgggtgcgaatgtgggtgaacctgaacctgtggcagaagctgaagctaagcagagatgatgccaagcctctgctgagactgaagggattcccttcctttcctctggtcgagagacaggccaacgaagtggactggtgggacatggtgtgtaacgtgaagaagctgatcaacgagaaaaaggaggatggcaaggtgttttggcagaatctggctggctacaagagacaggaagccctgagaccatacctgagcagcgaggaagatcggaagaagggaaagaaattcgctcggtaccagctgggcgacctgctgctgcacctggaaaagaagcacggcgaggactggggaaaggtgtacgacgaggcctgggagcggattgacaagaaagtggaaggcctgagcaagcacatcaagctggaagaggaacggagaagcgaggacgcccagagcaaggccgccctgaccgactggctgcgggctaaggccagcttcgtgatcgagggcctgaaggaggccgacaaggacgagttctgcagatgcgagctgaagctgcagaagtggtacggggacctgcggggaaagcccttcgccatcgaagccgagaacagcatcctggacatcagcggcttcagcaagcagtacaactgtgccttcatctggcagaaggacggcgtgaagaagctgaacctgtacctgatcatcaactacttcaagggcggcaagctgcggttcaagaagatcaaacctgaagccttcgaagccaacagattctacaccgtgatcaacaaaaagagcggcgagatcgtgcccatggaggtgaacttcaacttcgacgaccccaacctgatcatcctgcctctggcctttggcaagagacagggcagagaattcatctggaacgacctgctgtccctggaaaccggcagcctgaagctggccaacggaagagtgatcgagaagacactgtacaacagaagaacccggcaggatgagcctgccctgttcgtggccctgaccttcgagcggcgggaggtcctggactcctccaatatcaaaccaatgaacctgatcggcgtggcaagaggcgaaaacatccccgccgtgatcgccctgaccgaccccgagggctgcccactgagccggtttaaggatagcctgggaaacccaacccacatcctgagaatcggcgagagctataaggagaagcagcggaccatccaggccaagaaggaggtggagcagcggagagccggcggctacagccggaagtacgccagcaaagccaagaatctggcagacgatatggtgagaaacaccgctagagatctgctgtactacgccgtgacccaggatgccatgctgatcttcgccaacctgagccggggcttcggccggcagggcaagcggaccttcatggccgagagacagtacacacggatggaggactggctgaccgccaagctggcctacgagggcctgagcaagacctacctgtccaagacactggcccagtacacctccaagacatgcagcaactgtgggtttaccatcaccagcgccgactacgacagggtgctggagaagctgaagaagacagcaacaggctggatgaccacaattaacggcaaggagctgaaggtggagggccagattacctactacaacagatacaagagacagaacgtagtcaaggacctgtccgtcgagctggatagactgagcgaagaatctgtgaacaacgacatctcctcctggacaaagggcagaagcggagaagctctgagcctcctgaagaaaagattctcccatagacccgtgcaggagaagttcgtgtgcctgaactgcggcttcgagacacacgcagccgagcaagccgccctgaacatcgccagatcctggctgttcctgcggagccaggagtacaagaaataccagacaaacaagacaaccggcaacaccgataagagagccttcgtcgagacctggcagtccttttaccggaagaagcttaaggaggtgtggaaacctgccgtgcggtctggcggatctggcggaggctcctaggctggagagcgtgaccttcgaggacgtggccgtgtacttcacccagaaccagtgggccagcctgaaccccgcccagagggccctgtacggcgaggtgatgctggagaactacgccaacgtggccagcctggtggccttccccttccccaagcccgccctgatcagccacctggagaggggcgaggccccctggggccccgacccctgggacaccaagatccccaggggcatcggccagggcggatctggctccggcagcggccccaagaaaaagagaaaagtctaagctgccttctgcggggcttgccttctggccatgcccttcttctctcccttgcacctgtacctcttggtctttgaataaagcctgagtaggaaggctagcaaaaaaaaaaaaaaaaaaaaaaaaaaaaaaaaaaaaaaaaaaaaaaaaaaaaaaaaaaaaaaaaaaaaaaaaaaaaaaaa

SEQ ID NO: 16559 - RNA, 9485 nt, synthetic construct
  source 1..9485: mol_type = other RNA
aggaaataagagagaaaagaagagtaagaagaaatataagagccaccatggcccctaagaagaagcgtaaagtgagccggatggaacgcctcgtctacgaggtgcggcagaagtgcagaaacatcgaggacatctgcatctcctgcggatctctgaacgtgaccctggagcacccactgttcatcggcggcatgtgccagaactgtaaaaactgttttctggagtgtgcctatcaatacgacgatgacggctaccagagctactgcaccatctgttgcggcggaagagaggtgctgatgtgtggaaataacaactgctgccggtgcttctgcgtggaatgcgtggacctgctggtgggccccggcgccgcccaggccgctattaaggaagatccttggaactgctacatgtgcggccacaagggcacatacggcctgctgagacggagagaggactggcctagcagactgcagatgttcttcgccaataaccacgaccaggagttcgacccccctaaggtgtaccctcccgtccccgccgagaagagaaagcccatccgggtcctgagcctgttcgatggcatcgccaccggtctgctggtgctgaaggacctgggcatccaggtggataggtacattgcctccgaggtgtgcgaggactccatcaccgtgggaatggtgcgtcatcagggcaagatcatgtacgtgggcgacgtgcggagcgtgacacagaagcatatccaggagtggggccctttcgacctggtgatcggcggcagcccttgcaatgacctgagcatcgtgaacccagcccggaagggcctgtacgagggaaccggcagactgttcttcgagttttacagactgctgcacgacgcccggcctaaggaaggcgacgaccggcccttcttttggctgttcgagaatgtggtggccatgggagtcagcgacaagcgggatattagccggttcctggagagcaaccccgtgatgatcgatgccaaggaagtgagcgccgcccaccgggccagatacttctggggcaatctgcctggcatgaacagacccctggccagcaccgtgaacgacaagctggagctgcaggagtgcctggagcacggccggatcgccaagttcagcaaggtgagaaccatcaccacccgaagcaacagcatcaaacaaggcaaggaccagcactttcctgtgttcatgaacgagaaggaggacatcctgtggtgtaccgagatggagagagtgttcgggttcccagtccactacacagatgtcagcaacatgtctagactggccagacagagactgctgggaagaagctggtccgtccctgtgatcagacacctgttcgcccctctgaaggagtacttcgcctgcgtgagcagcggcaacagcaacgccaacagccggggccccagcttctctagcggcctggtgccactgtccctgagagggagccacatgggccccatggagatctacaaaaccgtgagcgcctggaagcggcagcctgtgcgcgtgctgagcctgtttcggaatatcgataaagtcctgaaaagcctgggattcctggagagcggctctggctccggcggtggcaccctgaagtacgtggaggatgtgacaaacgtggtcagacgggatgtggagaagtggggccccttcgatctggtgtacggcagcacccaacccctgggcagctcttgtgaccggtgccctggctggtacatgtttcagttccaccggatcctgcagtacgccctgccgagacaggagtcccagcggccattcttttggattttcatggacaacttgctgctgaccgaggatgaccaggaaactaccactcggttcctgcagaccgaagccgtgaccctgcaggacgtgagaggccgggactaccagaacgccatgcgggtgtggtccaacatccctggactgaaaagcaagcacgcacctctgacccctaaagaagaggagtacctgcaggcccaggtgcggagcagaagcaagctggacgcccctaaggtggatctgctggtgaagaattgcctcctgcccctgagagagtacttcaagtatttcagccagaatagtctgcccctgggaggcagcggcggcggcgccctggtgacatttgaggacgtcgccgtgcggttcacccaggaggaatgggctctgctggatccttctcagaaaatcctgtaccgggacgtgatgagagagacataccggaatctgacctccgtgggcatcaactgggaatgttgggaccttgaagcctgcttcagaagcctgggaagaaacctgagagtgcaggtggtgaagagaaagtgcgagctgaccaacagcggcccctgcgccgagggcggcccaagcagcggcgcccctcctcccagcggcggcagcccagccggctccccaacctctaccgaggagggcacctctgagtccgccacccccgagagcggccctggcacctccaccgagcccagcgagggcagcgcacccggcagccctgccggcagccccacctccacagaggagggaaccagcaccgagcccagcgaaggcagcgccccaggcaccagcaccgagcctagtgagcaggagattaaacggatcaacaagatcagaagaagacttgtgaaagacagcaacaccaagaaggccggcaagacaggccccatgaaaaccctgctggttagagtgatgacacccgatctgagagagcggctggaaaacctgagaaagaagcctgaaaatatcccccagcccatcagcaatacatctagagccaacctgaataagctgctgaccgattacaccgaaatgaagaaggcgatcctgcatgtgtactgggaagagttccagaaggaccctgtgggcctgatgagccgggtggcccagcctgccagcaagaagatcgatcagaacaagctgaaacctgagatggacgagaagggcaacctgaccaccgccggctttgcctgctctcagtgtggccagcccctgttcgtgtacaagctggagcaggtgtctgagaagggcaaggcttacaccaactacttcggacggtgcaatgtggccgagcacgaaaagctgatcctgctggcccagctgaagcccgagaaggatagcgacgaagccgtgacatatagcctgggaaagtttgggcagagggccctggatttctacagcattcatgtgaccaaggagtccacccaccccgtgaagcccctggcccagatcgccggaaacagatacgcctccggacctgtgggaaaggccctgagcgacgcatgtatgggcacaatcgcctccttcctgtctaagtaccaggacatcatcatcgaacaccagaaggtggtgaagggcaaccagaagagactggagagcctgcgggagctggccggcaaggaaaacctggaataccctagcgtgaccctgccacctcagcctcacaccaaggagggcgttgatgcctacaacgaagtgatcgcccgggtgcgaatgtgggtgaacctgaacctgtggcagaagctgaagctaagcagagatgatgccaagcctctgctgagactgaagggattcccttcctttcctctggtcgagagacaggccaacgaagtggactggtgggacatggtgtgtaacgtgaagaagctgatcaacgagaaaaaggaggatggcaaggtgttttggcagaatctggctggctacaagagacaggaagccctgagaccatacctgagcagcgaggaagatcggaagaagggaaagaaattcgctcggtaccagctgggcgacctgctgctgcacctggaaaagaagcacggcgaggactggggaaaggtgtacgacgaggcctgggagcggattgacaagaaagtggaaggcctgagcaagcacatcaagctggaagaggaacggagaagcgaggacgcccagagcaaggccgccctgaccgactggctgcgggctaaggccagcttcgtgatcgagggcctgaaggaggccgacaaggacgagttctgcagatgcgagctgaagctgcagaagtggtacggggacctgcggggaaagcccttcgccatcgaagccgagaacagcatcctggacatcagcggcttcagcaagcagtacaactgtgccttcatctggcagaaggacggcgtgaagaagctgaacctgtacctgatcatcaactacttcaagggcggcaagctgcggttcaagaagatcaaacctgaagccttcgaagccaacagattctacaccgtgatcaacaaaaagagcggcgagatcgtgcccatggaggtgaacttcaacttcgacgaccccaacctgatcatcctgcctctggcctttggcaagagacagggcagagaattcatctggaacgacctgctgtccctggaaaccggcagcctgaagctggccaacggaagagtgatcgagaagacactgtacaacagaagaacccggcaggatgagcctgccctgttcgtggccctgaccttcgagcggcgggaggtcctggactcctccaatatcaaaccaatgaacctgatcggcgtggcaagaggcgaaaacatccccgccgtgatcgccctgaccgaccccgagggctgcccactgagccggtttaaggatagcctgggaaacccaacccacatcctgagaatcggcgagagctataaggagaagcagcggaccatccaggccaagaaggaggtggagcagcggagagccggcggctacagccggaagtacgccagcaaagccaagaatctggcagacgatatggtgagaaacaccgctagagatctgctgtactacgccgtgacccaggatgccatgctgatcttcgccaacctgagccggggcttcggccggcagggcaagcggaccttcatggccgagagacagtacacacggatggaggactggctgaccgccaagctggcctacgagggcctgagcaagacctacctgtccaagacactggcccagtacacctccaagacatgcagcaactgtgggtttaccatcaccagcgccgactacgacagggtgctggagaagctgaagaagacagcaacaggctggatgaccacaattaacggcaaggagctgaaggtggagggccagattacctactacaacagatacaagagacagaacgtagtcaaggacctgtccgtcgagctggatagactgagcgaagaatctgtgaacaacgacatctcctcctggacaaagggcagaagcggagaagctctgagcctcctgaagaaaagattctcccatagacccgtgcaggagaagttcgtgtgcctgaactgcggcttcgagacacacgcagccgagcaagccgccctgaacatcgccagatcctggctgttcctgcggagccaggagtacaagaaataccagacaaacaagacaaccggcaacaccgataagagagccttcgtcgagacctggcagtccttttaccggaagaagcttaaggaggtgtggaaacctgccgtgcggtctggcggatctggcggaggctccttccaggccagcgtgagcttcaaggacgtgaccgtggagctgacccaggaggagtggcagcagatgggccccctgcagaggaccctgtacagggacgtgatgctggagaactacaacaacctggtgagcgtgggcagctgcatctacaagcccgagctgatcttcaagctggagcagggcgaggagccctggctgctggaggaggagttcagcaaccagagctaccaggtgctggagcactacggcggcccaagcagcggcgcccctcctcccagcggcggcagcccagccggctccccaacctctaccgaggagggcacctctgagtccgccacccccgagagcggccctggcacctccaccgagcccagcgagggcagcgcacccggcagccctgccggcagccccacctccacagaggagggaaccagcaccgagcccagcgaaggcagcgccccaggcaccagcaccgagcctagtgagcaggagattaaacggatcaacaagatcagaagaagacttgtgaaagacagcaacaccaagaaggccggcaagacaggccccatgaaaaccctgctggttagagtgatgacacccgatctgagagagcggctggaaaacctgagaaagaagcctgaaaatatcccccagcccatcagcaatacatctagagccaacctgaataagctgctgaccgattacaccgaaatgaagaaggcgatcctgcatgtgtactgggaagagttccagaaggaccctgtgggcctgatgagccgggtggcccagcctgccagcaagaagatcgatcagaacaagctgaaacctgagatggacgagaagggcaacctgaccaccgccggctttgcctgctctcagtgtggccagcccctgttcgtgtacaagctggagcaggtgtctgagaagggcaaggcttacaccaactacttcggacggtgcaatgtggccgagcacgaaaagctgatcctgctggcccagctgaagcccgagaaggatagcgacgaagccgtgacatatagcctgggaaagtttgggcagagggccctggatttctacagcattcatgtgaccaaggagtccacccaccccgtgaagcccctggcccagatcgccggaaacagatacgcctccggacctgtgggaaaggccctgagcgacgcatgtatgggcacaatcgcctccttcctgtctaagtaccaggacatcatcatcgaacaccagaaggtggtgaagggcaaccagaagagactggagagcctgcgggagctggccggcaaggaaaacctggaataccctagcgtgaccctgccacctcagcctcacaccaaggagggcgttgatgcctacaacgaagtgatcgcccgggtgcgaatgtgggtgaacctgaacctgtggcagaagctgaagctaagcagagatgatgccaagcctctgctgagactgaagggattcccttcctttcctctggtcgagagacaggccaacgaagtggactggtgggacatggtgtgtaacgtgaagaagctgatcaacgagaaaaaggaggatggcaaggtgttttggcagaatctggctggctacaagagacaggaagccctgagaccatacctgagcagcgaggaagatcggaagaagggaaagaaattcgctcggtaccagctgggcgacctgctgctgcacctggaaaagaagcacggcgaggactggggaaaggtgtacgacgaggcctgggagcggattgacaagaaagtggaaggcctgagcaagcacatcaagctggaagaggaacggagaagcgaggacgcccagagcaaggccgccctgaccgactggctgcgggctaaggccagcttcgtgatcgagggcctgaaggaggccgacaaggacgagttctgcagatgcgagctgaagctgcagaagtggtacggggacctgcggggaaagcccttcgccatcgaagccgagaacagcatcctggacatcagcggcttcagcaagcagtacaactgtgccttcatctggcagaaggacggcgtgaagaagctgaacctgtacctgatcatcaactacttcaagggcggcaagctgcggttcaagaagatcaaacctgaagccttcgaagccaacagattctacaccgtgatcaacaaaaagagcggcgagatcgtgcccatggaggtgaacttcaacttcgacgaccccaacctgatcatcctgcctctggcctttggcaagagacagggcagagaattcatctggaacgacctgctgtccctggaaaccggcagcctgaagctggccaacggaagagtgatcgagaagacactgtacaacagaagaacccggcaggatgagcctgccctgttcgtggccctgaccttcgagcggcgggaggtcctggactcctccaatatcaaaccaatgaacctgatcggcgtggcaagaggcgaaaacatccccgccgtgatcgccctgaccgaccccgagggctgcccactgagccggtttaaggatagcctgggaaacccaacccacatcctgagaatcggcgagagctataaggagaagcagcggaccatccaggccaagaaggaggtggagcagcggagagccggcggctacagccggaagtacgccagcaaagccaagaatctggcagacgatatggtgagaaacaccgctagagatctgctgtactacgccgtgacccaggatgccatgctgatcttcgccaacctgagccggggcttcggccggcagggcaagcggaccttcatggccgagagacagtacacacggatggaggactggctgaccgccaagctggcctacgagggcctgagcaagacctacctgtccaagacactggcccagtacacctccaagacatgcagcaactgtgggtttaccatcaccagcgccgactacgacagggtgctggagaagctgaagaagacagcaacaggctggatgaccacaattaacggcaaggagctgaaggtggagggccagattacctactacaacagatacaagagacagaacgtagtcaaggacctgtccgtcgagctggatagactgagcgaagaatctgtgaacaacgacatctcctcctggacaaagggcagaagcggagaagctctgagcctcctgaagaaaagattctcccatagacccgtgcaggagaagttcgtgtgcctgaactgcggcttcgagacacacgcagccgagcaagccgccctgaacatcgccagatcctggctgttcctgcggagccaggagtacaagaaataccagacaaacaagacaaccggcaacaccgataagagagccttcgtcgagacctggcagtccttttaccggaagaagcttaaggaggtgtggaaacctgccgtgcggtctggcggatctggcggaggctcctttccaggccagcgtgagcttcaaggacgtgaccgtggagctgacccaggaggagtggcagcagatgggccccctgcagaggaccctgtacagggacgtgatgctggagaactacaacaacctggtgagcgtgggcagctgcatctacaagcccgagctgatcttcaagctggagcagggcgaggagccctggctgctggaggaggagttcagcaaccagagctaccaggtgctggagcactacggatctggctccggcagcggccccaagaaaaagagaaaagtctaagctgccttctgcggggcttgccttctggccatgcccttcttctctcccttgcacctgtacctcttggtctttgaataaagcctgagtaggaaggctagcaaaaaaaaaaaaaaaaaaaaaaaaaaaaaaaaaaaaaaaaaaaaaaaaaaaaaaaaaaaaaaaaaaaaaaaaaaaaaaaa

SEQ ID NO: 16560 - RNA, 9485 nt, synthetic construct
  source 1..9485: mol_type = other RNA
aggaaataagagagaaaagaagagtaagaagaaatataagagccaccatggcccctaagaagaagcgtaaagtgagccggatggaacgcctcgtctacgaggtgcggcagaagtgcagaaacatcgaggacatctgcatctcctgcggatctctgaacgtgaccctggagcacccactgttcatcggcggcatgtgccagaactgtaaaaactgttttctggagtgtgcctatcaatacgacgatgacggctaccagagctactgcaccatctgttgcggcggaagagaggtgctgatgtgtggaaataacaactgctgccggtgcttctgcgtggaatgcgtggacctgctggtgggccccggcgccgcccaggccgctattaaggaagatccttggaactgctacatgtgcggccacaagggcacatacggcctgctgagacggagagaggactggcctagcagactgcagatgttcttcgccaataaccacgaccaggagttcgacccccctaaggtgtaccctcccgtccccgccgagaagagaaagcccatccgggtcctgagcctgttcgatggcatcgccaccggtctgctggtgctgaaggacctgggcatccaggtggataggtacattgcctccgaggtgtgcgaggactccatcaccgtgggaatggtgcgtcatcagggcaagatcatgtacgtgggcgacgtgcggagcgtgacacagaagcatatccaggagtggggccctttcgacctggtgatcggcggcagcccttgcaatgacctgagcatcgtgaacccagcccggaagggcctgtacgagggaaccggcagactgttcttcgagttttacagactgctgcacgacgcccggcctaaggaaggcgacgaccggcccttcttttggctgttcgagaatgtggtggccatgggagtcagcgacaagcgggatattagccggttcctggagagcaaccccgtgatgatcgatgccaaggaagtgagcgccgcccaccgggccagatacttctggggcaatctgcctggcatgaacagacccctggccagcaccgtgaacgacaagctggagctgcaggagtgcctggagcacggccggatcgccaagttcagcaaggtgagaaccatcaccacccgaagcaacagcatcaaacaaggcaaggaccagcactttcctgtgttcatgaacgagaaggaggacatcctgtggtgtaccgagatggagagagtgttcgggttcccagtccactacacagatgtcagcaacatgtctagactggccagacagagactgctgggaagaagctggtccgtccctgtgatcagacacctgttcgcccctctgaaggagtacttcgcctgcgtgagcagcggcaacagcaacgccaacagccggggccccagcttctctagcggcctggtgccactgtccctgagagggagccacatgggccccatggagatctacaaaaccgtgagcgcctggaagcggcagcctgtgcgcgtgctgagcctgtttcggaatatcgataaagtcctgaaaagcctgggattcctggagagcggctctggctccggcggtggcaccctgaagtacgtggaggatgtgacaaacgtggtcagacgggatgtggagaagtggggccccttcgatctggtgtacggcagcacccaacccctgggcagctcttgtgaccggtgccctggctggtacatgtttcagttccaccggatcctgcagtacgccctgccgagacaggagtcccagcggccattcttttggattttcatggacaacttgctgctgaccgaggatgaccaggaaactaccactcggttcctgcagaccgaagccgtgaccctgcaggacgtgagaggccgggactaccagaacgccatgcgggtgtggtccaacatccctggactgaaaagcaagcacgcacctctgacccctaaagaagaggagtacctgcaggcccaggtgcggagcagaagcaagctggacgcccctaaggtggatctgctggtgaagaattgcctcctgcccctgagagagtacttcaagtatttcagccagaatagtctgcccctgggaggcagcggcggcggcgccctggtgacatttgaggacgtcgccgtgcggttcacccaggaggaatgggctctgctggatccttctcagaaaatcctgtaccgggacgtgatgagagagacataccggaatctgacctccgtgggcatcaactgggaatgttgggaccttgaagcctgcttcagaagcctgggaagaaacctgagagtgcaggtggtgaagagaaagtgcgagctgaccaacagcggcccctgcgccgagggcggcccaagcagcggcgcccctcctcccagcggcggcagcccagccggctccccaacctctaccgaggagggcacctctgagtccgccacccccgagagcggccctggcacctccaccgagcccagcgagggcagcgcacccggcagccctgccggcagccccacctccacagaggagggaaccagcaccgagcccagcgaaggcagcgccccaggcaccagcaccgagcctagtgagcaggagattaaacggatcaacaagatcagaagaagacttgtgaaagacagcaacaccaagaaggccggcaagacaggccccatgaaaaccctgctggttagagtgatgacacccgatctgagagagcggctggaaaacctgagaaagaagcctgaaaatatcccccagcccatcagcaatacatctagagccaacctgaataagctgctgaccgattacaccgaaatgaagaaggcgatcctgcatgtgtactgggaagagttccagaaggaccctgtgggcctgatgagccgggtggcccagcctgccagcaagaagatcgatcagaacaagctgaaacctgagatggacgagaagggcaacctgaccaccgccggctttgcctgctctcagtgtggccagcccctgttcgtgtacaagctggagcaggtgtctgagaagggcaaggcttacaccaactacttcggacggtgcaatgtggccgagcacgaaaagctgatcctgctggcccagctgaagcccgagaaggatagcgacgaagccgtgacatatagcctgggaaagtttgggcagagggccctggatttctacagcattcatgtgaccaaggagtccacccaccccgtgaagcccctggcccagatcgccggaaacagatacgcctccggacctgtgggaaaggccctgagcgacgcatgtatgggcacaatcgcctccttcctgtctaagtaccaggacatcatcatcgaacaccagaaggtggtgaagggcaaccagaagagactggagagcctgcgggagctggccggcaaggaaaacctggaataccctagcgtgaccctgccacctcagcctcacaccaaggagggcgttgatgcctacaacgaagtgatcgcccgggtgcgaatgtgggtgaacctgaacctgtggcagaagctgaagctaagcagagatgatgccaagcctctgctgagactgaagggattcccttcctttcctctggtcgagagacaggccaacgaagtggactggtgggacatggtgtgtaacgtgaagaagctgatcaacgagaaaaaggaggatggcaaggtgttttggcagaatctggctggctacaagagacaggaagccctgagaccatacctgagcagcgaggaagatcggaagaagggaaagaaattcgctcggtaccagctgggcgacctgctgctgcacctggaaaagaagcacggcgaggactggggaaaggtgtacgacgaggcctgggagcggattgacaagaaagtggaaggcctgagcaagcacatcaagctggaagaggaacggagaagcgaggacgcccagagcaaggccgccctgaccgactggctgcgggctaaggccagcttcgtgatcgagggcctgaaggaggccgacaaggacgagttctgcagatgcgagctgaagctgcagaagtggtacggggacctgcggggaaagcccttcgccatcgaagccgagaacagcatcctggacatcagcggcttcagcaagcagtacaactgtgccttcatctggcagaaggacggcgtgaagaagctgaacctgtacctgatcatcaactacttcaagggcggcaagctgcggttcaagaagatcaaacctgaagccttcgaagccaacagattctacaccgtgatcaacaaaaagagcggcgagatcgtgcccatggaggtgaacttcaacttcgacgaccccaacctgatcatcctgcctctggcctttggcaagagacagggcagagaattcatctggaacgacctgctgtccctggaaaccggcagcctgaagctggccaacggaagagtgatcgagaagacactgtacaacagaagaacccggcaggatgagcctgccctgttcgtggccctgaccttcgagcggcgggaggtcctggactcctccaatatcaaaccaatgaacctgatcggcgtggcaagaggcgaaaacatccccgccgtgatcgccctgaccgaccccgagggctgcccactgagccggtttaaggatagcctgggaaacccaacccacatcctgagaatcggcgagagctataaggagaagcagcggaccatccaggccaagaaggaggtggagcagcggagagccggcggctacagccggaagtacgccagcaaagccaagaatctggcagacgatatggtgagaaacaccgctagagatctgctgtactacgccgtgacccaggatgccatgctgatcttcgccaacctgagccggggcttcggccggcagggcaagcggaccttcatggccgagagacagtacacacggatggaggactggctgaccgccaagctggcctacgagggcctgagcaagacctacctgtccaagacactggcccagtacacctccaagacatgcagcaactgtgggtttaccatcaccagcgccgactacgacagggtgctggagaagctgaagaagacagcaacaggctggatgaccacaattaacggcaaggagctgaaggtggagggccagattacctactacaacagatacaagagacagaacgtagtcaaggacctgtccgtcgagctggatagactgagcgaagaatctgtgaacaacgacatctcctcctggacaaagggcagaagcggagaagctctgagcctcctgaagaaaagattctcccatagacccgtgcaggagaagttcgtgtgcctgaactgcggcttcgagacacacgcagccgagcaagccgccctgaacatcgccagatcctggctgttcctgcggagccaggagtacaagaaataccagacaaacaagacaaccggcaacaccgataagagagccttcgtcgagacctggcagtccttttaccggaagaagcttaaggaggtgtggaaacctgccgtgcggtctggcggatctggcggaggctccatgaacgccgtgacctacagggacgtgcacgtgaacttcacccaggaggagtgggccctgctggaccccagccagaagaagctgtacaaggacgtgatgctggagacctacaggaacctgaacgccatcggcttcaactgggaggcccagaacatcgaggagcactgccagagcagcaggaggcacaggaggtgcgagaggagccagagcgccgagaagcccagcgagtacacccagagggacggcggcccaagcagcggcgcccctcctcccagcggcggcagcccagccggctccccaacctctaccgaggagggcacctctgagtccgccacccccgagagcggccctggcacctccaccgagcccagcgagggcagcgcacccggcagccctgccggcagccccacctccacagaggagggaaccagcaccgagcccagcgaaggcagcgccccaggcaccagcaccgagcctagtgagcaggagattaaacggatcaacaagatcagaagaagacttgtgaaagacagcaacaccaagaaggccggcaagacaggccccatgaaaaccctgctggttagagtgatgacacccgatctgagagagcggctggaaaacctgagaaagaagcctgaaaatatcccccagcccatcagcaatacatctagagccaacctgaataagctgctgaccgattacaccgaaatgaagaaggcgatcctgcatgtgtactgggaagagttccagaaggaccctgtgggcctgatgagccgggtggcccagcctgccagcaagaagatcgatcagaacaagctgaaacctgagatggacgagaagggcaacctgaccaccgccggctttgcctgctctcagtgtggccagcccctgttcgtgtacaagctggagcaggtgtctgagaagggcaaggcttacaccaactacttcggacggtgcaatgtggccgagcacgaaaagctgatcctgctggcccagctgaagcccgagaaggatagcgacgaagccgtgacatatagcctgggaaagtttgggcagagggccctggatttctacagcattcatgtgaccaaggagtccacccaccccgtgaagcccctggcccagatcgccggaaacagatacgcctccggacctgtgggaaaggccctgagcgacgcatgtatgggcacaatcgcctccttcctgtctaagtaccaggacatcatcatcgaacaccagaaggtggtgaagggcaaccagaagagactggagagcctgcgggagctggccggcaaggaaaacctggaataccctagcgtgaccctgccacctcagcctcacaccaaggagggcgttgatgcctacaacgaagtgatcgcccgggtgcgaatgtgggtgaacctgaacctgtggcagaagctgaagctaagcagagatgatgccaagcctctgctgagactgaagggattcccttcctttcctctggtcgagagacaggccaacgaagtggactggtgggacatggtgtgtaacgtgaagaagctgatcaacgagaaaaaggaggatggcaaggtgttttggcagaatctggctggctacaagagacaggaagccctgagaccatacctgagcagcgaggaagatcggaagaagggaaagaaattcgctcggtaccagctgggcgacctgctgctgcacctggaaaagaagcacggcgaggactggggaaaggtgtacgacgaggcctgggagcggattgacaagaaagtggaaggcctgagcaagcacatcaagctggaagaggaacggagaagcgaggacgcccagagcaaggccgccctgaccgactggctgcgggctaaggccagcttcgtgatcgagggcctgaaggaggccgacaaggacgagttctgcagatgcgagctgaagctgcagaagtggtacggggacctgcggggaaagcccttcgccatcgaagccgagaacagcatcctggacatcagcggcttcagcaagcagtacaactgtgccttcatctggcagaaggacggcgtgaagaagctgaacctgtacctgatcatcaactacttcaagggcggcaagctgcggttcaagaagatcaaacctgaagccttcgaagccaacagattctacaccgtgatcaacaaaaagagcggcgagatcgtgcccatggaggtgaacttcaacttcgacgaccccaacctgatcatcctgcctctggcctttggcaagagacagggcagagaattcatctggaacgacctgctgtccctggaaaccggcagcctgaagctggccaacggaagagtgatcgagaagacactgtacaacagaagaacccggcaggatgagcctgccctgttcgtggccctgaccttcgagcggcgggaggtcctggactcctccaatatcaaaccaatgaacctgatcggcgtggcaagaggcgaaaacatccccgccgtgatcgccctgaccgaccccgagggctgcccactgagccggtttaaggatagcctgggaaacccaacccacatcctgagaatcggcgagagctataaggagaagcagcggaccatccaggccaagaaggaggtggagcagcggagagccggcggctacagccggaagtacgccagcaaagccaagaatctggcagacgatatggtgagaaacaccgctagagatctgctgtactacgccgtgacccaggatgccatgctgatcttcgccaacctgagccggggcttcggccggcagggcaagcggaccttcatggccgagagacagtacacacggatggaggactggctgaccgccaagctggcctacgagggcctgagcaagacctacctgtccaagacactggcccagtacacctccaagacatgcagcaactgtgggtttaccatcaccagcgccgactacgacagggtgctggagaagctgaagaagacagcaacaggctggatgaccacaattaacggcaaggagctgaaggtggagggccagattacctactacaacagatacaagagacagaacgtagtcaaggacctgtccgtcgagctggatagactgagcgaagaatctgtgaacaacgacatctcctcctggacaaagggcagaagcggagaagctctgagcctcctgaagaaaagattctcccatagacccgtgcaggagaagttcgtgtgcctgaactgcggcttcgagacacacgcagccgagcaagccgccctgaacatcgccagatcctggctgttcctgcggagccaggagtacaagaaataccagacaaacaagacaaccggcaacaccgataagagagccttcgtcgagacctggcagtccttttaccggaagaagcttaaggaggtgtggaaacctgccgtgcggtctggcggatctggcggaggctcctatgaacgccgtgacctacagggacgtgcacgtgaacttcacccaggaggagtgggccctgctggaccccagccagaagaagctgtacaaggacgtgatgctggagacctacaggaacctgaacgccatcggcttcaactgggaggcccagaacatcgaggagcactgccagagcagcaggaggcacaggaggtgcgagaggagccagagcgccgagaagcccagcgagtacacccagagggacggatctggctccggcagcggccccaagaaaaagagaaaagtctaagctgccttctgcggggcttgccttctggccatgcccttcttctctcccttgcacctgtacctcttggtctttgaataaagcctgagtaggaaggctagcaaaaaaaaaaaaaaaaaaaaaaaaaaaaaaaaaaaaaaaaaaaaaaaaaaaaaaaaaaaaaaaaaaaaaaaaaaaaaaaa

SEQ ID NO: 16561 - RNA, 9485 nt, synthetic construct
  source 1..9485: mol_type = other RNA
aggaaataagagagaaaagaagagtaagaagaaatataagagccaccatggcccctaagaagaagcgtaaagtgagccggatggaacgcctcgtctacgaggtgcggcagaagtgcagaaacatcgaggacatctgcatctcctgcggatctctgaacgtgaccctggagcacccactgttcatcggcggcatgtgccagaactgtaaaaactgttttctggagtgtgcctatcaatacgacgatgacggctaccagagctactgcaccatctgttgcggcggaagagaggtgctgatgtgtggaaataacaactgctgccggtgcttctgcgtggaatgcgtggacctgctggtgggccccggcgccgcccaggccgctattaaggaagatccttggaactgctacatgtgcggccacaagggcacatacggcctgctgagacggagagaggactggcctagcagactgcagatgttcttcgccaataaccacgaccaggagttcgacccccctaaggtgtaccctcccgtccccgccgagaagagaaagcccatccgggtcctgagcctgttcgatggcatcgccaccggtctgctggtgctgaaggacctgggcatccaggtggataggtacattgcctccgaggtgtgcgaggactccatcaccgtgggaatggtgcgtcatcagggcaagatcatgtacgtgggcgacgtgcggagcgtgacacagaagcatatccaggagtggggccctttcgacctggtgatcggcggcagcccttgcaatgacctgagcatcgtgaacccagcccggaagggcctgtacgagggaaccggcagactgttcttcgagttttacagactgctgcacgacgcccggcctaaggaaggcgacgaccggcccttcttttggctgttcgagaatgtggtggccatgggagtcagcgacaagcgggatattagccggttcctggagagcaaccccgtgatgatcgatgccaaggaagtgagcgccgcccaccgggccagatacttctggggcaatctgcctggcatgaacagacccctggccagcaccgtgaacgacaagctggagctgcaggagtgcctggagcacggccggatcgccaagttcagcaaggtgagaaccatcaccacccgaagcaacagcatcaaacaaggcaaggaccagcactttcctgtgttcatgaacgagaaggaggacatcctgtggtgtaccgagatggagagagtgttcgggttcccagtccactacacagatgtcagcaacatgtctagactggccagacagagactgctgggaagaagctggtccgtccctgtgatcagacacctgttcgcccctctgaaggagtacttcgcctgcgtgagcagcggcaacagcaacgccaacagccggggccccagcttctctagcggcctggtgccactgtccctgagagggagccacatgggccccatggagatctacaaaaccgtgagcgcctggaagcggcagcctgtgcgcgtgctgagcctgtttcggaatatcgataaagtcctgaaaagcctgggattcctggagagcggctctggctccggcggtggcaccctgaagtacgtggaggatgtgacaaacgtggtcagacgggatgtggagaagtggggccccttcgatctggtgtacggcagcacccaacccctgggcagctcttgtgaccggtgccctggctggtacatgtttcagttccaccggatcctgcagtacgccctgccgagacaggagtcccagcggccattcttttggattttcatggacaacttgctgctgaccgaggatgaccaggaaactaccactcggttcctgcagaccgaagccgtgaccctgcaggacgtgagaggccgggactaccagaacgccatgcgggtgtggtccaacatccctggactgaaaagcaagcacgcacctctgacccctaaagaagaggagtacctgcaggcccaggtgcggagcagaagcaagctggacgcccctaaggtggatctgctggtgaagaattgcctcctgcccctgagagagtacttcaagtatttcagccagaatagtctgcccctgggaggcagcggcggcggcgccctggtgacatttgaggacgtcgccgtgcggttcacccaggaggaatgggctctgctggatccttctcagaaaatcctgtaccgggacgtgatgagagagacataccggaatctgacctccgtgggcatcaactgggaatgttgggaccttgaagcctgcttcagaagcctgggaagaaacctgagagtgcaggtggtgaagagaaagtgcgagctgaccaacagcggcccctgcgccgagggcggcccaagcagcggcgcccctcctcccagcggcggcagcccagccggctccccaacctctaccgaggagggcacctctgagtccgccacccccgagagcggccctggcacctccaccgagcccagcgagggcagcgcacccggcagccctgccggcagccccacctccacagaggagggaaccagcaccgagcccagcgaaggcagcgccccaggcaccagcaccgagcctagtgagcaggagattaaacggatcaacaagatcagaagaagacttgtgaaagacagcaacaccaagaaggccggcaagacaggccccatgaaaaccctgctggttagagtgatgacacccgatctgagagagcggctggaaaacctgagaaagaagcctgaaaatatcccccagcccatcagcaatacatctagagccaacctgaataagctgctgaccgattacaccgaaatgaagaaggcgatcctgcatgtgtactgggaagagttccagaaggaccctgtgggcctgatgagccgggtggcccagcctgccagcaagaagatcgatcagaacaagctgaaacctgagatggacgagaagggcaacctgaccaccgccggctttgcctgctctcagtgtggccagcccctgttcgtgtacaagctggagcaggtgtctgagaagggcaaggcttacaccaactacttcggacggtgcaatgtggccgagcacgaaaagctgatcctgctggcccagctgaagcccgagaaggatagcgacgaagccgtgacatatagcctgggaaagtttgggcagagggccctggatttctacagcattcatgtgaccaaggagtccacccaccccgtgaagcccctggcccagatcgccggaaacagatacgcctccggacctgtgggaaaggccctgagcgacgcatgtatgggcacaatcgcctccttcctgtctaagtaccaggacatcatcatcgaacaccagaaggtggtgaagggcaaccagaagagactggagagcctgcgggagctggccggcaaggaaaacctggaataccctagcgtgaccctgccacctcagcctcacaccaaggagggcgttgatgcctacaacgaagtgatcgcccgggtgcgaatgtgggtgaacctgaacctgtggcagaagctgaagctaagcagagatgatgccaagcctctgctgagactgaagggattcccttcctttcctctggtcgagagacaggccaacgaagtggactggtgggacatggtgtgtaacgtgaagaagctgatcaacgagaaaaaggaggatggcaaggtgttttggcagaatctggctggctacaagagacaggaagccctgagaccatacctgagcagcgaggaagatcggaagaagggaaagaaattcgctcggtaccagctgggcgacctgctgctgcacctggaaaagaagcacggcgaggactggggaaaggtgtacgacgaggcctgggagcggattgacaagaaagtggaaggcctgagcaagcacatcaagctggaagaggaacggagaagcgaggacgcccagagcaaggccgccctgaccgactggctgcgggctaaggccagcttcgtgatcgagggcctgaaggaggccgacaaggacgagttctgcagatgcgagctgaagctgcagaagtggtacggggacctgcggggaaagcccttcgccatcgaagccgagaacagcatcctggacatcagcggcttcagcaagcagtacaactgtgccttcatctggcagaaggacggcgtgaagaagctgaacctgtacctgatcatcaactacttcaagggcggcaagctgcggttcaagaagatcaaacctgaagccttcgaagccaacagattctacaccgtgatcaacaaaaagagcggcgagatcgtgcccatggaggtgaacttcaacttcgacgaccccaacctgatcatcctgcctctggcctttggcaagagacagggcagagaattcatctggaacgacctgctgtccctggaaaccggcagcctgaagctggccaacggaagagtgatcgagaagacactgtacaacagaagaacccggcaggatgagcctgccctgttcgtggccctgaccttcgagcggcgggaggtcctggactcctccaatatcaaaccaatgaacctgatcggcgtggcaagaggcgaaaacatccccgccgtgatcgccctgaccgaccccgagggctgcccactgagccggtttaaggatagcctgggaaacccaacccacatcctgagaatcggcgagagctataaggagaagcagcggaccatccaggccaagaaggaggtggagcagcggagagccggcggctacagccggaagtacgccagcaaagccaagaatctggcagacgatatggtgagaaacaccgctagagatctgctgtactacgccgtgacccaggatgccatgctgatcttcgccaacctgagccggggcttcggccggcagggcaagcggaccttcatggccgagagacagtacacacggatggaggactggctgaccgccaagctggcctacgagggcctgagcaagacctacctgtccaagacactggcccagtacacctccaagacatgcagcaactgtgggtttaccatcaccagcgccgactacgacagggtgctggagaagctgaagaagacagcaacaggctggatgaccacaattaacggcaaggagctgaaggtggagggccagattacctactacaacagatacaagagacagaacgtagtcaaggacctgtccgtcgagctggatagactgagcgaagaatctgtgaacaacgacatctcctcctggacaaagggcagaagcggagaagctctgagcctcctgaagaaaagattctcccatagacccgtgcaggagaagttcgtgtgcctgaactgcggcttcgagacacacgcagccgagcaagccgccctgaacatcgccagatcctggctgttcctgcggagccaggagtacaagaaataccagacaaacaagacaaccggcaacaccgataagagagccttcgtcgagacctggcagtccttttaccggaagaagcttaaggaggtgtggaaacctgccgtgcggtctggcggatctggcggaggctccctggtgagcttcgaggacgtggccatggacttcagcagggaggagtggcagcagctggaccccgcccagaggtgcctgtaccaggacgtgatgctggagatctacagccacctgctgagcgtggagggcgccctgggcctgaagaccagccagcagaagatcttcgagaaggccagcttccacaacggcaaggagagcgaggtgaccaggggcggcatgtggtgcagcatcagcgaggacctgggcggcccaagcagcggcgcccctcctcccagcggcggcagcccagccggctccccaacctctaccgaggagggcacctctgagtccgccacccccgagagcggccctggcacctccaccgagcccagcgagggcagcgcacccggcagccctgccggcagccccacctccacagaggagggaaccagcaccgagcccagcgaaggcagcgccccaggcaccagcaccgagcctagtgagcaggagattaaacggatcaacaagatcagaagaagacttgtgaaagacagcaacaccaagaaggccggcaagacaggccccatgaaaaccctgctggttagagtgatgacacccgatctgagagagcggctggaaaacctgagaaagaagcctgaaaatatcccccagcccatcagcaatacatctagagccaacctgaataagctgctgaccgattacaccgaaatgaagaaggcgatcctgcatgtgtactgggaagagttccagaaggaccctgtgggcctgatgagccgggtggcccagcctgccagcaagaagatcgatcagaacaagctgaaacctgagatggacgagaagggcaacctgaccaccgccggctttgcctgctctcagtgtggccagcccctgttcgtgtacaagctggagcaggtgtctgagaagggcaaggcttacaccaactacttcggacggtgcaatgtggccgagcacgaaaagctgatcctgctggcccagctgaagcccgagaaggatagcgacgaagccgtgacatatagcctgggaaagtttgggcagagggccctggatttctacagcattcatgtgaccaaggagtccacccaccccgtgaagcccctggcccagatcgccggaaacagatacgcctccggacctgtgggaaaggccctgagcgacgcatgtatgggcacaatcgcctccttcctgtctaagtaccaggacatcatcatcgaacaccagaaggtggtgaagggcaaccagaagagactggagagcctgcgggagctggccggcaaggaaaacctggaataccctagcgtgaccctgccacctcagcctcacaccaaggagggcgttgatgcctacaacgaagtgatcgcccgggtgcgaatgtgggtgaacctgaacctgtggcagaagctgaagctaagcagagatgatgccaagcctctgctgagactgaagggattcccttcctttcctctggtcgagagacaggccaacgaagtggactggtgggacatggtgtgtaacgtgaagaagctgatcaacgagaaaaaggaggatggcaaggtgttttggcagaatctggctggctacaagagacaggaagccctgagaccatacctgagcagcgaggaagatcggaagaagggaaagaaattcgctcggtaccagctgggcgacctgctgctgcacctggaaaagaagcacggcgaggactggggaaaggtgtacgacgaggcctgggagcggattgacaagaaagtggaaggcctgagcaagcacatcaagctggaagaggaacggagaagcgaggacgcccagagcaaggccgccctgaccgactggctgcgggctaaggccagcttcgtgatcgagggcctgaaggaggccgacaaggacgagttctgcagatgcgagctgaagctgcagaagtggtacggggacctgcggggaaagcccttcgccatcgaagccgagaacagcatcctggacatcagcggcttcagcaagcagtacaactgtgccttcatctggcagaaggacggcgtgaagaagctgaacctgtacctgatcatcaactacttcaagggcggcaagctgcggttcaagaagatcaaacctgaagccttcgaagccaacagattctacaccgtgatcaacaaaaagagcggcgagatcgtgcccatggaggtgaacttcaacttcgacgaccccaacctgatcatcctgcctctggcctttggcaagagacagggcagagaattcatctggaacgacctgctgtccctggaaaccggcagcctgaagctggccaacggaagagtgatcgagaagacactgtacaacagaagaacccggcaggatgagcctgccctgttcgtggccctgaccttcgagcggcgggaggtcctggactcctccaatatcaaaccaatgaacctgatcggcgtggcaagaggcgaaaacatccccgccgtgatcgccctgaccgaccccgagggctgcccactgagccggtttaaggatagcctgggaaacccaacccacatcctgagaatcggcgagagctataaggagaagcagcggaccatccaggccaagaaggaggtggagcagcggagagccggcggctacagccggaagtacgccagcaaagccaagaatctggcagacgatatggtgagaaacaccgctagagatctgctgtactacgccgtgacccaggatgccatgctgatcttcgccaacctgagccggggcttcggccggcagggcaagcggaccttcatggccgagagacagtacacacggatggaggactggctgaccgccaagctggcctacgagggcctgagcaagacctacctgtccaagacactggcccagtacacctccaagacatgcagcaactgtgggtttaccatcaccagcgccgactacgacagggtgctggagaagctgaagaagacagcaacaggctggatgaccacaattaacggcaaggagctgaaggtggagggccagattacctactacaacagatacaagagacagaacgtagtcaaggacctgtccgtcgagctggatagactgagcgaagaatctgtgaacaacgacatctcctcctggacaaagggcagaagcggagaagctctgagcctcctgaagaaaagattctcccatagacccgtgcaggagaagttcgtgtgcctgaactgcggcttcgagacacacgcagccgagcaagccgccctgaacatcgccagatcctggctgttcctgcggagccaggagtacaagaaataccagacaaacaagacaaccggcaacaccgataagagagccttcgtcgagacctggcagtccttttaccggaagaagcttaaggaggtgtggaaacctgccgtgcggtctggcggatctggcggaggctcctctggtgagcttcgaggacgtggccatggacttcagcagggaggagtggcagcagctggaccccgcccagaggtgcctgtaccaggacgtgatgctggagatctacagccacctgctgagcgtggagggcgccctgggcctgaagaccagccagcagaagatcttcgagaaggccagcttccacaacggcaaggagagcgaggtgaccaggggcggcatgtggtgcagcatcagcgaggacctgggatctggctccggcagcggccccaagaaaaagagaaaagtctaagctgccttctgcggggcttgccttctggccatgcccttcttctctcccttgcacctgtacctcttggtctttgaataaagcctgagtaggaaggctagcaaaaaaaaaaaaaaaaaaaaaaaaaaaaaaaaaaaaaaaaaaaaaaaaaaaaaaaaaaaaaaaaaaaaaaaaaaaaaaaa

SEQ ID NO: 16562 - RNA, 9485 nt, synthetic construct
  source 1..9485: mol_type = other RNA
aggaaataagagagaaaagaagagtaagaagaaatataagagccaccatggcccctaagaagaagcgtaaagtgagccggatggaacgcctcgtctacgaggtgcggcagaagtgcagaaacatcgaggacatctgcatctcctgcggatctctgaacgtgaccctggagcacccactgttcatcggcggcatgtgccagaactgtaaaaactgttttctggagtgtgcctatcaatacgacgatgacggctaccagagctactgcaccatctgttgcggcggaagagaggtgctgatgtgtggaaataacaactgctgccggtgcttctgcgtggaatgcgtggacctgctggtgggccccggcgccgcccaggccgctattaaggaagatccttggaactgctacatgtgcggccacaagggcacatacggcctgctgagacggagagaggactggcctagcagactgcagatgttcttcgccaataaccacgaccaggagttcgacccccctaaggtgtaccctcccgtccccgccgagaagagaaagcccatccgggtcctgagcctgttcgatggcatcgccaccggtctgctggtgctgaaggacctgggcatccaggtggataggtacattgcctccgaggtgtgcgaggactccatcaccgtgggaatggtgcgtcatcagggcaagatcatgtacgtgggcgacgtgcggagcgtgacacagaagcatatccaggagtggggccctttcgacctggtgatcggcggcagcccttgcaatgacctgagcatcgtgaacccagcccggaagggcctgtacgagggaaccggcagactgttcttcgagttttacagactgctgcacgacgcccggcctaaggaaggcgacgaccggcccttcttttggctgttcgagaatgtggtggccatgggagtcagcgacaagcgggatattagccggttcctggagagcaaccccgtgatgatcgatgccaaggaagtgagcgccgcccaccgggccagatacttctggggcaatctgcctggcatgaacagacccctggccagcaccgtgaacgacaagctggagctgcaggagtgcctggagcacggccggatcgccaagttcagcaaggtgagaaccatcaccacccgaagcaacagcatcaaacaaggcaaggaccagcactttcctgtgttcatgaacgagaaggaggacatcctgtggtgtaccgagatggagagagtgttcgggttcccagtccactacacagatgtcagcaacatgtctagactggccagacagagactgctgggaagaagctggtccgtccctgtgatcagacacctgttcgcccctctgaaggagtacttcgcctgcgtgagcagcggcaacagcaacgccaacagccggggccccagcttctctagcggcctggtgccactgtccctgagagggagccacatgggccccatggagatctacaaaaccgtgagcgcctggaagcggcagcctgtgcgcgtgctgagcctgtttcggaatatcgataaagtcctgaaaagcctgggattcctggagagcggctctggctccggcggtggcaccctgaagtacgtggaggatgtgacaaacgtggtcagacgggatgtggagaagtggggccccttcgatctggtgtacggcagcacccaacccctgggcagctcttgtgaccggtgccctggctggtacatgtttcagttccaccggatcctgcagtacgccctgccgagacaggagtcccagcggccattcttttggattttcatggacaacttgctgctgaccgaggatgaccaggaaactaccactcggttcctgcagaccgaagccgtgaccctgcaggacgtgagaggccgggactaccagaacgccatgcgggtgtggtccaacatccctggactgaaaagcaagcacgcacctctgacccctaaagaagaggagtacctgcaggcccaggtgcggagcagaagcaagctggacgcccctaaggtggatctgctggtgaagaattgcctcctgcccctgagagagtacttcaagtatttcagccagaatagtctgcccctgggaggcagcggcggcggcgccctggtgacatttgaggacgtcgccgtgcggttcacccaggaggaatgggctctgctggatccttctcagaaaatcctgtaccgggacgtgatgagagagacataccggaatctgacctccgtgggcatcaactgggaatgttgggaccttgaagcctgcttcagaagcctgggaagaaacctgagagtgcaggtggtgaagagaaagtgcgagctgaccaacagcggcccctgcgccgagggcggcccaagcagcggcgcccctcctcccagcggcggcagcccagccggctccccaacctctaccgaggagggcacctctgagtccgccacccccgagagcggccctggcacctccaccgagcccagcgagggcagcgcacccggcagccctgccggcagccccacctccacagaggagggaaccagcaccgagcccagcgaaggcagcgccccaggcaccagcaccgagcctagtgagcaggagattaaacggatcaacaagatcagaagaagacttgtgaaagacagcaacaccaagaaggccggcaagacaggccccatgaaaaccctgctggttagagtgatgacacccgatctgagagagcggctggaaaacctgagaaagaagcctgaaaatatcccccagcccatcagcaatacatctagagccaacctgaataagctgctgaccgattacaccgaaatgaagaaggcgatcctgcatgtgtactgggaagagttccagaaggaccctgtgggcctgatgagccgggtggcccagcctgccagcaagaagatcgatcagaacaagctgaaacctgagatggacgagaagggcaacctgaccaccgccggctttgcctgctctcagtgtggccagcccctgttcgtgtacaagctggagcaggtgtctgagaagggcaaggcttacaccaactacttcggacggtgcaatgtggccgagcacgaaaagctgatcctgctggcccagctgaagcccgagaaggatagcgacgaagccgtgacatatagcctgggaaagtttgggcagagggccctggatttctacagcattcatgtgaccaaggagtccacccaccccgtgaagcccctggcccagatcgccggaaacagatacgcctccggacctgtgggaaaggccctgagcgacgcatgtatgggcacaatcgcctccttcctgtctaagtaccaggacatcatcatcgaacaccagaaggtggtgaagggcaaccagaagagactggagagcctgcgggagctggccggcaaggaaaacctggaataccctagcgtgaccctgccacctcagcctcacaccaaggagggcgttgatgcctacaacgaagtgatcgcccgggtgcgaatgtgggtgaacctgaacctgtggcagaagctgaagctaagcagagatgatgccaagcctctgctgagactgaagggattcccttcctttcctctggtcgagagacaggccaacgaagtggactggtgggacatggtgtgtaacgtgaagaagctgatcaacgagaaaaaggaggatggcaaggtgttttggcagaatctggctggctacaagagacaggaagccctgagaccatacctgagcagcgaggaagatcggaagaagggaaagaaattcgctcggtaccagctgggcgacctgctgctgcacctggaaaagaagcacggcgaggactggggaaaggtgtacgacgaggcctgggagcggattgacaagaaagtggaaggcctgagcaagcacatcaagctggaagaggaacggagaagcgaggacgcccagagcaaggccgccctgaccgactggctgcgggctaaggccagcttcgtgatcgagggcctgaaggaggccgacaaggacgagttctgcagatgcgagctgaagctgcagaagtggtacggggacctgcggggaaagcccttcgccatcgaagccgagaacagcatcctggacatcagcggcttcagcaagcagtacaactgtgccttcatctggcagaaggacggcgtgaagaagctgaacctgtacctgatcatcaactacttcaagggcggcaagctgcggttcaagaagatcaaacctgaagccttcgaagccaacagattctacaccgtgatcaacaaaaagagcggcgagatcgtgcccatggaggtgaacttcaacttcgacgaccccaacctgatcatcctgcctctggcctttggcaagagacagggcagagaattcatctggaacgacctgctgtccctggaaaccggcagcctgaagctggccaacggaagagtgatcgagaagacactgtacaacagaagaacccggcaggatgagcctgccctgttcgtggccctgaccttcgagcggcgggaggtcctggactcctccaatatcaaaccaatgaacctgatcggcgtggcaagaggcgaaaacatccccgccgtgatcgccctgaccgaccccgagggctgcccactgagccggtttaaggatagcctgggaaacccaacccacatcctgagaatcggcgagagctataaggagaagcagcggaccatccaggccaagaaggaggtggagcagcggagagccggcggctacagccggaagtacgccagcaaagccaagaatctggcagacgatatggtgagaaacaccgctagagatctgctgtactacgccgtgacccaggatgccatgctgatcttcgccaacctgagccggggcttcggccggcagggcaagcggaccttcatggccgagagacagtacacacggatggaggactggctgaccgccaagctggcctacgagggcctgagcaagacctacctgtccaagacactggcccagtacacctccaagacatgcagcaactgtgggtttaccatcaccagcgccgactacgacagggtgctggagaagctgaagaagacagcaacaggctggatgaccacaattaacggcaaggagctgaaggtggagggccagattacctactacaacagatacaagagacagaacgtagtcaaggacctgtccgtcgagctggatagactgagcgaagaatctgtgaacaacgacatctcctcctggacaaagggcagaagcggagaagctctgagcctcctgaagaaaagattctcccatagacccgtgcaggagaagttcgtgtgcctgaactgcggcttcgagacacacgcagccgagcaagccgccctgaacatcgccagatcctggctgttcctgcggagccaggagtacaagaaataccagacaaacaagacaaccggcaacaccgataagagagccttcgtcgagacctggcagtccttttaccggaagaagcttaaggaggtgtggaaacctgccgtgcggtctggcggatctggcggaggctccagccagcacctggtgaccttcgaggacgtggccgtgaacttcacccaggaggagtggaccctgctggaccagacccagagggacctgtacagggacgtgatgctggagaactaccagaacctgatggccctgggcagcgagagctgcaagccccacgtgaacagccccctggagggcgccgaggagctgaggaccagggccaggaggatcctgcagagcgagttcatggccgagagcgacctgggcggcccaagcagcggcgcccctcctcccagcggcggcagcccagccggctccccaacctctaccgaggagggcacctctgagtccgccacccccgagagcggccctggcacctccaccgagcccagcgagggcagcgcacccggcagccctgccggcagccccacctccacagaggagggaaccagcaccgagcccagcgaaggcagcgccccaggcaccagcaccgagcctagtgagcaggagattaaacggatcaacaagatcagaagaagacttgtgaaagacagcaacaccaagaaggccggcaagacaggccccatgaaaaccctgctggttagagtgatgacacccgatctgagagagcggctggaaaacctgagaaagaagcctgaaaatatcccccagcccatcagcaatacatctagagccaacctgaataagctgctgaccgattacaccgaaatgaagaaggcgatcctgcatgtgtactgggaagagttccagaaggaccctgtgggcctgatgagccgggtggcccagcctgccagcaagaagatcgatcagaacaagctgaaacctgagatggacgagaagggcaacctgaccaccgccggctttgcctgctctcagtgtggccagcccctgttcgtgtacaagctggagcaggtgtctgagaagggcaaggcttacaccaactacttcggacggtgcaatgtggccgagcacgaaaagctgatcctgctggcccagctgaagcccgagaaggatagcgacgaagccgtgacatatagcctgggaaagtttgggcagagggccctggatttctacagcattcatgtgaccaaggagtccacccaccccgtgaagcccctggcccagatcgccggaaacagatacgcctccggacctgtgggaaaggccctgagcgacgcatgtatgggcacaatcgcctccttcctgtctaagtaccaggacatcatcatcgaacaccagaaggtggtgaagggcaaccagaagagactggagagcctgcgggagctggccggcaaggaaaacctggaataccctagcgtgaccctgccacctcagcctcacaccaaggagggcgttgatgcctacaacgaagtgatcgcccgggtgcgaatgtgggtgaacctgaacctgtggcagaagctgaagctaagcagagatgatgccaagcctctgctgagactgaagggattcccttcctttcctctggtcgagagacaggccaacgaagtggactggtgggacatggtgtgtaacgtgaagaagctgatcaacgagaaaaaggaggatggcaaggtgttttggcagaatctggctggctacaagagacaggaagccctgagaccatacctgagcagcgaggaagatcggaagaagggaaagaaattcgctcggtaccagctgggcgacctgctgctgcacctggaaaagaagcacggcgaggactggggaaaggtgtacgacgaggcctgggagcggattgacaagaaagtggaaggcctgagcaagcacatcaagctggaagaggaacggagaagcgaggacgcccagagcaaggccgccctgaccgactggctgcgggctaaggccagcttcgtgatcgagggcctgaaggaggccgacaaggacgagttctgcagatgcgagctgaagctgcagaagtggtacggggacctgcggggaaagcccttcgccatcgaagccgagaacagcatcctggacatcagcggcttcagcaagcagtacaactgtgccttcatctggcagaaggacggcgtgaagaagctgaacctgtacctgatcatcaactacttcaagggcggcaagctgcggttcaagaagatcaaacctgaagccttcgaagccaacagattctacaccgtgatcaacaaaaagagcggcgagatcgtgcccatggaggtgaacttcaacttcgacgaccccaacctgatcatcctgcctctggcctttggcaagagacagggcagagaattcatctggaacgacctgctgtccctggaaaccggcagcctgaagctggccaacggaagagtgatcgagaagacactgtacaacagaagaacccggcaggatgagcctgccctgttcgtggccctgaccttcgagcggcgggaggtcctggactcctccaatatcaaaccaatgaacctgatcggcgtggcaagaggcgaaaacatccccgccgtgatcgccctgaccgaccccgagggctgcccactgagccggtttaaggatagcctgggaaacccaacccacatcctgagaatcggcgagagctataaggagaagcagcggaccatccaggccaagaaggaggtggagcagcggagagccggcggctacagccggaagtacgccagcaaagccaagaatctggcagacgatatggtgagaaacaccgctagagatctgctgtactacgccgtgacccaggatgccatgctgatcttcgccaacctgagccggggcttcggccggcagggcaagcggaccttcatggccgagagacagtacacacggatggaggactggctgaccgccaagctggcctacgagggcctgagcaagacctacctgtccaagacactggcccagtacacctccaagacatgcagcaactgtgggtttaccatcaccagcgccgactacgacagggtgctggagaagctgaagaagacagcaacaggctggatgaccacaattaacggcaaggagctgaaggtggagggccagattacctactacaacagatacaagagacagaacgtagtcaaggacctgtccgtcgagctggatagactgagcgaagaatctgtgaacaacgacatctcctcctggacaaagggcagaagcggagaagctctgagcctcctgaagaaaagattctcccatagacccgtgcaggagaagttcgtgtgcctgaactgcggcttcgagacacacgcagccgagcaagccgccctgaacatcgccagatcctggctgttcctgcggagccaggagtacaagaaataccagacaaacaagacaaccggcaacaccgataagagagccttcgtcgagacctggcagtccttttaccggaagaagcttaaggaggtgtggaaacctgccgtgcggtctggcggatctggcggaggctcctagccagcacctggtgaccttcgaggacgtggccgtgaacttcacccaggaggagtggaccctgctggaccagacccagagggacctgtacagggacgtgatgctggagaactaccagaacctgatggccctgggcagcgagagctgcaagccccacgtgaacagccccctggagggcgccgaggagctgaggaccagggccaggaggatcctgcagagcgagttcatggccgagagcgacctgggatctggctccggcagcggccccaagaaaaagagaaaagtctaagctgccttctgcggggcttgccttctggccatgcccttcttctctcccttgcacctgtacctcttggtctttgaataaagcctgagtaggaaggctagcaaaaaaaaaaaaaaaaaaaaaaaaaaaaaaaaaaaaaaaaaaaaaaaaaaaaaaaaaaaaaaaaaaaaaaaaaaaaaaaa

SEQ ID NO: 16563 - RNA, 9485 nt, synthetic construct
  source 1..9485: mol_type = other RNA
aggaaataagagagaaaagaagagtaagaagaaatataagagccaccatggcccctaagaagaagcgtaaagtgagccggatggaacgcctcgtctacgaggtgcggcagaagtgcagaaacatcgaggacatctgcatctcctgcggatctctgaacgtgaccctggagcacccactgttcatcggcggcatgtgccagaactgtaaaaactgttttctggagtgtgcctatcaatacgacgatgacggctaccagagctactgcaccatctgttgcggcggaagagaggtgctgatgtgtggaaataacaactgctgccggtgcttctgcgtggaatgcgtggacctgctggtgggccccggcgccgcccaggccgctattaaggaagatccttggaactgctacatgtgcggccacaagggcacatacggcctgctgagacggagagaggactggcctagcagactgcagatgttcttcgccaataaccacgaccaggagttcgacccccctaaggtgtaccctcccgtccccgccgagaagagaaagcccatccgggtcctgagcctgttcgatggcatcgccaccggtctgctggtgctgaaggacctgggcatccaggtggataggtacattgcctccgaggtgtgcgaggactccatcaccgtgggaatggtgcgtcatcagggcaagatcatgtacgtgggcgacgtgcggagcgtgacacagaagcatatccaggagtggggccctttcgacctggtgatcggcggcagcccttgcaatgacctgagcatcgtgaacccagcccggaagggcctgtacgagggaaccggcagactgttcttcgagttttacagactgctgcacgacgcccggcctaaggaaggcgacgaccggcccttcttttggctgttcgagaatgtggtggccatgggagtcagcgacaagcgggatattagccggttcctggagagcaaccccgtgatgatcgatgccaaggaagtgagcgccgcccaccgggccagatacttctggggcaatctgcctggcatgaacagacccctggccagcaccgtgaacgacaagctggagctgcaggagtgcctggagcacggccggatcgccaagttcagcaaggtgagaaccatcaccacccgaagcaacagcatcaaacaaggcaaggaccagcactttcctgtgttcatgaacgagaaggaggacatcctgtggtgtaccgagatggagagagtgttcgggttcccagtccactacacagatgtcagcaacatgtctagactggccagacagagactgctgggaagaagctggtccgtccctgtgatcagacacctgttcgcccctctgaaggagtacttcgcctgcgtgagcagcggcaacagcaacgccaacagccggggccccagcttctctagcggcctggtgccactgtccctgagagggagccacatgggccccatggagatctacaaaaccgtgagcgcctggaagcggcagcctgtgcgcgtgctgagcctgtttcggaatatcgataaagtcctgaaaagcctgggattcctggagagcggctctggctccggcggtggcaccctgaagtacgtggaggatgtgacaaacgtggtcagacgggatgtggagaagtggggccccttcgatctggtgtacggcagcacccaacccctgggcagctcttgtgaccggtgccctggctggtacatgtttcagttccaccggatcctgcagtacgccctgccgagacaggagtcccagcggccattcttttggattttcatggacaacttgctgctgaccgaggatgaccaggaaactaccactcggttcctgcagaccgaagccgtgaccctgcaggacgtgagaggccgggactaccagaacgccatgcgggtgtggtccaacatccctggactgaaaagcaagcacgcacctctgacccctaaagaagaggagtacctgcaggcccaggtgcggagcagaagcaagctggacgcccctaaggtggatctgctggtgaagaattgcctcctgcccctgagagagtacttcaagtatttcagccagaatagtctgcccctgggaggcagcggcggcggcgccctggtgacatttgaggacgtcgccgtgcggttcacccaggaggaatgggctctgctggatccttctcagaaaatcctgtaccgggacgtgatgagagagacataccggaatctgacctccgtgggcatcaactgggaatgttgggaccttgaagcctgcttcagaagcctgggaagaaacctgagagtgcaggtggtgaagagaaagtgcgagctgaccaacagcggcccctgcgccgagggcggcccaagcagcggcgcccctcctcccagcggcggcagcccagccggctccccaacctctaccgaggagggcacctctgagtccgccacccccgagagcggccctggcacctccaccgagcccagcgagggcagcgcacccggcagccctgccggcagccccacctccacagaggagggaaccagcaccgagcccagcgaaggcagcgccccaggcaccagcaccgagcctagtgagcaggagattaaacggatcaacaagatcagaagaagacttgtgaaagacagcaacaccaagaaggccggcaagacaggccccatgaaaaccctgctggttagagtgatgacacccgatctgagagagcggctggaaaacctgagaaagaagcctgaaaatatcccccagcccatcagcaatacatctagagccaacctgaataagctgctgaccgattacaccgaaatgaagaaggcgatcctgcatgtgtactgggaagagttccagaaggaccctgtgggcctgatgagccgggtggcccagcctgccagcaagaagatcgatcagaacaagctgaaacctgagatggacgagaagggcaacctgaccaccgccggctttgcctgctctcagtgtggccagcccctgttcgtgtacaagctggagcaggtgtctgagaagggcaaggcttacaccaactacttcggacggtgcaatgtggccgagcacgaaaagctgatcctgctggcccagctgaagcccgagaaggatagcgacgaagccgtgacatatagcctgggaaagtttgggcagagggccctggatttctacagcattcatgtgaccaaggagtccacccaccccgtgaagcccctggcccagatcgccggaaacagatacgcctccggacctgtgggaaaggccctgagcgacgcatgtatgggcacaatcgcctccttcctgtctaagtaccaggacatcatcatcgaacaccagaaggtggtgaagggcaaccagaagagactggagagcctgcgggagctggccggcaaggaaaacctggaataccctagcgtgaccctgccacctcagcctcacaccaaggagggcgttgatgcctacaacgaagtgatcgcccgggtgcgaatgtgggtgaacctgaacctgtggcagaagctgaagctaagcagagatgatgccaagcctctgctgagactgaagggattcccttcctttcctctggtcgagagacaggccaacgaagtggactggtgggacatggtgtgtaacgtgaagaagctgatcaacgagaaaaaggaggatggcaaggtgttttggcagaatctggctggctacaagagacaggaagccctgagaccatacctgagcagcgaggaagatcggaagaagggaaagaaattcgctcggtaccagctgggcgacctgctgctgcacctggaaaagaagcacggcgaggactggggaaaggtgtacgacgaggcctgggagcggattgacaagaaagtggaaggcctgagcaagcacatcaagctggaagaggaacggagaagcgaggacgcccagagcaaggccgccctgaccgactggctgcgggctaaggccagcttcgtgatcgagggcctgaaggaggccgacaaggacgagttctgcagatgcgagctgaagctgcagaagtggtacggggacctgcggggaaagcccttcgccatcgaagccgagaacagcatcctggacatcagcggcttcagcaagcagtacaactgtgccttcatctggcagaaggacggcgtgaagaagctgaacctgtacctgatcatcaactacttcaagggcggcaagctgcggttcaagaagatcaaacctgaagccttcgaagccaacagattctacaccgtgatcaacaaaaagagcggcgagatcgtgcccatggaggtgaacttcaacttcgacgaccccaacctgatcatcctgcctctggcctttggcaagagacagggcagagaattcatctggaacgacctgctgtccctggaaaccggcagcctgaagctggccaacggaagagtgatcgagaagacactgtacaacagaagaacccggcaggatgagcctgccctgttcgtggccctgaccttcgagcggcgggaggtcctggactcctccaatatcaaaccaatgaacctgatcggcgtggcaagaggcgaaaacatccccgccgtgatcgccctgaccgaccccgagggctgcccactgagccggtttaaggatagcctgggaaacccaacccacatcctgagaatcggcgagagctataaggagaagcagcggaccatccaggccaagaaggaggtggagcagcggagagccggcggctacagccggaagtacgccagcaaagccaagaatctggcagacgatatggtgagaaacaccgctagagatctgctgtactacgccgtgacccaggatgccatgctgatcttcgccaacctgagccggggcttcggccggcagggcaagcggaccttcatggccgagagacagtacacacggatggaggactggctgaccgccaagctggcctacgagggcctgagcaagacctacctgtccaagacactggcccagtacacctccaagacatgcagcaactgtgggtttaccatcaccagcgccgactacgacagggtgctggagaagctgaagaagacagcaacaggctggatgaccacaattaacggcaaggagctgaaggtggagggccagattacctactacaacagatacaagagacagaacgtagtcaaggacctgtccgtcgagctggatagactgagcgaagaatctgtgaacaacgacatctcctcctggacaaagggcagaagcggagaagctctgagcctcctgaagaaaagattctcccatagacccgtgcaggagaagttcgtgtgcctgaactgcggcttcgagacacacgcagccgagcaagccgccctgaacatcgccagatcctggctgttcctgcggagccaggagtacaagaaataccagacaaacaagacaaccggcaacaccgataagagagccttcgtcgagacctggcagtccttttaccggaagaagcttaaggaggtgtggaaacctgccgtgcggtctggcggatctggcggaggctccatgggcctgctgaccttcagggacgtggccatcgagttcagcctggaggagtggcagtgcctggacaccgcccagaagaacctgtacaggaacgtgatgctggagaactacaggaacctggccttcctgggcatcgccgtgagcaagcccgacctgatcatctgcctggagaaggagaaggagccctggaacatgaagaggcacgagatggtggacgagccccccggcctggccgtgagcaacggcggcccaagcagcggcgcccctcctcccagcggcggcagcccagccggctccccaacctctaccgaggagggcacctctgagtccgccacccccgagagcggccctggcacctccaccgagcccagcgagggcagcgcacccggcagccctgccggcagccccacctccacagaggagggaaccagcaccgagcccagcgaaggcagcgccccaggcaccagcaccgagcctagtgagcaggagattaaacggatcaacaagatcagaagaagacttgtgaaagacagcaacaccaagaaggccggcaagacaggccccatgaaaaccctgctggttagagtgatgacacccgatctgagagagcggctggaaaacctgagaaagaagcctgaaaatatcccccagcccatcagcaatacatctagagccaacctgaataagctgctgaccgattacaccgaaatgaagaaggcgatcctgcatgtgtactgggaagagttccagaaggaccctgtgggcctgatgagccgggtggcccagcctgccagcaagaagatcgatcagaacaagctgaaacctgagatggacgagaagggcaacctgaccaccgccggctttgcctgctctcagtgtggccagcccctgttcgtgtacaagctggagcaggtgtctgagaagggcaaggcttacaccaactacttcggacggtgcaatgtggccgagcacgaaaagctgatcctgctggcccagctgaagcccgagaaggatagcgacgaagccgtgacatatagcctgggaaagtttgggcagagggccctggatttctacagcattcatgtgaccaaggagtccacccaccccgtgaagcccctggcccagatcgccggaaacagatacgcctccggacctgtgggaaaggccctgagcgacgcatgtatgggcacaatcgcctccttcctgtctaagtaccaggacatcatcatcgaacaccagaaggtggtgaagggcaaccagaagagactggagagcctgcgggagctggccggcaaggaaaacctggaataccctagcgtgaccctgccacctcagcctcacaccaaggagggcgttgatgcctacaacgaagtgatcgcccgggtgcgaatgtgggtgaacctgaacctgtggcagaagctgaagctaagcagagatgatgccaagcctctgctgagactgaagggattcccttcctttcctctggtcgagagacaggccaacgaagtggactggtgggacatggtgtgtaacgtgaagaagctgatcaacgagaaaaaggaggatggcaaggtgttttggcagaatctggctggctacaagagacaggaagccctgagaccatacctgagcagcgaggaagatcggaagaagggaaagaaattcgctcggtaccagctgggcgacctgctgctgcacctggaaaagaagcacggcgaggactggggaaaggtgtacgacgaggcctgggagcggattgacaagaaagtggaaggcctgagcaagcacatcaagctggaagaggaacggagaagcgaggacgcccagagcaaggccgccctgaccgactggctgcgggctaaggccagcttcgtgatcgagggcctgaaggaggccgacaaggacgagttctgcagatgcgagctgaagctgcagaagtggtacggggacctgcggggaaagcccttcgccatcgaagccgagaacagcatcctggacatcagcggcttcagcaagcagtacaactgtgccttcatctggcagaaggacggcgtgaagaagctgaacctgtacctgatcatcaactacttcaagggcggcaagctgcggttcaagaagatcaaacctgaagccttcgaagccaacagattctacaccgtgatcaacaaaaagagcggcgagatcgtgcccatggaggtgaacttcaacttcgacgaccccaacctgatcatcctgcctctggcctttggcaagagacagggcagagaattcatctggaacgacctgctgtccctggaaaccggcagcctgaagctggccaacggaagagtgatcgagaagacactgtacaacagaagaacccggcaggatgagcctgccctgttcgtggccctgaccttcgagcggcgggaggtcctggactcctccaatatcaaaccaatgaacctgatcggcgtggcaagaggcgaaaacatccccgccgtgatcgccctgaccgaccccgagggctgcccactgagccggtttaaggatagcctgggaaacccaacccacatcctgagaatcggcgagagctataaggagaagcagcggaccatccaggccaagaaggaggtggagcagcggagagccggcggctacagccggaagtacgccagcaaagccaagaatctggcagacgatatggtgagaaacaccgctagagatctgctgtactacgccgtgacccaggatgccatgctgatcttcgccaacctgagccggggcttcggccggcagggcaagcggaccttcatggccgagagacagtacacacggatggaggactggctgaccgccaagctggcctacgagggcctgagcaagacctacctgtccaagacactggcccagtacacctccaagacatgcagcaactgtgggtttaccatcaccagcgccgactacgacagggtgctggagaagctgaagaagacagcaacaggctggatgaccacaattaacggcaaggagctgaaggtggagggccagattacctactacaacagatacaagagacagaacgtagtcaaggacctgtccgtcgagctggatagactgagcgaagaatctgtgaacaacgacatctcctcctggacaaagggcagaagcggagaagctctgagcctcctgaagaaaagattctcccatagacccgtgcaggagaagttcgtgtgcctgaactgcggcttcgagacacacgcagccgagcaagccgccctgaacatcgccagatcctggctgttcctgcggagccaggagtacaagaaataccagacaaacaagacaaccggcaacaccgataagagagccttcgtcgagacctggcagtccttttaccggaagaagcttaaggaggtgtggaaacctgccgtgcggtctggcggatctggcggaggctcctatgggcctgctgaccttcagggacgtggccatcgagttcagcctggaggagtggcagtgcctggacaccgcccagaagaacctgtacaggaacgtgatgctggagaactacaggaacctggccttcctgggcatcgccgtgagcaagcccgacctgatcatctgcctggagaaggagaaggagccctggaacatgaagaggcacgagatggtggacgagccccccggcctggccgtgagcaacggatctggctccggcagcggccccaagaaaaagagaaaagtctaagctgccttctgcggggcttgccttctggccatgcccttcttctctcccttgcacctgtacctcttggtctttgaataaagcctgagtaggaaggctagcaaaaaaaaaaaaaaaaaaaaaaaaaaaaaaaaaaaaaaaaaaaaaaaaaaaaaaaaaaaaaaaaaaaaaaaaaaaaaaaa

SEQ ID NO: 16564 - RNA, 9485 nt, synthetic construct
  source 1..9485: mol_type = other RNA
aggaaataagagagaaaagaagagtaagaagaaatataagagccaccatggcccctaagaagaagcgtaaagtgagccggatggaacgcctcgtctacgaggtgcggcagaagtgcagaaacatcgaggacatctgcatctcctgcggatctctgaacgtgaccctggagcacccactgttcatcggcggcatgtgccagaactgtaaaaactgttttctggagtgtgcctatcaatacgacgatgacggctaccagagctactgcaccatctgttgcggcggaagagaggtgctgatgtgtggaaataacaactgctgccggtgcttctgcgtggaatgcgtggacctgctggtgggccccggcgccgcccaggccgctattaaggaagatccttggaactgctacatgtgcggccacaagggcacatacggcctgctgagacggagagaggactggcctagcagactgcagatgttcttcgccaataaccacgaccaggagttcgacccccctaaggtgtaccctcccgtccccgccgagaagagaaagcccatccgggtcctgagcctgttcgatggcatcgccaccggtctgctggtgctgaaggacctgggcatccaggtggataggtacattgcctccgaggtgtgcgaggactccatcaccgtgggaatggtgcgtcatcagggcaagatcatgtacgtgggcgacgtgcggagcgtgacacagaagcatatccaggagtggggccctttcgacctggtgatcggcggcagcccttgcaatgacctgagcatcgtgaacccagcccggaagggcctgtacgagggaaccggcagactgttcttcgagttttacagactgctgcacgacgcccggcctaaggaaggcgacgaccggcccttcttttggctgttcgagaatgtggtggccatgggagtcagcgacaagcgggatattagccggttcctggagagcaaccccgtgatgatcgatgccaaggaagtgagcgccgcccaccgggccagatacttctggggcaatctgcctggcatgaacagacccctggccagcaccgtgaacgacaagctggagctgcaggagtgcctggagcacggccggatcgccaagttcagcaaggtgagaaccatcaccacccgaagcaacagcatcaaacaaggcaaggaccagcactttcctgtgttcatgaacgagaaggaggacatcctgtggtgtaccgagatggagagagtgttcgggttcccagtccactacacagatgtcagcaacatgtctagactggccagacagagactgctgggaagaagctggtccgtccctgtgatcagacacctgttcgcccctctgaaggagtacttcgcctgcgtgagcagcggcaacagcaacgccaacagccggggccccagcttctctagcggcctggtgccactgtccctgagagggagccacatgggccccatggagatctacaaaaccgtgagcgcctggaagcggcagcctgtgcgcgtgctgagcctgtttcggaatatcgataaagtcctgaaaagcctgggattcctggagagcggctctggctccggcggtggcaccctgaagtacgtggaggatgtgacaaacgtggtcagacgggatgtggagaagtggggccccttcgatctggtgtacggcagcacccaacccctgggcagctcttgtgaccggtgccctggctggtacatgtttcagttccaccggatcctgcagtacgccctgccgagacaggagtcccagcggccattcttttggattttcatggacaacttgctgctgaccgaggatgaccaggaaactaccactcggttcctgcagaccgaagccgtgaccctgcaggacgtgagaggccgggactaccagaacgccatgcgggtgtggtccaacatccctggactgaaaagcaagcacgcacctctgacccctaaagaagaggagtacctgcaggcccaggtgcggagcagaagcaagctggacgcccctaaggtggatctgctggtgaagaattgcctcctgcccctgagagagtacttcaagtatttcagccagaatagtctgcccctgggaggcagcggcggcggcgccctggtgacatttgaggacgtcgccgtgcggttcacccaggaggaatgggctctgctggatccttctcagaaaatcctgtaccgggacgtgatgagagagacataccggaatctgacctccgtgggcatcaactgggaatgttgggaccttgaagcctgcttcagaagcctgggaagaaacctgagagtgcaggtggtgaagagaaagtgcgagctgaccaacagcggcccctgcgccgagggcggcccaagcagcggcgcccctcctcccagcggcggcagcccagccggctccccaacctctaccgaggagggcacctctgagtccgccacccccgagagcggccctggcacctccaccgagcccagcgagggcagcgcacccggcagccctgccggcagccccacctccacagaggagggaaccagcaccgagcccagcgaaggcagcgccccaggcaccagcaccgagcctagtgagcaggagattaaacggatcaacaagatcagaagaagacttgtgaaagacagcaacaccaagaaggccggcaagacaggccccatgaaaaccctgctggttagagtgatgacacccgatctgagagagcggctggaaaacctgagaaagaagcctgaaaatatcccccagcccatcagcaatacatctagagccaacctgaataagctgctgaccgattacaccgaaatgaagaaggcgatcctgcatgtgtactgggaagagttccagaaggaccctgtgggcctgatgagccgggtggcccagcctgccagcaagaagatcgatcagaacaagctgaaacctgagatggacgagaagggcaacctgaccaccgccggctttgcctgctctcagtgtggccagcccctgttcgtgtacaagctggagcaggtgtctgagaagggcaaggcttacaccaactacttcggacggtgcaatgtggccgagcacgaaaagctgatcctgctggcccagctgaagcccgagaaggatagcgacgaagccgtgacatatagcctgggaaagtttgggcagagggccctggatttctacagcattcatgtgaccaaggagtccacccaccccgtgaagcccctggcccagatcgccggaaacagatacgcctccggacctgtgggaaaggccctgagcgacgcatgtatgggcacaatcgcctccttcctgtctaagtaccaggacatcatcatcgaacaccagaaggtggtgaagggcaaccagaagagactggagagcctgcgggagctggccggcaaggaaaacctggaataccctagcgtgaccctgccacctcagcctcacaccaaggagggcgttgatgcctacaacgaagtgatcgcccgggtgcgaatgtgggtgaacctgaacctgtggcagaagctgaagctaagcagagatgatgccaagcctctgctgagactgaagggattcccttcctttcctctggtcgagagacaggccaacgaagtggactggtgggacatggtgtgtaacgtgaagaagctgatcaacgagaaaaaggaggatggcaaggtgttttggcagaatctggctggctacaagagacaggaagccctgagaccatacctgagcagcgaggaagatcggaagaagggaaagaaattcgctcggtaccagctgggcgacctgctgctgcacctggaaaagaagcacggcgaggactggggaaaggtgtacgacgaggcctgggagcggattgacaagaaagtggaaggcctgagcaagcacatcaagctggaagaggaacggagaagcgaggacgcccagagcaaggccgccctgaccgactggctgcgggctaaggccagcttcgtgatcgagggcctgaaggaggccgacaaggacgagttctgcagatgcgagctgaagctgcagaagtggtacggggacctgcggggaaagcccttcgccatcgaagccgagaacagcatcctggacatcagcggcttcagcaagcagtacaactgtgccttcatctggcagaaggacggcgtgaagaagctgaacctgtacctgatcatcaactacttcaagggcggcaagctgcggttcaagaagatcaaacctgaagccttcgaagccaacagattctacaccgtgatcaacaaaaagagcggcgagatcgtgcccatggaggtgaacttcaacttcgacgaccccaacctgatcatcctgcctctggcctttggcaagagacagggcagagaattcatctggaacgacctgctgtccctggaaaccggcagcctgaagctggccaacggaagagtgatcgagaagacactgtacaacagaagaacccggcaggatgagcctgccctgttcgtggccctgaccttcgagcggcgggaggtcctggactcctccaatatcaaaccaatgaacctgatcggcgtggcaagaggcgaaaacatccccgccgtgatcgccctgaccgaccccgagggctgcccactgagccggtttaaggatagcctgggaaacccaacccacatcctgagaatcggcgagagctataaggagaagcagcggaccatccaggccaagaaggaggtggagcagcggagagccggcggctacagccggaagtacgccagcaaagccaagaatctggcagacgatatggtgagaaacaccgctagagatctgctgtactacgccgtgacccaggatgccatgctgatcttcgccaacctgagccggggcttcggccggcagggcaagcggaccttcatggccgagagacagtacacacggatggaggactggctgaccgccaagctggcctacgagggcctgagcaagacctacctgtccaagacactggcccagtacacctccaagacatgcagcaactgtgggtttaccatcaccagcgccgactacgacagggtgctggagaagctgaagaagacagcaacaggctggatgaccacaattaacggcaaggagctgaaggtggagggccagattacctactacaacagatacaagagacagaacgtagtcaaggacctgtccgtcgagctggatagactgagcgaagaatctgtgaacaacgacatctcctcctggacaaagggcagaagcggagaagctctgagcctcctgaagaaaagattctcccatagacccgtgcaggagaagttcgtgtgcctgaactgcggcttcgagacacacgcagccgagcaagccgccctgaacatcgccagatcctggctgttcctgcggagccaggagtacaagaaataccagacaaacaagacaaccggcaacaccgataagagagccttcgtcgagacctggcagtccttttaccggaagaagcttaaggaggtgtggaaacctgccgtgcggtctggcggatctggcggaggctccatggccgccctgttcctgagcgccccccaccaggccaaggtgaccttcgaggacgtggccgtgtacctgagcagggaggagtggggcaggctgggccccgcccagaggggcctgtacagggacgtgatgctggagacctacggcaacctggtgagcctgggcgtgggccccgccggccccaagcccggcgtgatcagccagctggagaggggcgacgagccctgggtgctggacgtgcagggcggcggcccaagcagcggcgcccctcctcccagcggcggcagcccagccggctccccaacctctaccgaggagggcacctctgagtccgccacccccgagagcggccctggcacctccaccgagcccagcgagggcagcgcacccggcagccctgccggcagccccacctccacagaggagggaaccagcaccgagcccagcgaaggcagcgccccaggcaccagcaccgagcctagtgagcaggagattaaacggatcaacaagatcagaagaagacttgtgaaagacagcaacaccaagaaggccggcaagacaggccccatgaaaaccctgctggttagagtgatgacacccgatctgagagagcggctggaaaacctgagaaagaagcctgaaaatatcccccagcccatcagcaatacatctagagccaacctgaataagctgctgaccgattacaccgaaatgaagaaggcgatcctgcatgtgtactgggaagagttccagaaggaccctgtgggcctgatgagccgggtggcccagcctgccagcaagaagatcgatcagaacaagctgaaacctgagatggacgagaagggcaacctgaccaccgccggctttgcctgctctcagtgtggccagcccctgttcgtgtacaagctggagcaggtgtctgagaagggcaaggcttacaccaactacttcggacggtgcaatgtggccgagcacgaaaagctgatcctgctggcccagctgaagcccgagaaggatagcgacgaagccgtgacatatagcctgggaaagtttgggcagagggccctggatttctacagcattcatgtgaccaaggagtccacccaccccgtgaagcccctggcccagatcgccggaaacagatacgcctccggacctgtgggaaaggccctgagcgacgcatgtatgggcacaatcgcctccttcctgtctaagtaccaggacatcatcatcgaacaccagaaggtggtgaagggcaaccagaagagactggagagcctgcgggagctggccggcaaggaaaacctggaataccctagcgtgaccctgccacctcagcctcacaccaaggagggcgttgatgcctacaacgaagtgatcgcccgggtgcgaatgtgggtgaacctgaacctgtggcagaagctgaagctaagcagagatgatgccaagcctctgctgagactgaagggattcccttcctttcctctggtcgagagacaggccaacgaagtggactggtgggacatggtgtgtaacgtgaagaagctgatcaacgagaaaaaggaggatggcaaggtgttttggcagaatctggctggctacaagagacaggaagccctgagaccatacctgagcagcgaggaagatcggaagaagggaaagaaattcgctcggtaccagctgggcgacctgctgctgcacctggaaaagaagcacggcgaggactggggaaaggtgtacgacgaggcctgggagcggattgacaagaaagtggaaggcctgagcaagcacatcaagctggaagaggaacggagaagcgaggacgcccagagcaaggccgccctgaccgactggctgcgggctaaggccagcttcgtgatcgagggcctgaaggaggccgacaaggacgagttctgcagatgcgagctgaagctgcagaagtggtacggggacctgcggggaaagcccttcgccatcgaagccgagaacagcatcctggacatcagcggcttcagcaagcagtacaactgtgccttcatctggcagaaggacggcgtgaagaagctgaacctgtacctgatcatcaactacttcaagggcggcaagctgcggttcaagaagatcaaacctgaagccttcgaagccaacagattctacaccgtgatcaacaaaaagagcggcgagatcgtgcccatggaggtgaacttcaacttcgacgaccccaacctgatcatcctgcctctggcctttggcaagagacagggcagagaattcatctggaacgacctgctgtccctggaaaccggcagcctgaagctggccaacggaagagtgatcgagaagacactgtacaacagaagaacccggcaggatgagcctgccctgttcgtggccctgaccttcgagcggcgggaggtcctggactcctccaatatcaaaccaatgaacctgatcggcgtggcaagaggcgaaaacatccccgccgtgatcgccctgaccgaccccgagggctgcccactgagccggtttaaggatagcctgggaaacccaacccacatcctgagaatcggcgagagctataaggagaagcagcggaccatccaggccaagaaggaggtggagcagcggagagccggcggctacagccggaagtacgccagcaaagccaagaatctggcagacgatatggtgagaaacaccgctagagatctgctgtactacgccgtgacccaggatgccatgctgatcttcgccaacctgagccggggcttcggccggcagggcaagcggaccttcatggccgagagacagtacacacggatggaggactggctgaccgccaagctggcctacgagggcctgagcaagacctacctgtccaagacactggcccagtacacctccaagacatgcagcaactgtgggtttaccatcaccagcgccgactacgacagggtgctggagaagctgaagaagacagcaacaggctggatgaccacaattaacggcaaggagctgaaggtggagggccagattacctactacaacagatacaagagacagaacgtagtcaaggacctgtccgtcgagctggatagactgagcgaagaatctgtgaacaacgacatctcctcctggacaaagggcagaagcggagaagctctgagcctcctgaagaaaagattctcccatagacccgtgcaggagaagttcgtgtgcctgaactgcggcttcgagacacacgcagccgagcaagccgccctgaacatcgccagatcctggctgttcctgcggagccaggagtacaagaaataccagacaaacaagacaaccggcaacaccgataagagagccttcgtcgagacctggcagtccttttaccggaagaagcttaaggaggtgtggaaacctgccgtgcggtctggcggatctggcggaggctcctatggccgccctgttcctgagcgccccccaccaggccaaggtgaccttcgaggacgtggccgtgtacctgagcagggaggagtggggcaggctgggccccgcccagaggggcctgtacagggacgtgatgctggagacctacggcaacctggtgagcctgggcgtgggccccgccggccccaagcccggcgtgatcagccagctggagaggggcgacgagccctgggtgctggacgtgcagggcggatctggctccggcagcggccccaagaaaaagagaaaagtctaagctgccttctgcggggcttgccttctggccatgcccttcttctctcccttgcacctgtacctcttggtctttgaataaagcctgagtaggaaggctagcaaaaaaaaaaaaaaaaaaaaaaaaaaaaaaaaaaaaaaaaaaaaaaaaaaaaaaaaaaaaaaaaaaaaaaaaaaaaaaaa

SEQ ID NO: 16565 - RNA, 9485 nt, synthetic construct
  source 1..9485: mol_type = other RNA
aggaaataagagagaaaagaagagtaagaagaaatataagagccaccatggcccctaagaagaagcgtaaagtgagccggatggaacgcctcgtctacgaggtgcggcagaagtgcagaaacatcgaggacatctgcatctcctgcggatctctgaacgtgaccctggagcacccactgttcatcggcggcatgtgccagaactgtaaaaactgttttctggagtgtgcctatcaatacgacgatgacggctaccagagctactgcaccatctgttgcggcggaagagaggtgctgatgtgtggaaataacaactgctgccggtgcttctgcgtggaatgcgtggacctgctggtgggccccggcgccgcccaggccgctattaaggaagatccttggaactgctacatgtgcggccacaagggcacatacggcctgctgagacggagagaggactggcctagcagactgcagatgttcttcgccaataaccacgaccaggagttcgacccccctaaggtgtaccctcccgtccccgccgagaagagaaagcccatccgggtcctgagcctgttcgatggcatcgccaccggtctgctggtgctgaaggacctgggcatccaggtggataggtacattgcctccgaggtgtgcgaggactccatcaccgtgggaatggtgcgtcatcagggcaagatcatgtacgtgggcgacgtgcggagcgtgacacagaagcatatccaggagtggggccctttcgacctggtgatcggcggcagcccttgcaatgacctgagcatcgtgaacccagcccggaagggcctgtacgagggaaccggcagactgttcttcgagttttacagactgctgcacgacgcccggcctaaggaaggcgacgaccggcccttcttttggctgttcgagaatgtggtggccatgggagtcagcgacaagcgggatattagccggttcctggagagcaaccccgtgatgatcgatgccaaggaagtgagcgccgcccaccgggccagatacttctggggcaatctgcctggcatgaacagacccctggccagcaccgtgaacgacaagctggagctgcaggagtgcctggagcacggccggatcgccaagttcagcaaggtgagaaccatcaccacccgaagcaacagcatcaaacaaggcaaggaccagcactttcctgtgttcatgaacgagaaggaggacatcctgtggtgtaccgagatggagagagtgttcgggttcccagtccactacacagatgtcagcaacatgtctagactggccagacagagactgctgggaagaagctggtccgtccctgtgatcagacacctgttcgcccctctgaaggagtacttcgcctgcgtgagcagcggcaacagcaacgccaacagccggggccccagcttctctagcggcctggtgccactgtccctgagagggagccacatgggccccatggagatctacaaaaccgtgagcgcctggaagcggcagcctgtgcgcgtgctgagcctgtttcggaatatcgataaagtcctgaaaagcctgggattcctggagagcggctctggctccggcggtggcaccctgaagtacgtggaggatgtgacaaacgtggtcagacgggatgtggagaagtggggccccttcgatctggtgtacggcagcacccaacccctgggcagctcttgtgaccggtgccctggctggtacatgtttcagttccaccggatcctgcagtacgccctgccgagacaggagtcccagcggccattcttttggattttcatggacaacttgctgctgaccgaggatgaccaggaaactaccactcggttcctgcagaccgaagccgtgaccctgcaggacgtgagaggccgggactaccagaacgccatgcgggtgtggtccaacatccctggactgaaaagcaagcacgcacctctgacccctaaagaagaggagtacctgcaggcccaggtgcggagcagaagcaagctggacgcccctaaggtggatctgctggtgaagaattgcctcctgcccctgagagagtacttcaagtatttcagccagaatagtctgcccctgggaggcagcggcggcggcgccctggtgacatttgaggacgtcgccgtgcggttcacccaggaggaatgggctctgctggatccttctcagaaaatcctgtaccgggacgtgatgagagagacataccggaatctgacctccgtgggcatcaactgggaatgttgggaccttgaagcctgcttcagaagcctgggaagaaacctgagagtgcaggtggtgaagagaaagtgcgagctgaccaacagcggcccctgcgccgagggcggcccaagcagcggcgcccctcctcccagcggcggcagcccagccggctccccaacctctaccgaggagggcacctctgagtccgccacccccgagagcggccctggcacctccaccgagcccagcgagggcagcgcacccggcagccctgccggcagccccacctccacagaggagggaaccagcaccgagcccagcgaaggcagcgccccaggcaccagcaccgagcctagtgagcaggagattaaacggatcaacaagatcagaagaagacttgtgaaagacagcaacaccaagaaggccggcaagacaggccccatgaaaaccctgctggttagagtgatgacacccgatctgagagagcggctggaaaacctgagaaagaagcctgaaaatatcccccagcccatcagcaatacatctagagccaacctgaataagctgctgaccgattacaccgaaatgaagaaggcgatcctgcatgtgtactgggaagagttccagaaggaccctgtgggcctgatgagccgggtggcccagcctgccagcaagaagatcgatcagaacaagctgaaacctgagatggacgagaagggcaacctgaccaccgccggctttgcctgctctcagtgtggccagcccctgttcgtgtacaagctggagcaggtgtctgagaagggcaaggcttacaccaactacttcggacggtgcaatgtggccgagcacgaaaagctgatcctgctggcccagctgaagcccgagaaggatagcgacgaagccgtgacatatagcctgggaaagtttgggcagagggccctggatttctacagcattcatgtgaccaaggagtccacccaccccgtgaagcccctggcccagatcgccggaaacagatacgcctccggacctgtgggaaaggccctgagcgacgcatgtatgggcacaatcgcctccttcctgtctaagtaccaggacatcatcatcgaacaccagaaggtggtgaagggcaaccagaagagactggagagcctgcgggagctggccggcaaggaaaacctggaataccctagcgtgaccctgccacctcagcctcacaccaaggagggcgttgatgcctacaacgaagtgatcgcccgggtgcgaatgtgggtgaacctgaacctgtggcagaagctgaagctaagcagagatgatgccaagcctctgctgagactgaagggattcccttcctttcctctggtcgagagacaggccaacgaagtggactggtgggacatggtgtgtaacgtgaagaagctgatcaacgagaaaaaggaggatggcaaggtgttttggcagaatctggctggctacaagagacaggaagccctgagaccatacctgagcagcgaggaagatcggaagaagggaaagaaattcgctcggtaccagctgggcgacctgctgctgcacctggaaaagaagcacggcgaggactggggaaaggtgtacgacgaggcctgggagcggattgacaagaaagtggaaggcctgagcaagcacatcaagctggaagaggaacggagaagcgaggacgcccagagcaaggccgccctgaccgactggctgcgggctaaggccagcttcgtgatcgagggcctgaaggaggccgacaaggacgagttctgcagatgcgagctgaagctgcagaagtggtacggggacctgcggggaaagcccttcgccatcgaagccgagaacagcatcctggacatcagcggcttcagcaagcagtacaactgtgccttcatctggcagaaggacggcgtgaagaagctgaacctgtacctgatcatcaactacttcaagggcggcaagctgcggttcaagaagatcaaacctgaagccttcgaagccaacagattctacaccgtgatcaacaaaaagagcggcgagatcgtgcccatggaggtgaacttcaacttcgacgaccccaacctgatcatcctgcctctggcctttggcaagagacagggcagagaattcatctggaacgacctgctgtccctggaaaccggcagcctgaagctggccaacggaagagtgatcgagaagacactgtacaacagaagaacccggcaggatgagcctgccctgttcgtggccctgaccttcgagcggcgggaggtcctggactcctccaatatcaaaccaatgaacctgatcggcgtggcaagaggcgaaaacatccccgccgtgatcgccctgaccgaccccgagggctgcccactgagccggtttaaggatagcctgggaaacccaacccacatcctgagaatcggcgagagctataaggagaagcagcggaccatccaggccaagaaggaggtggagcagcggagagccggcggctacagccggaagtacgccagcaaagccaagaatctggcagacgatatggtgagaaacaccgctagagatctgctgtactacgccgtgacccaggatgccatgctgatcttcgccaacctgagccggggcttcggccggcagggcaagcggaccttcatggccgagagacagtacacacggatggaggactggctgaccgccaagctggcctacgagggcctgagcaagacctacctgtccaagacactggcccagtacacctccaagacatgcagcaactgtgggtttaccatcaccagcgccgactacgacagggtgctggagaagctgaagaagacagcaacaggctggatgaccacaattaacggcaaggagctgaaggtggagggccagattacctactacaacagatacaagagacagaacgtagtcaaggacctgtccgtcgagctggatagactgagcgaagaatctgtgaacaacgacatctcctcctggacaaagggcagaagcggagaagctctgagcctcctgaagaaaagattctcccatagacccgtgcaggagaagttcgtgtgcctgaactgcggcttcgagacacacgcagccgagcaagccgccctgaacatcgccagatcctggctgttcctgcggagccaggagtacaagaaataccagacaaacaagacaaccggcaacaccgataagagagccttcgtcgagacctggcagtccttttaccggaagaagcttaaggaggtgtggaaacctgccgtgcggtctggcggatctggcggaggctccatggccttcagggacgtggccgtggccttcagccagaaggagtggaagctgctgagccccgcccagaggaccctgtacagggacgtgatgctggagaactacagcctgctggtgagcctgggcatcgccttccccaagcccaagctgatcacccagctggagcagggcgacgagccctggagggaggagagcgagtgcttcctggacctgtacagcgagcccaggaccgagttccagccctgcggcggcccaagcagcggcgcccctcctcccagcggcggcagcccagccggctccccaacctctaccgaggagggcacctctgagtccgccacccccgagagcggccctggcacctccaccgagcccagcgagggcagcgcacccggcagccctgccggcagccccacctccacagaggagggaaccagcaccgagcccagcgaaggcagcgccccaggcaccagcaccgagcctagtgagcaggagattaaacggatcaacaagatcagaagaagacttgtgaaagacagcaacaccaagaaggccggcaagacaggccccatgaaaaccctgctggttagagtgatgacacccgatctgagagagcggctggaaaacctgagaaagaagcctgaaaatatcccccagcccatcagcaatacatctagagccaacctgaataagctgctgaccgattacaccgaaatgaagaaggcgatcctgcatgtgtactgggaagagttccagaaggaccctgtgggcctgatgagccgggtggcccagcctgccagcaagaagatcgatcagaacaagctgaaacctgagatggacgagaagggcaacctgaccaccgccggctttgcctgctctcagtgtggccagcccctgttcgtgtacaagctggagcaggtgtctgagaagggcaaggcttacaccaactacttcggacggtgcaatgtggccgagcacgaaaagctgatcctgctggcccagctgaagcccgagaaggatagcgacgaagccgtgacatatagcctgggaaagtttgggcagagggccctggatttctacagcattcatgtgaccaaggagtccacccaccccgtgaagcccctggcccagatcgccggaaacagatacgcctccggacctgtgggaaaggccctgagcgacgcatgtatgggcacaatcgcctccttcctgtctaagtaccaggacatcatcatcgaacaccagaaggtggtgaagggcaaccagaagagactggagagcctgcgggagctggccggcaaggaaaacctggaataccctagcgtgaccctgccacctcagcctcacaccaaggagggcgttgatgcctacaacgaagtgatcgcccgggtgcgaatgtgggtgaacctgaacctgtggcagaagctgaagctaagcagagatgatgccaagcctctgctgagactgaagggattcccttcctttcctctggtcgagagacaggccaacgaagtggactggtgggacatggtgtgtaacgtgaagaagctgatcaacgagaaaaaggaggatggcaaggtgttttggcagaatctggctggctacaagagacaggaagccctgagaccatacctgagcagcgaggaagatcggaagaagggaaagaaattcgctcggtaccagctgggcgacctgctgctgcacctggaaaagaagcacggcgaggactggggaaaggtgtacgacgaggcctgggagcggattgacaagaaagtggaaggcctgagcaagcacatcaagctggaagaggaacggagaagcgaggacgcccagagcaaggccgccctgaccgactggctgcgggctaaggccagcttcgtgatcgagggcctgaaggaggccgacaaggacgagttctgcagatgcgagctgaagctgcagaagtggtacggggacctgcggggaaagcccttcgccatcgaagccgagaacagcatcctggacatcagcggcttcagcaagcagtacaactgtgccttcatctggcagaaggacggcgtgaagaagctgaacctgtacctgatcatcaactacttcaagggcggcaagctgcggttcaagaagatcaaacctgaagccttcgaagccaacagattctacaccgtgatcaacaaaaagagcggcgagatcgtgcccatggaggtgaacttcaacttcgacgaccccaacctgatcatcctgcctctggcctttggcaagagacagggcagagaattcatctggaacgacctgctgtccctggaaaccggcagcctgaagctggccaacggaagagtgatcgagaagacactgtacaacagaagaacccggcaggatgagcctgccctgttcgtggccctgaccttcgagcggcgggaggtcctggactcctccaatatcaaaccaatgaacctgatcggcgtggcaagaggcgaaaacatccccgccgtgatcgccctgaccgaccccgagggctgcccactgagccggtttaaggatagcctgggaaacccaacccacatcctgagaatcggcgagagctataaggagaagcagcggaccatccaggccaagaaggaggtggagcagcggagagccggcggctacagccggaagtacgccagcaaagccaagaatctggcagacgatatggtgagaaacaccgctagagatctgctgtactacgccgtgacccaggatgccatgctgatcttcgccaacctgagccggggcttcggccggcagggcaagcggaccttcatggccgagagacagtacacacggatggaggactggctgaccgccaagctggcctacgagggcctgagcaagacctacctgtccaagacactggcccagtacacctccaagacatgcagcaactgtgggtttaccatcaccagcgccgactacgacagggtgctggagaagctgaagaagacagcaacaggctggatgaccacaattaacggcaaggagctgaaggtggagggccagattacctactacaacagatacaagagacagaacgtagtcaaggacctgtccgtcgagctggatagactgagcgaagaatctgtgaacaacgacatctcctcctggacaaagggcagaagcggagaagctctgagcctcctgaagaaaagattctcccatagacccgtgcaggagaagttcgtgtgcctgaactgcggcttcgagacacacgcagccgagcaagccgccctgaacatcgccagatcctggctgttcctgcggagccaggagtacaagaaataccagacaaacaagacaaccggcaacaccgataagagagccttcgtcgagacctggcagtccttttaccggaagaagcttaaggaggtgtggaaacctgccgtgcggtctggcggatctggcggaggctcctatggccttcagggacgtggccgtggccttcagccagaaggagtggaagctgctgagccccgcccagaggaccctgtacagggacgtgatgctggagaactacagcctgctggtgagcctgggcatcgccttccccaagcccaagctgatcacccagctggagcagggcgacgagccctggagggaggagagcgagtgcttcctggacctgtacagcgagcccaggaccgagttccagccctgcggatctggctccggcagcggccccaagaaaaagagaaaagtctaagctgccttctgcggggcttgccttctggccatgcccttcttctctcccttgcacctgtacctcttggtctttgaataaagcctgagtaggaaggctagcaaaaaaaaaaaaaaaaaaaaaaaaaaaaaaaaaaaaaaaaaaaaaaaaaaaaaaaaaaaaaaaaaaaaaaaaaaaaaaaa

SEQ ID NO: 16566 - RNA, 9485 nt, synthetic construct
  source 1..9485: mol_type = other RNA
aggaaataagagagaaaagaagagtaagaagaaatataagagccaccatggcccctaagaagaagcgtaaagtgagccggatggaacgcctcgtctacgaggtgcggcagaagtgcagaaacatcgaggacatctgcatctcctgcggatctctgaacgtgaccctggagcacccactgttcatcggcggcatgtgccagaactgtaaaaactgttttctggagtgtgcctatcaatacgacgatgacggctaccagagctactgcaccatctgttgcggcggaagagaggtgctgatgtgtggaaataacaactgctgccggtgcttctgcgtggaatgcgtggacctgctggtgggccccggcgccgcccaggccgctattaaggaagatccttggaactgctacatgtgcggccacaagggcacatacggcctgctgagacggagagaggactggcctagcagactgcagatgttcttcgccaataaccacgaccaggagttcgacccccctaaggtgtaccctcccgtccccgccgagaagagaaagcccatccgggtcctgagcctgttcgatggcatcgccaccggtctgctggtgctgaaggacctgggcatccaggtggataggtacattgcctccgaggtgtgcgaggactccatcaccgtgggaatggtgcgtcatcagggcaagatcatgtacgtgggcgacgtgcggagcgtgacacagaagcatatccaggagtggggccctttcgacctggtgatcggcggcagcccttgcaatgacctgagcatcgtgaacccagcccggaagggcctgtacgagggaaccggcagactgttcttcgagttttacagactgctgcacgacgcccggcctaaggaaggcgacgaccggcccttcttttggctgttcgagaatgtggtggccatgggagtcagcgacaagcgggatattagccggttcctggagagcaaccccgtgatgatcgatgccaaggaagtgagcgccgcccaccgggccagatacttctggggcaatctgcctggcatgaacagacccctggccagcaccgtgaacgacaagctggagctgcaggagtgcctggagcacggccggatcgccaagttcagcaaggtgagaaccatcaccacccgaagcaacagcatcaaacaaggcaaggaccagcactttcctgtgttcatgaacgagaaggaggacatcctgtggtgtaccgagatggagagagtgttcgggttcccagtccactacacagatgtcagcaacatgtctagactggccagacagagactgctgggaagaagctggtccgtccctgtgatcagacacctgttcgcccctctgaaggagtacttcgcctgcgtgagcagcggcaacagcaacgccaacagccggggccccagcttctctagcggcctggtgccactgtccctgagagggagccacatgggccccatggagatctacaaaaccgtgagcgcctggaagcggcagcctgtgcgcgtgctgagcctgtttcggaatatcgataaagtcctgaaaagcctgggattcctggagagcggctctggctccggcggtggcaccctgaagtacgtggaggatgtgacaaacgtggtcagacgggatgtggagaagtggggccccttcgatctggtgtacggcagcacccaacccctgggcagctcttgtgaccggtgccctggctggtacatgtttcagttccaccggatcctgcagtacgccctgccgagacaggagtcccagcggccattcttttggattttcatggacaacttgctgctgaccgaggatgaccaggaaactaccactcggttcctgcagaccgaagccgtgaccctgcaggacgtgagaggccgggactaccagaacgccatgcgggtgtggtccaacatccctggactgaaaagcaagcacgcacctctgacccctaaagaagaggagtacctgcaggcccaggtgcggagcagaagcaagctggacgcccctaaggtggatctgctggtgaagaattgcctcctgcccctgagagagtacttcaagtatttcagccagaatagtctgcccctgggaggcagcggcggcggcgccctggtgacatttgaggacgtcgccgtgcggttcacccaggaggaatgggctctgctggatccttctcagaaaatcctgtaccgggacgtgatgagagagacataccggaatctgacctccgtgggcatcaactgggaatgttgggaccttgaagcctgcttcagaagcctgggaagaaacctgagagtgcaggtggtgaagagaaagtgcgagctgaccaacagcggcccctgcgccgagggcggcccaagcagcggcgcccctcctcccagcggcggcagcccagccggctccccaacctctaccgaggagggcacctctgagtccgccacccccgagagcggccctggcacctccaccgagcccagcgagggcagcgcacccggcagccctgccggcagccccacctccacagaggagggaaccagcaccgagcccagcgaaggcagcgccccaggcaccagcaccgagcctagtgagcaggagattaaacggatcaacaagatcagaagaagacttgtgaaagacagcaacaccaagaaggccggcaagacaggccccatgaaaaccctgctggttagagtgatgacacccgatctgagagagcggctggaaaacctgagaaagaagcctgaaaatatcccccagcccatcagcaatacatctagagccaacctgaataagctgctgaccgattacaccgaaatgaagaaggcgatcctgcatgtgtactgggaagagttccagaaggaccctgtgggcctgatgagccgggtggcccagcctgccagcaagaagatcgatcagaacaagctgaaacctgagatggacgagaagggcaacctgaccaccgccggctttgcctgctctcagtgtggccagcccctgttcgtgtacaagctggagcaggtgtctgagaagggcaaggcttacaccaactacttcggacggtgcaatgtggccgagcacgaaaagctgatcctgctggcccagctgaagcccgagaaggatagcgacgaagccgtgacatatagcctgggaaagtttgggcagagggccctggatttctacagcattcatgtgaccaaggagtccacccaccccgtgaagcccctggcccagatcgccggaaacagatacgcctccggacctgtgggaaaggccctgagcgacgcatgtatgggcacaatcgcctccttcctgtctaagtaccaggacatcatcatcgaacaccagaaggtggtgaagggcaaccagaagagactggagagcctgcgggagctggccggcaaggaaaacctggaataccctagcgtgaccctgccacctcagcctcacaccaaggagggcgttgatgcctacaacgaagtgatcgcccgggtgcgaatgtgggtgaacctgaacctgtggcagaagctgaagctaagcagagatgatgccaagcctctgctgagactgaagggattcccttcctttcctctggtcgagagacaggccaacgaagtggactggtgggacatggtgtgtaacgtgaagaagctgatcaacgagaaaaaggaggatggcaaggtgttttggcagaatctggctggctacaagagacaggaagccctgagaccatacctgagcagcgaggaagatcggaagaagggaaagaaattcgctcggtaccagctgggcgacctgctgctgcacctggaaaagaagcacggcgaggactggggaaaggtgtacgacgaggcctgggagcggattgacaagaaagtggaaggcctgagcaagcacatcaagctggaagaggaacggagaagcgaggacgcccagagcaaggccgccctgaccgactggctgcgggctaaggccagcttcgtgatcgagggcctgaaggaggccgacaaggacgagttctgcagatgcgagctgaagctgcagaagtggtacggggacctgcggggaaagcccttcgccatcgaagccgagaacagcatcctggacatcagcggcttcagcaagcagtacaactgtgccttcatctggcagaaggacggcgtgaagaagctgaacctgtacctgatcatcaactacttcaagggcggcaagctgcggttcaagaagatcaaacctgaagccttcgaagccaacagattctacaccgtgatcaacaaaaagagcggcgagatcgtgcccatggaggtgaacttcaacttcgacgaccccaacctgatcatcctgcctctggcctttggcaagagacagggcagagaattcatctggaacgacctgctgtccctggaaaccggcagcctgaagctggccaacggaagagtgatcgagaagacactgtacaacagaagaacccggcaggatgagcctgccctgttcgtggccctgaccttcgagcggcgggaggtcctggactcctccaatatcaaaccaatgaacctgatcggcgtggcaagaggcgaaaacatccccgccgtgatcgccctgaccgaccccgagggctgcccactgagccggtttaaggatagcctgggaaacccaacccacatcctgagaatcggcgagagctataaggagaagcagcggaccatccaggccaagaaggaggtggagcagcggagagccggcggctacagccggaagtacgccagcaaagccaagaatctggcagacgatatggtgagaaacaccgctagagatctgctgtactacgccgtgacccaggatgccatgctgatcttcgccaacctgagccggggcttcggccggcagggcaagcggaccttcatggccgagagacagtacacacggatggaggactggctgaccgccaagctggcctacgagggcctgagcaagacctacctgtccaagacactggcccagtacacctccaagacatgcagcaactgtgggtttaccatcaccagcgccgactacgacagggtgctggagaagctgaagaagacagcaacaggctggatgaccacaattaacggcaaggagctgaaggtggagggccagattacctactacaacagatacaagagacagaacgtagtcaaggacctgtccgtcgagctggatagactgagcgaagaatctgtgaacaacgacatctcctcctggacaaagggcagaagcggagaagctctgagcctcctgaagaaaagattctcccatagacccgtgcaggagaagttcgtgtgcctgaactgcggcttcgagacacacgcagccgagcaagccgccctgaacatcgccagatcctggctgttcctgcggagccaggagtacaagaaataccagacaaacaagacaaccggcaacaccgataagagagccttcgtcgagacctggcagtccttttaccggaagaagcttaaggaggtgtggaaacctgccgtgcggtctggcggatctggcggaggctccatggccatgagccaggagagcctgaccttcaaggacgtgttcgtggacttcaccctggaggagtggcagcagctggacagcgcccagaagaacctgtacagggacgtgatgctggagaactacagccacctggtgagcgtgggctacctggtggagaagcccgacgtgatcttcaggctgggccccggcgaggagagctggatggccgacggcggcacccccgtgaggacctgcgccggcgagggcggcccaagcagcggcgcccctcctcccagcggcggcagcccagccggctccccaacctctaccgaggagggcacctctgagtccgccacccccgagagcggccctggcacctccaccgagcccagcgagggcagcgcacccggcagccctgccggcagccccacctccacagaggagggaaccagcaccgagcccagcgaaggcagcgccccaggcaccagcaccgagcctagtgagcaggagattaaacggatcaacaagatcagaagaagacttgtgaaagacagcaacaccaagaaggccggcaagacaggccccatgaaaaccctgctggttagagtgatgacacccgatctgagagagcggctggaaaacctgagaaagaagcctgaaaatatcccccagcccatcagcaatacatctagagccaacctgaataagctgctgaccgattacaccgaaatgaagaaggcgatcctgcatgtgtactgggaagagttccagaaggaccctgtgggcctgatgagccgggtggcccagcctgccagcaagaagatcgatcagaacaagctgaaacctgagatggacgagaagggcaacctgaccaccgccggctttgcctgctctcagtgtggccagcccctgttcgtgtacaagctggagcaggtgtctgagaagggcaaggcttacaccaactacttcggacggtgcaatgtggccgagcacgaaaagctgatcctgctggcccagctgaagcccgagaaggatagcgacgaagccgtgacatatagcctgggaaagtttgggcagagggccctggatttctacagcattcatgtgaccaaggagtccacccaccccgtgaagcccctggcccagatcgccggaaacagatacgcctccggacctgtgggaaaggccctgagcgacgcatgtatgggcacaatcgcctccttcctgtctaagtaccaggacatcatcatcgaacaccagaaggtggtgaagggcaaccagaagagactggagagcctgcgggagctggccggcaaggaaaacctggaataccctagcgtgaccctgccacctcagcctcacaccaaggagggcgttgatgcctacaacgaagtgatcgcccgggtgcgaatgtgggtgaacctgaacctgtggcagaagctgaagctaagcagagatgatgccaagcctctgctgagactgaagggattcccttcctttcctctggtcgagagacaggccaacgaagtggactggtgggacatggtgtgtaacgtgaagaagctgatcaacgagaaaaaggaggatggcaaggtgttttggcagaatctggctggctacaagagacaggaagccctgagaccatacctgagcagcgaggaagatcggaagaagggaaagaaattcgctcggtaccagctgggcgacctgctgctgcacctggaaaagaagcacggcgaggactggggaaaggtgtacgacgaggcctgggagcggattgacaagaaagtggaaggcctgagcaagcacatcaagctggaagaggaacggagaagcgaggacgcccagagcaaggccgccctgaccgactggctgcgggctaaggccagcttcgtgatcgagggcctgaaggaggccgacaaggacgagttctgcagatgcgagctgaagctgcagaagtggtacggggacctgcggggaaagcccttcgccatcgaagccgagaacagcatcctggacatcagcggcttcagcaagcagtacaactgtgccttcatctggcagaaggacggcgtgaagaagctgaacctgtacctgatcatcaactacttcaagggcggcaagctgcggttcaagaagatcaaacctgaagccttcgaagccaacagattctacaccgtgatcaacaaaaagagcggcgagatcgtgcccatggaggtgaacttcaacttcgacgaccccaacctgatcatcctgcctctggcctttggcaagagacagggcagagaattcatctggaacgacctgctgtccctggaaaccggcagcctgaagctggccaacggaagagtgatcgagaagacactgtacaacagaagaacccggcaggatgagcctgccctgttcgtggccctgaccttcgagcggcgggaggtcctggactcctccaatatcaaaccaatgaacctgatcggcgtggcaagaggcgaaaacatccccgccgtgatcgccctgaccgaccccgagggctgcccactgagccggtttaaggatagcctgggaaacccaacccacatcctgagaatcggcgagagctataaggagaagcagcggaccatccaggccaagaaggaggtggagcagcggagagccggcggctacagccggaagtacgccagcaaagccaagaatctggcagacgatatggtgagaaacaccgctagagatctgctgtactacgccgtgacccaggatgccatgctgatcttcgccaacctgagccggggcttcggccggcagggcaagcggaccttcatggccgagagacagtacacacggatggaggactggctgaccgccaagctggcctacgagggcctgagcaagacctacctgtccaagacactggcccagtacacctccaagacatgcagcaactgtgggtttaccatcaccagcgccgactacgacagggtgctggagaagctgaagaagacagcaacaggctggatgaccacaattaacggcaaggagctgaaggtggagggccagattacctactacaacagatacaagagacagaacgtagtcaaggacctgtccgtcgagctggatagactgagcgaagaatctgtgaacaacgacatctcctcctggacaaagggcagaagcggagaagctctgagcctcctgaagaaaagattctcccatagacccgtgcaggagaagttcgtgtgcctgaactgcggcttcgagacacacgcagccgagcaagccgccctgaacatcgccagatcctggctgttcctgcggagccaggagtacaagaaataccagacaaacaagacaaccggcaacaccgataagagagccttcgtcgagacctggcagtccttttaccggaagaagcttaaggaggtgtggaaacctgccgtgcggtctggcggatctggcggaggctcctatggccatgagccaggagagcctgaccttcaaggacgtgttcgtggacttcaccctggaggagtggcagcagctggacagcgcccagaagaacctgtacagggacgtgatgctggagaactacagccacctggtgagcgtgggctacctggtggagaagcccgacgtgatcttcaggctgggccccggcgaggagagctggatggccgacggcggcacccccgtgaggacctgcgccggcgagggatctggctccggcagcggccccaagaaaaagagaaaagtctaagctgccttctgcggggcttgccttctggccatgcccttcttctctcccttgcacctgtacctcttggtctttgaataaagcctgagtaggaaggctagcaaaaaaaaaaaaaaaaaaaaaaaaaaaaaaaaaaaaaaaaaaaaaaaaaaaaaaaaaaaaaaaaaaaaaaaaaaaaaaaa

SEQ ID NO: 16567 - RNA, 9485 nt, synthetic construct
  source 1..9485: mol_type = other RNA
aggaaataagagagaaaagaagagtaagaagaaatataagagccaccatggcccctaagaagaagcgtaaagtgagccggatggaacgcctcgtctacgaggtgcggcagaagtgcagaaacatcgaggacatctgcatctcctgcggatctctgaacgtgaccctggagcacccactgttcatcggcggcatgtgccagaactgtaaaaactgttttctggagtgtgcctatcaatacgacgatgacggctaccagagctactgcaccatctgttgcggcggaagagaggtgctgatgtgtggaaataacaactgctgccggtgcttctgcgtggaatgcgtggacctgctggtgggccccggcgccgcccaggccgctattaaggaagatccttggaactgctacatgtgcggccacaagggcacatacggcctgctgagacggagagaggactggcctagcagactgcagatgttcttcgccaataaccacgaccaggagttcgacccccctaaggtgtaccctcccgtccccgccgagaagagaaagcccatccgggtcctgagcctgttcgatggcatcgccaccggtctgctggtgctgaaggacctgggcatccaggtggataggtacattgcctccgaggtgtgcgaggactccatcaccgtgggaatggtgcgtcatcagggcaagatcatgtacgtgggcgacgtgcggagcgtgacacagaagcatatccaggagtggggccctttcgacctggtgatcggcggcagcccttgcaatgacctgagcatcgtgaacccagcccggaagggcctgtacgagggaaccggcagactgttcttcgagttttacagactgctgcacgacgcccggcctaaggaaggcgacgaccggcccttcttttggctgttcgagaatgtggtggccatgggagtcagcgacaagcgggatattagccggttcctggagagcaaccccgtgatgatcgatgccaaggaagtgagcgccgcccaccgggccagatacttctggggcaatctgcctggcatgaacagacccctggccagcaccgtgaacgacaagctggagctgcaggagtgcctggagcacggccggatcgccaagttcagcaaggtgagaaccatcaccacccgaagcaacagcatcaaacaaggcaaggaccagcactttcctgtgttcatgaacgagaaggaggacatcctgtggtgtaccgagatggagagagtgttcgggttcccagtccactacacagatgtcagcaacatgtctagactggccagacagagactgctgggaagaagctggtccgtccctgtgatcagacacctgttcgcccctctgaaggagtacttcgcctgcgtgagcagcggcaacagcaacgccaacagccggggccccagcttctctagcggcctggtgccactgtccctgagagggagccacatgggccccatggagatctacaaaaccgtgagcgcctggaagcggcagcctgtgcgcgtgctgagcctgtttcggaatatcgataaagtcctgaaaagcctgggattcctggagagcggctctggctccggcggtggcaccctgaagtacgtggaggatgtgacaaacgtggtcagacgggatgtggagaagtggggccccttcgatctggtgtacggcagcacccaacccctgggcagctcttgtgaccggtgccctggctggtacatgtttcagttccaccggatcctgcagtacgccctgccgagacaggagtcccagcggccattcttttggattttcatggacaacttgctgctgaccgaggatgaccaggaaactaccactcggttcctgcagaccgaagccgtgaccctgcaggacgtgagaggccgggactaccagaacgccatgcgggtgtggtccaacatccctggactgaaaagcaagcacgcacctctgacccctaaagaagaggagtacctgcaggcccaggtgcggagcagaagcaagctggacgcccctaaggtggatctgctggtgaagaattgcctcctgcccctgagagagtacttcaagtatttcagccagaatagtctgcccctgggaggcagcggcggcggcgccctggtgacatttgaggacgtcgccgtgcggttcacccaggaggaatgggctctgctggatccttctcagaaaatcctgtaccgggacgtgatgagagagacataccggaatctgacctccgtgggcatcaactgggaatgttgggaccttgaagcctgcttcagaagcctgggaagaaacctgagagtgcaggtggtgaagagaaagtgcgagctgaccaacagcggcccctgcgccgagggcggcccaagcagcggcgcccctcctcccagcggcggcagcccagccggctccccaacctctaccgaggagggcacctctgagtccgccacccccgagagcggccctggcacctccaccgagcccagcgagggcagcgcacccggcagccctgccggcagccccacctccacagaggagggaaccagcaccgagcccagcgaaggcagcgccccaggcaccagcaccgagcctagtgagcaggagattaaacggatcaacaagatcagaagaagacttgtgaaagacagcaacaccaagaaggccggcaagacaggccccatgaaaaccctgctggttagagtgatgacacccgatctgagagagcggctggaaaacctgagaaagaagcctgaaaatatcccccagcccatcagcaatacatctagagccaacctgaataagctgctgaccgattacaccgaaatgaagaaggcgatcctgcatgtgtactgggaagagttccagaaggaccctgtgggcctgatgagccgggtggcccagcctgccagcaagaagatcgatcagaacaagctgaaacctgagatggacgagaagggcaacctgaccaccgccggctttgcctgctctcagtgtggccagcccctgttcgtgtacaagctggagcaggtgtctgagaagggcaaggcttacaccaactacttcggacggtgcaatgtggccgagcacgaaaagctgatcctgctggcccagctgaagcccgagaaggatagcgacgaagccgtgacatatagcctgggaaagtttgggcagagggccctggatttctacagcattcatgtgaccaaggagtccacccaccccgtgaagcccctggcccagatcgccggaaacagatacgcctccggacctgtgggaaaggccctgagcgacgcatgtatgggcacaatcgcctccttcctgtctaagtaccaggacatcatcatcgaacaccagaaggtggtgaagggcaaccagaagagactggagagcctgcgggagctggccggcaaggaaaacctggaataccctagcgtgaccctgccacctcagcctcacaccaaggagggcgttgatgcctacaacgaagtgatcgcccgggtgcgaatgtgggtgaacctgaacctgtggcagaagctgaagctaagcagagatgatgccaagcctctgctgagactgaagggattcccttcctttcctctggtcgagagacaggccaacgaagtggactggtgggacatggtgtgtaacgtgaagaagctgatcaacgagaaaaaggaggatggcaaggtgttttggcagaatctggctggctacaagagacaggaagccctgagaccatacctgagcagcgaggaagatcggaagaagggaaagaaattcgctcggtaccagctgggcgacctgctgctgcacctggaaaagaagcacggcgaggactggggaaaggtgtacgacgaggcctgggagcggattgacaagaaagtggaaggcctgagcaagcacatcaagctggaagaggaacggagaagcgaggacgcccagagcaaggccgccctgaccgactggctgcgggctaaggccagcttcgtgatcgagggcctgaaggaggccgacaaggacgagttctgcagatgcgagctgaagctgcagaagtggtacggggacctgcggggaaagcccttcgccatcgaagccgagaacagcatcctggacatcagcggcttcagcaagcagtacaactgtgccttcatctggcagaaggacggcgtgaagaagctgaacctgtacctgatcatcaactacttcaagggcggcaagctgcggttcaagaagatcaaacctgaagccttcgaagccaacagattctacaccgtgatcaacaaaaagagcggcgagatcgtgcccatggaggtgaacttcaacttcgacgaccccaacctgatcatcctgcctctggcctttggcaagagacagggcagagaattcatctggaacgacctgctgtccctggaaaccggcagcctgaagctggccaacggaagagtgatcgagaagacactgtacaacagaagaacccggcaggatgagcctgccctgttcgtggccctgaccttcgagcggcgggaggtcctggactcctccaatatcaaaccaatgaacctgatcggcgtggcaagaggcgaaaacatccccgccgtgatcgccctgaccgaccccgagggctgcccactgagccggtttaaggatagcctgggaaacccaacccacatcctgagaatcggcgagagctataaggagaagcagcggaccatccaggccaagaaggaggtggagcagcggagagccggcggctacagccggaagtacgccagcaaagccaagaatctggcagacgatatggtgagaaacaccgctagagatctgctgtactacgccgtgacccaggatgccatgctgatcttcgccaacctgagccggggcttcggccggcagggcaagcggaccttcatggccgagagacagtacacacggatggaggactggctgaccgccaagctggcctacgagggcctgagcaagacctacctgtccaagacactggcccagtacacctccaagacatgcagcaactgtgggtttaccatcaccagcgccgactacgacagggtgctggagaagctgaagaagacagcaacaggctggatgaccacaattaacggcaaggagctgaaggtggagggccagattacctactacaacagatacaagagacagaacgtagtcaaggacctgtccgtcgagctggatagactgagcgaagaatctgtgaacaacgacatctcctcctggacaaagggcagaagcggagaagctctgagcctcctgaagaaaagattctcccatagacccgtgcaggagaagttcgtgtgcctgaactgcggcttcgagacacacgcagccgagcaagccgccctgaacatcgccagatcctggctgttcctgcggagccaggagtacaagaaataccagacaaacaagacaaccggcaacaccgataagagagccttcgtcgagacctggcagtccttttaccggaagaagcttaaggaggtgtggaaacctgccgtgcggtctggcggatctggcggaggctccctgctgaccttcgaggacgtggccgtgagcttcagcgaggaggagtggaagctgctggaccccagccagaagatcctgtacaacgacgtgatgcaggagaactacgagaccgtgatcagcctgggcctgaagctgaagaacgacaccggcaacgaccagcccatcagcctgagcgccctggagatccaggccagcggcggcaaggtgctgaggaaggccaggatgaaggtggcccagaagaccggcggcccaagcagcggcgcccctcctcccagcggcggcagcccagccggctccccaacctctaccgaggagggcacctctgagtccgccacccccgagagcggccctggcacctccaccgagcccagcgagggcagcgcacccggcagccctgccggcagccccacctccacagaggagggaaccagcaccgagcccagcgaaggcagcgccccaggcaccagcaccgagcctagtgagcaggagattaaacggatcaacaagatcagaagaagacttgtgaaagacagcaacaccaagaaggccggcaagacaggccccatgaaaaccctgctggttagagtgatgacacccgatctgagagagcggctggaaaacctgagaaagaagcctgaaaatatcccccagcccatcagcaatacatctagagccaacctgaataagctgctgaccgattacaccgaaatgaagaaggcgatcctgcatgtgtactgggaagagttccagaaggaccctgtgggcctgatgagccgggtggcccagcctgccagcaagaagatcgatcagaacaagctgaaacctgagatggacgagaagggcaacctgaccaccgccggctttgcctgctctcagtgtggccagcccctgttcgtgtacaagctggagcaggtgtctgagaagggcaaggcttacaccaactacttcggacggtgcaatgtggccgagcacgaaaagctgatcctgctggcccagctgaagcccgagaaggatagcgacgaagccgtgacatatagcctgggaaagtttgggcagagggccctggatttctacagcattcatgtgaccaaggagtccacccaccccgtgaagcccctggcccagatcgccggaaacagatacgcctccggacctgtgggaaaggccctgagcgacgcatgtatgggcacaatcgcctccttcctgtctaagtaccaggacatcatcatcgaacaccagaaggtggtgaagggcaaccagaagagactggagagcctgcgggagctggccggcaaggaaaacctggaataccctagcgtgaccctgccacctcagcctcacaccaaggagggcgttgatgcctacaacgaagtgatcgcccgggtgcgaatgtgggtgaacctgaacctgtggcagaagctgaagctaagcagagatgatgccaagcctctgctgagactgaagggattcccttcctttcctctggtcgagagacaggccaacgaagtggactggtgggacatggtgtgtaacgtgaagaagctgatcaacgagaaaaaggaggatggcaaggtgttttggcagaatctggctggctacaagagacaggaagccctgagaccatacctgagcagcgaggaagatcggaagaagggaaagaaattcgctcggtaccagctgggcgacctgctgctgcacctggaaaagaagcacggcgaggactggggaaaggtgtacgacgaggcctgggagcggattgacaagaaagtggaaggcctgagcaagcacatcaagctggaagaggaacggagaagcgaggacgcccagagcaaggccgccctgaccgactggctgcgggctaaggccagcttcgtgatcgagggcctgaaggaggccgacaaggacgagttctgcagatgcgagctgaagctgcagaagtggtacggggacctgcggggaaagcccttcgccatcgaagccgagaacagcatcctggacatcagcggcttcagcaagcagtacaactgtgccttcatctggcagaaggacggcgtgaagaagctgaacctgtacctgatcatcaactacttcaagggcggcaagctgcggttcaagaagatcaaacctgaagccttcgaagccaacagattctacaccgtgatcaacaaaaagagcggcgagatcgtgcccatggaggtgaacttcaacttcgacgaccccaacctgatcatcctgcctctggcctttggcaagagacagggcagagaattcatctggaacgacctgctgtccctggaaaccggcagcctgaagctggccaacggaagagtgatcgagaagacactgtacaacagaagaacccggcaggatgagcctgccctgttcgtggccctgaccttcgagcggcgggaggtcctggactcctccaatatcaaaccaatgaacctgatcggcgtggcaagaggcgaaaacatccccgccgtgatcgccctgaccgaccccgagggctgcccactgagccggtttaaggatagcctgggaaacccaacccacatcctgagaatcggcgagagctataaggagaagcagcggaccatccaggccaagaaggaggtggagcagcggagagccggcggctacagccggaagtacgccagcaaagccaagaatctggcagacgatatggtgagaaacaccgctagagatctgctgtactacgccgtgacccaggatgccatgctgatcttcgccaacctgagccggggcttcggccggcagggcaagcggaccttcatggccgagagacagtacacacggatggaggactggctgaccgccaagctggcctacgagggcctgagcaagacctacctgtccaagacactggcccagtacacctccaagacatgcagcaactgtgggtttaccatcaccagcgccgactacgacagggtgctggagaagctgaagaagacagcaacaggctggatgaccacaattaacggcaaggagctgaaggtggagggccagattacctactacaacagatacaagagacagaacgtagtcaaggacctgtccgtcgagctggatagactgagcgaagaatctgtgaacaacgacatctcctcctggacaaagggcagaagcggagaagctctgagcctcctgaagaaaagattctcccatagacccgtgcaggagaagttcgtgtgcctgaactgcggcttcgagacacacgcagccgagcaagccgccctgaacatcgccagatcctggctgttcctgcggagccaggagtacaagaaataccagacaaacaagacaaccggcaacaccgataagagagccttcgtcgagacctggcagtccttttaccggaagaagcttaaggaggtgtggaaacctgccgtgcggtctggcggatctggcggaggctcctctgctgaccttcgaggacgtggccgtgagcttcagcgaggaggagtggaagctgctggaccccagccagaagatcctgtacaacgacgtgatgcaggagaactacgagaccgtgatcagcctgggcctgaagctgaagaacgacaccggcaacgaccagcccatcagcctgagcgccctggagatccaggccagcggcggcaaggtgctgaggaaggccaggatgaaggtggcccagaagaccggatctggctccggcagcggccccaagaaaaagagaaaagtctaagctgccttctgcggggcttgccttctggccatgcccttcttctctcccttgcacctgtacctcttggtctttgaataaagcctgagtaggaaggctagcaaaaaaaaaaaaaaaaaaaaaaaaaaaaaaaaaaaaaaaaaaaaaaaaaaaaaaaaaaaaaaaaaaaaaaaaaaaaaaaa

SEQ ID NO: 16568 - RNA, 9485 nt, synthetic construct
  source 1..9485: mol_type = other RNA
aggaaataagagagaaaagaagagtaagaagaaatataagagccaccatggcccctaagaagaagcgtaaagtgagccggatggaacgcctcgtctacgaggtgcggcagaagtgcagaaacatcgaggacatctgcatctcctgcggatctctgaacgtgaccctggagcacccactgttcatcggcggcatgtgccagaactgtaaaaactgttttctggagtgtgcctatcaatacgacgatgacggctaccagagctactgcaccatctgttgcggcggaagagaggtgctgatgtgtggaaataacaactgctgccggtgcttctgcgtggaatgcgtggacctgctggtgggccccggcgccgcccaggccgctattaaggaagatccttggaactgctacatgtgcggccacaagggcacatacggcctgctgagacggagagaggactggcctagcagactgcagatgttcttcgccaataaccacgaccaggagttcgacccccctaaggtgtaccctcccgtccccgccgagaagagaaagcccatccgggtcctgagcctgttcgatggcatcgccaccggtctgctggtgctgaaggacctgggcatccaggtggataggtacattgcctccgaggtgtgcgaggactccatcaccgtgggaatggtgcgtcatcagggcaagatcatgtacgtgggcgacgtgcggagcgtgacacagaagcatatccaggagtggggccctttcgacctggtgatcggcggcagcccttgcaatgacctgagcatcgtgaacccagcccggaagggcctgtacgagggaaccggcagactgttcttcgagttttacagactgctgcacgacgcccggcctaaggaaggcgacgaccggcccttcttttggctgttcgagaatgtggtggccatgggagtcagcgacaagcgggatattagccggttcctggagagcaaccccgtgatgatcgatgccaaggaagtgagcgccgcccaccgggccagatacttctggggcaatctgcctggcatgaacagacccctggccagcaccgtgaacgacaagctggagctgcaggagtgcctggagcacggccggatcgccaagttcagcaaggtgagaaccatcaccacccgaagcaacagcatcaaacaaggcaaggaccagcactttcctgtgttcatgaacgagaaggaggacatcctgtggtgtaccgagatggagagagtgttcgggttcccagtccactacacagatgtcagcaacatgtctagactggccagacagagactgctgggaagaagctggtccgtccctgtgatcagacacctgttcgcccctctgaaggagtacttcgcctgcgtgagcagcggcaacagcaacgccaacagccggggccccagcttctctagcggcctggtgccactgtccctgagagggagccacatgggccccatggagatctacaaaaccgtgagcgcctggaagcggcagcctgtgcgcgtgctgagcctgtttcggaatatcgataaagtcctgaaaagcctgggattcctggagagcggctctggctccggcggtggcaccctgaagtacgtggaggatgtgacaaacgtggtcagacgggatgtggagaagtggggccccttcgatctggtgtacggcagcacccaacccctgggcagctcttgtgaccggtgccctggctggtacatgtttcagttccaccggatcctgcagtacgccctgccgagacaggagtcccagcggccattcttttggattttcatggacaacttgctgctgaccgaggatgaccaggaaactaccactcggttcctgcagaccgaagccgtgaccctgcaggacgtgagaggccgggactaccagaacgccatgcgggtgtggtccaacatccctggactgaaaagcaagcacgcacctctgacccctaaagaagaggagtacctgcaggcccaggtgcggagcagaagcaagctggacgcccctaaggtggatctgctggtgaagaattgcctcctgcccctgagagagtacttcaagtatttcagccagaatagtctgcccctgggaggcagcggcggcggcgccctggtgacatttgaggacgtcgccgtgcggttcacccaggaggaatgggctctgctggatccttctcagaaaatcctgtaccgggacgtgatgagagagacataccggaatctgacctccgtgggcatcaactgggaatgttgggaccttgaagcctgcttcagaagcctgggaagaaacctgagagtgcaggtggtgaagagaaagtgcgagctgaccaacagcggcccctgcgccgagggcggcccaagcagcggcgcccctcctcccagcggcggcagcccagccggctccccaacctctaccgaggagggcacctctgagtccgccacccccgagagcggccctggcacctccaccgagcccagcgagggcagcgcacccggcagccctgccggcagccccacctccacagaggagggaaccagcaccgagcccagcgaaggcagcgccccaggcaccagcaccgagcctagtgagcaggagattaaacggatcaacaagatcagaagaagacttgtgaaagacagcaacaccaagaaggccggcaagacaggccccatgaaaaccctgctggttagagtgatgacacccgatctgagagagcggctggaaaacctgagaaagaagcctgaaaatatcccccagcccatcagcaatacatctagagccaacctgaataagctgctgaccgattacaccgaaatgaagaaggcgatcctgcatgtgtactgggaagagttccagaaggaccctgtgggcctgatgagccgggtggcccagcctgccagcaagaagatcgatcagaacaagctgaaacctgagatggacgagaagggcaacctgaccaccgccggctttgcctgctctcagtgtggccagcccctgttcgtgtacaagctggagcaggtgtctgagaagggcaaggcttacaccaactacttcggacggtgcaatgtggccgagcacgaaaagctgatcctgctggcccagctgaagcccgagaaggatagcgacgaagccgtgacatatagcctgggaaagtttgggcagagggccctggatttctacagcattcatgtgaccaaggagtccacccaccccgtgaagcccctggcccagatcgccggaaacagatacgcctccggacctgtgggaaaggccctgagcgacgcatgtatgggcacaatcgcctccttcctgtctaagtaccaggacatcatcatcgaacaccagaaggtggtgaagggcaaccagaagagactggagagcctgcgggagctggccggcaaggaaaacctggaataccctagcgtgaccctgccacctcagcctcacaccaaggagggcgttgatgcctacaacgaagtgatcgcccgggtgcgaatgtgggtgaacctgaacctgtggcagaagctgaagctaagcagagatgatgccaagcctctgctgagactgaagggattcccttcctttcctctggtcgagagacaggccaacgaagtggactggtgggacatggtgtgtaacgtgaagaagctgatcaacgagaaaaaggaggatggcaaggtgttttggcagaatctggctggctacaagagacaggaagccctgagaccatacctgagcagcgaggaagatcggaagaagggaaagaaattcgctcggtaccagctgggcgacctgctgctgcacctggaaaagaagcacggcgaggactggggaaaggtgtacgacgaggcctgggagcggattgacaagaaagtggaaggcctgagcaagcacatcaagctggaagaggaacggagaagcgaggacgcccagagcaaggccgccctgaccgactggctgcgggctaaggccagcttcgtgatcgagggcctgaaggaggccgacaaggacgagttctgcagatgcgagctgaagctgcagaagtggtacggggacctgcggggaaagcccttcgccatcgaagccgagaacagcatcctggacatcagcggcttcagcaagcagtacaactgtgccttcatctggcagaaggacggcgtgaagaagctgaacctgtacctgatcatcaactacttcaagggcggcaagctgcggttcaagaagatcaaacctgaagccttcgaagccaacagattctacaccgtgatcaacaaaaagagcggcgagatcgtgcccatggaggtgaacttcaacttcgacgaccccaacctgatcatcctgcctctggcctttggcaagagacagggcagagaattcatctggaacgacctgctgtccctggaaaccggcagcctgaagctggccaacggaagagtgatcgagaagacactgtacaacagaagaacccggcaggatgagcctgccctgttcgtggccctgaccttcgagcggcgggaggtcctggactcctccaatatcaaaccaatgaacctgatcggcgtggcaagaggcgaaaacatccccgccgtgatcgccctgaccgaccccgagggctgcccactgagccggtttaaggatagcctgggaaacccaacccacatcctgagaatcggcgagagctataaggagaagcagcggaccatccaggccaagaaggaggtggagcagcggagagccggcggctacagccggaagtacgccagcaaagccaagaatctggcagacgatatggtgagaaacaccgctagagatctgctgtactacgccgtgacccaggatgccatgctgatcttcgccaacctgagccggggcttcggccggcagggcaagcggaccttcatggccgagagacagtacacacggatggaggactggctgaccgccaagctggcctacgagggcctgagcaagacctacctgtccaagacactggcccagtacacctccaagacatgcagcaactgtgggtttaccatcaccagcgccgactacgacagggtgctggagaagctgaagaagacagcaacaggctggatgaccacaattaacggcaaggagctgaaggtggagggccagattacctactacaacagatacaagagacagaacgtagtcaaggacctgtccgtcgagctggatagactgagcgaagaatctgtgaacaacgacatctcctcctggacaaagggcagaagcggagaagctctgagcctcctgaagaaaagattctcccatagacccgtgcaggagaagttcgtgtgcctgaactgcggcttcgagacacacgcagccgagcaagccgccctgaacatcgccagatcctggctgttcctgcggagccaggagtacaagaaataccagacaaacaagacaaccggcaacaccgataagagagccttcgtcgagacctggcagtccttttaccggaagaagcttaaggaggtgtggaaacctgccgtgcggtctggcggatctggcggaggctccgagcccgtgaccttcaaggacgtggccgtggtgttcagcgaggaggagctgggcctgctggacagcgtgcagaggaagctgtacagggacgtgaccctggagaacttcaggaacctggtgagcgtgggccacctgttcagcaagcccgacgtgatcagccagctggagagggaggagcagctgtggatgaccgagatccagacccagaggggcggccacagcgccgagaactgcgccgccaggggcggcccaagcagcggcgcccctcctcccagcggcggcagcccagccggctccccaacctctaccgaggagggcacctctgagtccgccacccccgagagcggccctggcacctccaccgagcccagcgagggcagcgcacccggcagccctgccggcagccccacctccacagaggagggaaccagcaccgagcccagcgaaggcagcgccccaggcaccagcaccgagcctagtgagcaggagattaaacggatcaacaagatcagaagaagacttgtgaaagacagcaacaccaagaaggccggcaagacaggccccatgaaaaccctgctggttagagtgatgacacccgatctgagagagcggctggaaaacctgagaaagaagcctgaaaatatcccccagcccatcagcaatacatctagagccaacctgaataagctgctgaccgattacaccgaaatgaagaaggcgatcctgcatgtgtactgggaagagttccagaaggaccctgtgggcctgatgagccgggtggcccagcctgccagcaagaagatcgatcagaacaagctgaaacctgagatggacgagaagggcaacctgaccaccgccggctttgcctgctctcagtgtggccagcccctgttcgtgtacaagctggagcaggtgtctgagaagggcaaggcttacaccaactacttcggacggtgcaatgtggccgagcacgaaaagctgatcctgctggcccagctgaagcccgagaaggatagcgacgaagccgtgacatatagcctgggaaagtttgggcagagggccctggatttctacagcattcatgtgaccaaggagtccacccaccccgtgaagcccctggcccagatcgccggaaacagatacgcctccggacctgtgggaaaggccctgagcgacgcatgtatgggcacaatcgcctccttcctgtctaagtaccaggacatcatcatcgaacaccagaaggtggtgaagggcaaccagaagagactggagagcctgcgggagctggccggcaaggaaaacctggaataccctagcgtgaccctgccacctcagcctcacaccaaggagggcgttgatgcctacaacgaagtgatcgcccgggtgcgaatgtgggtgaacctgaacctgtggcagaagctgaagctaagcagagatgatgccaagcctctgctgagactgaagggattcccttcctttcctctggtcgagagacaggccaacgaagtggactggtgggacatggtgtgtaacgtgaagaagctgatcaacgagaaaaaggaggatggcaaggtgttttggcagaatctggctggctacaagagacaggaagccctgagaccatacctgagcagcgaggaagatcggaagaagggaaagaaattcgctcggtaccagctgggcgacctgctgctgcacctggaaaagaagcacggcgaggactggggaaaggtgtacgacgaggcctgggagcggattgacaagaaagtggaaggcctgagcaagcacatcaagctggaagaggaacggagaagcgaggacgcccagagcaaggccgccctgaccgactggctgcgggctaaggccagcttcgtgatcgagggcctgaaggaggccgacaaggacgagttctgcagatgcgagctgaagctgcagaagtggtacggggacctgcggggaaagcccttcgccatcgaagccgagaacagcatcctggacatcagcggcttcagcaagcagtacaactgtgccttcatctggcagaaggacggcgtgaagaagctgaacctgtacctgatcatcaactacttcaagggcggcaagctgcggttcaagaagatcaaacctgaagccttcgaagccaacagattctacaccgtgatcaacaaaaagagcggcgagatcgtgcccatggaggtgaacttcaacttcgacgaccccaacctgatcatcctgcctctggcctttggcaagagacagggcagagaattcatctggaacgacctgctgtccctggaaaccggcagcctgaagctggccaacggaagagtgatcgagaagacactgtacaacagaagaacccggcaggatgagcctgccctgttcgtggccctgaccttcgagcggcgggaggtcctggactcctccaatatcaaaccaatgaacctgatcggcgtggcaagaggcgaaaacatccccgccgtgatcgccctgaccgaccccgagggctgcccactgagccggtttaaggatagcctgggaaacccaacccacatcctgagaatcggcgagagctataaggagaagcagcggaccatccaggccaagaaggaggtggagcagcggagagccggcggctacagccggaagtacgccagcaaagccaagaatctggcagacgatatggtgagaaacaccgctagagatctgctgtactacgccgtgacccaggatgccatgctgatcttcgccaacctgagccggggcttcggccggcagggcaagcggaccttcatggccgagagacagtacacacggatggaggactggctgaccgccaagctggcctacgagggcctgagcaagacctacctgtccaagacactggcccagtacacctccaagacatgcagcaactgtgggtttaccatcaccagcgccgactacgacagggtgctggagaagctgaagaagacagcaacaggctggatgaccacaattaacggcaaggagctgaaggtggagggccagattacctactacaacagatacaagagacagaacgtagtcaaggacctgtccgtcgagctggatagactgagcgaagaatctgtgaacaacgacatctcctcctggacaaagggcagaagcggagaagctctgagcctcctgaagaaaagattctcccatagacccgtgcaggagaagttcgtgtgcctgaactgcggcttcgagacacacgcagccgagcaagccgccctgaacatcgccagatcctggctgttcctgcggagccaggagtacaagaaataccagacaaacaagacaaccggcaacaccgataagagagccttcgtcgagacctggcagtccttttaccggaagaagcttaaggaggtgtggaaacctgccgtgcggtctggcggatctggcggaggctcctgagcccgtgaccttcaaggacgtggccgtggtgttcagcgaggaggagctgggcctgctggacagcgtgcagaggaagctgtacagggacgtgaccctggagaacttcaggaacctggtgagcgtgggccacctgttcagcaagcccgacgtgatcagccagctggagagggaggagcagctgtggatgaccgagatccagacccagaggggcggccacagcgccgagaactgcgccgccaggggatctggctccggcagcggccccaagaaaaagagaaaagtctaagctgccttctgcggggcttgccttctggccatgcccttcttctctcccttgcacctgtacctcttggtctttgaataaagcctgagtaggaaggctagcaaaaaaaaaaaaaaaaaaaaaaaaaaaaaaaaaaaaaaaaaaaaaaaaaaaaaaaaaaaaaaaaaaaaaaaaaaaaaaaa

SEQ ID NO: 16569 - RNA, 9485 nt, synthetic construct
  source 1..9485: mol_type = other RNA
aggaaataagagagaaaagaagagtaagaagaaatataagagccaccatggcccctaagaagaagcgtaaagtgagccggatggaacgcctcgtctacgaggtgcggcagaagtgcagaaacatcgaggacatctgcatctcctgcggatctctgaacgtgaccctggagcacccactgttcatcggcggcatgtgccagaactgtaaaaactgttttctggagtgtgcctatcaatacgacgatgacggctaccagagctactgcaccatctgttgcggcggaagagaggtgctgatgtgtggaaataacaactgctgccggtgcttctgcgtggaatgcgtggacctgctggtgggccccggcgccgcccaggccgctattaaggaagatccttggaactgctacatgtgcggccacaagggcacatacggcctgctgagacggagagaggactggcctagcagactgcagatgttcttcgccaataaccacgaccaggagttcgacccccctaaggtgtaccctcccgtccccgccgagaagagaaagcccatccgggtcctgagcctgttcgatggcatcgccaccggtctgctggtgctgaaggacctgggcatccaggtggataggtacattgcctccgaggtgtgcgaggactccatcaccgtgggaatggtgcgtcatcagggcaagatcatgtacgtgggcgacgtgcggagcgtgacacagaagcatatccaggagtggggccctttcgacctggtgatcggcggcagcccttgcaatgacctgagcatcgtgaacccagcccggaagggcctgtacgagggaaccggcagactgttcttcgagttttacagactgctgcacgacgcccggcctaaggaaggcgacgaccggcccttcttttggctgttcgagaatgtggtggccatgggagtcagcgacaagcgggatattagccggttcctggagagcaaccccgtgatgatcgatgccaaggaagtgagcgccgcccaccgggccagatacttctggggcaatctgcctggcatgaacagacccctggccagcaccgtgaacgacaagctggagctgcaggagtgcctggagcacggccggatcgccaagttcagcaaggtgagaaccatcaccacccgaagcaacagcatcaaacaaggcaaggaccagcactttcctgtgttcatgaacgagaaggaggacatcctgtggtgtaccgagatggagagagtgttcgggttcccagtccactacacagatgtcagcaacatgtctagactggccagacagagactgctgggaagaagctggtccgtccctgtgatcagacacctgttcgcccctctgaaggagtacttcgcctgcgtgagcagcggcaacagcaacgccaacagccggggccccagcttctctagcggcctggtgccactgtccctgagagggagccacatgggccccatggagatctacaaaaccgtgagcgcctggaagcggcagcctgtgcgcgtgctgagcctgtttcggaatatcgataaagtcctgaaaagcctgggattcctggagagcggctctggctccggcggtggcaccctgaagtacgtggaggatgtgacaaacgtggtcagacgggatgtggagaagtggggccccttcgatctggtgtacggcagcacccaacccctgggcagctcttgtgaccggtgccctggctggtacatgtttcagttccaccggatcctgcagtacgccctgccgagacaggagtcccagcggccattcttttggattttcatggacaacttgctgctgaccgaggatgaccaggaaactaccactcggttcctgcagaccgaagccgtgaccctgcaggacgtgagaggccgggactaccagaacgccatgcgggtgtggtccaacatccctggactgaaaagcaagcacgcacctctgacccctaaagaagaggagtacctgcaggcccaggtgcggagcagaagcaagctggacgcccctaaggtggatctgctggtgaagaattgcctcctgcccctgagagagtacttcaagtatttcagccagaatagtctgcccctgggaggcagcggcggcggcgccctggtgacatttgaggacgtcgccgtgcggttcacccaggaggaatgggctctgctggatccttctcagaaaatcctgtaccgggacgtgatgagagagacataccggaatctgacctccgtgggcatcaactgggaatgttgggaccttgaagcctgcttcagaagcctgggaagaaacctgagagtgcaggtggtgaagagaaagtgcgagctgaccaacagcggcccctgcgccgagggcggcccaagcagcggcgcccctcctcccagcggcggcagcccagccggctccccaacctctaccgaggagggcacctctgagtccgccacccccgagagcggccctggcacctccaccgagcccagcgagggcagcgcacccggcagccctgccggcagccccacctccacagaggagggaaccagcaccgagcccagcgaaggcagcgccccaggcaccagcaccgagcctagtgagcaggagattaaacggatcaacaagatcagaagaagacttgtgaaagacagcaacaccaagaaggccggcaagacaggccccatgaaaaccctgctggttagagtgatgacacccgatctgagagagcggctggaaaacctgagaaagaagcctgaaaatatcccccagcccatcagcaatacatctagagccaacctgaataagctgctgaccgattacaccgaaatgaagaaggcgatcctgcatgtgtactgggaagagttccagaaggaccctgtgggcctgatgagccgggtggcccagcctgccagcaagaagatcgatcagaacaagctgaaacctgagatggacgagaagggcaacctgaccaccgccggctttgcctgctctcagtgtggccagcccctgttcgtgtacaagctggagcaggtgtctgagaagggcaaggcttacaccaactacttcggacggtgcaatgtggccgagcacgaaaagctgatcctgctggcccagctgaagcccgagaaggatagcgacgaagccgtgacatatagcctgggaaagtttgggcagagggccctggatttctacagcattcatgtgaccaaggagtccacccaccccgtgaagcccctggcccagatcgccggaaacagatacgcctccggacctgtgggaaaggccctgagcgacgcatgtatgggcacaatcgcctccttcctgtctaagtaccaggacatcatcatcgaacaccagaaggtggtgaagggcaaccagaagagactggagagcctgcgggagctggccggcaaggaaaacctggaataccctagcgtgaccctgccacctcagcctcacaccaaggagggcgttgatgcctacaacgaagtgatcgcccgggtgcgaatgtgggtgaacctgaacctgtggcagaagctgaagctaagcagagatgatgccaagcctctgctgagactgaagggattcccttcctttcctctggtcgagagacaggccaacgaagtggactggtgggacatggtgtgtaacgtgaagaagctgatcaacgagaaaaaggaggatggcaaggtgttttggcagaatctggctggctacaagagacaggaagccctgagaccatacctgagcagcgaggaagatcggaagaagggaaagaaattcgctcggtaccagctgggcgacctgctgctgcacctggaaaagaagcacggcgaggactggggaaaggtgtacgacgaggcctgggagcggattgacaagaaagtggaaggcctgagcaagcacatcaagctggaagaggaacggagaagcgaggacgcccagagcaaggccgccctgaccgactggctgcgggctaaggccagcttcgtgatcgagggcctgaaggaggccgacaaggacgagttctgcagatgcgagctgaagctgcagaagtggtacggggacctgcggggaaagcccttcgccatcgaagccgagaacagcatcctggacatcagcggcttcagcaagcagtacaactgtgccttcatctggcagaaggacggcgtgaagaagctgaacctgtacctgatcatcaactacttcaagggcggcaagctgcggttcaagaagatcaaacctgaagccttcgaagccaacagattctacaccgtgatcaacaaaaagagcggcgagatcgtgcccatggaggtgaacttcaacttcgacgaccccaacctgatcatcctgcctctggcctttggcaagagacagggcagagaattcatctggaacgacctgctgtccctggaaaccggcagcctgaagctggccaacggaagagtgatcgagaagacactgtacaacagaagaacccggcaggatgagcctgccctgttcgtggccctgaccttcgagcggcgggaggtcctggactcctccaatatcaaaccaatgaacctgatcggcgtggcaagaggcgaaaacatccccgccgtgatcgccctgaccgaccccgagggctgcccactgagccggtttaaggatagcctgggaaacccaacccacatcctgagaatcggcgagagctataaggagaagcagcggaccatccaggccaagaaggaggtggagcagcggagagccggcggctacagccggaagtacgccagcaaagccaagaatctggcagacgatatggtgagaaacaccgctagagatctgctgtactacgccgtgacccaggatgccatgctgatcttcgccaacctgagccggggcttcggccggcagggcaagcggaccttcatggccgagagacagtacacacggatggaggactggctgaccgccaagctggcctacgagggcctgagcaagacctacctgtccaagacactggcccagtacacctccaagacatgcagcaactgtgggtttaccatcaccagcgccgactacgacagggtgctggagaagctgaagaagacagcaacaggctggatgaccacaattaacggcaaggagctgaaggtggagggccagattacctactacaacagatacaagagacagaacgtagtcaaggacctgtccgtcgagctggatagactgagcgaagaatctgtgaacaacgacatctcctcctggacaaagggcagaagcggagaagctctgagcctcctgaagaaaagattctcccatagacccgtgcaggagaagttcgtgtgcctgaactgcggcttcgagacacacgcagccgagcaagccgccctgaacatcgccagatcctggctgttcctgcggagccaggagtacaagaaataccagacaaacaagacaaccggcaacaccgataagagagccttcgtcgagacctggcagtccttttaccggaagaagcttaaggaggtgtggaaacctgccgtgcggtctggcggatctggcggaggctccttccagggcctggtgaccttccaggacgtggccgtgatcttcagcctggacgagtggggccacctggaccccgcccagagggagctgtacagggaggtgatgctggagaactaccagaccctggcctgcctgggcctggccgtgagcaagcccgacgtgatcgcccagctggagcagggcggcgccccctggaagctggagaaggacatccccgccagcccctgccccggcgagcagtacgtgggcggcccaagcagcggcgcccctcctcccagcggcggcagcccagccggctccccaacctctaccgaggagggcacctctgagtccgccacccccgagagcggccctggcacctccaccgagcccagcgagggcagcgcacccggcagccctgccggcagccccacctccacagaggagggaaccagcaccgagcccagcgaaggcagcgccccaggcaccagcaccgagcctagtgagcaggagattaaacggatcaacaagatcagaagaagacttgtgaaagacagcaacaccaagaaggccggcaagacaggccccatgaaaaccctgctggttagagtgatgacacccgatctgagagagcggctggaaaacctgagaaagaagcctgaaaatatcccccagcccatcagcaatacatctagagccaacctgaataagctgctgaccgattacaccgaaatgaagaaggcgatcctgcatgtgtactgggaagagttccagaaggaccctgtgggcctgatgagccgggtggcccagcctgccagcaagaagatcgatcagaacaagctgaaacctgagatggacgagaagggcaacctgaccaccgccggctttgcctgctctcagtgtggccagcccctgttcgtgtacaagctggagcaggtgtctgagaagggcaaggcttacaccaactacttcggacggtgcaatgtggccgagcacgaaaagctgatcctgctggcccagctgaagcccgagaaggatagcgacgaagccgtgacatatagcctgggaaagtttgggcagagggccctggatttctacagcattcatgtgaccaaggagtccacccaccccgtgaagcccctggcccagatcgccggaaacagatacgcctccggacctgtgggaaaggccctgagcgacgcatgtatgggcacaatcgcctccttcctgtctaagtaccaggacatcatcatcgaacaccagaaggtggtgaagggcaaccagaagagactggagagcctgcgggagctggccggcaaggaaaacctggaataccctagcgtgaccctgccacctcagcctcacaccaaggagggcgttgatgcctacaacgaagtgatcgcccgggtgcgaatgtgggtgaacctgaacctgtggcagaagctgaagctaagcagagatgatgccaagcctctgctgagactgaagggattcccttcctttcctctggtcgagagacaggccaacgaagtggactggtgggacatggtgtgtaacgtgaagaagctgatcaacgagaaaaaggaggatggcaaggtgttttggcagaatctggctggctacaagagacaggaagccctgagaccatacctgagcagcgaggaagatcggaagaagggaaagaaattcgctcggtaccagctgggcgacctgctgctgcacctggaaaagaagcacggcgaggactggggaaaggtgtacgacgaggcctgggagcggattgacaagaaagtggaaggcctgagcaagcacatcaagctggaagaggaacggagaagcgaggacgcccagagcaaggccgccctgaccgactggctgcgggctaaggccagcttcgtgatcgagggcctgaaggaggccgacaaggacgagttctgcagatgcgagctgaagctgcagaagtggtacggggacctgcggggaaagcccttcgccatcgaagccgagaacagcatcctggacatcagcggcttcagcaagcagtacaactgtgccttcatctggcagaaggacggcgtgaagaagctgaacctgtacctgatcatcaactacttcaagggcggcaagctgcggttcaagaagatcaaacctgaagccttcgaagccaacagattctacaccgtgatcaacaaaaagagcggcgagatcgtgcccatggaggtgaacttcaacttcgacgaccccaacctgatcatcctgcctctggcctttggcaagagacagggcagagaattcatctggaacgacctgctgtccctggaaaccggcagcctgaagctggccaacggaagagtgatcgagaagacactgtacaacagaagaacccggcaggatgagcctgccctgttcgtggccctgaccttcgagcggcgggaggtcctggactcctccaatatcaaaccaatgaacctgatcggcgtggcaagaggcgaaaacatccccgccgtgatcgccctgaccgaccccgagggctgcccactgagccggtttaaggatagcctgggaaacccaacccacatcctgagaatcggcgagagctataaggagaagcagcggaccatccaggccaagaaggaggtggagcagcggagagccggcggctacagccggaagtacgccagcaaagccaagaatctggcagacgatatggtgagaaacaccgctagagatctgctgtactacgccgtgacccaggatgccatgctgatcttcgccaacctgagccggggcttcggccggcagggcaagcggaccttcatggccgagagacagtacacacggatggaggactggctgaccgccaagctggcctacgagggcctgagcaagacctacctgtccaagacactggcccagtacacctccaagacatgcagcaactgtgggtttaccatcaccagcgccgactacgacagggtgctggagaagctgaagaagacagcaacaggctggatgaccacaattaacggcaaggagctgaaggtggagggccagattacctactacaacagatacaagagacagaacgtagtcaaggacctgtccgtcgagctggatagactgagcgaagaatctgtgaacaacgacatctcctcctggacaaagggcagaagcggagaagctctgagcctcctgaagaaaagattctcccatagacccgtgcaggagaagttcgtgtgcctgaactgcggcttcgagacacacgcagccgagcaagccgccctgaacatcgccagatcctggctgttcctgcggagccaggagtacaagaaataccagacaaacaagacaaccggcaacaccgataagagagccttcgtcgagacctggcagtccttttaccggaagaagcttaaggaggtgtggaaacctgccgtgcggtctggcggatctggcggaggctcctttccagggcctggtgaccttccaggacgtggccgtgatcttcagcctggacgagtggggccacctggaccccgcccagagggagctgtacagggaggtgatgctggagaactaccagaccctggcctgcctgggcctggccgtgagcaagcccgacgtgatcgcccagctggagcagggcggcgccccctggaagctggagaaggacatccccgccagcccctgccccggcgagcagtacgtgggatctggctccggcagcggccccaagaaaaagagaaaagtctaagctgccttctgcggggcttgccttctggccatgcccttcttctctcccttgcacctgtacctcttggtctttgaataaagcctgagtaggaaggctagcaaaaaaaaaaaaaaaaaaaaaaaaaaaaaaaaaaaaaaaaaaaaaaaaaaaaaaaaaaaaaaaaaaaaaaaaaaaaaaaa

SEQ ID NO: 16570 - RNA, 9485 nt, synthetic construct
  source 1..9485: mol_type = other RNA
aggaaataagagagaaaagaagagtaagaagaaatataagagccaccatggcccctaagaagaagcgtaaagtgagccggatggaacgcctcgtctacgaggtgcggcagaagtgcagaaacatcgaggacatctgcatctcctgcggatctctgaacgtgaccctggagcacccactgttcatcggcggcatgtgccagaactgtaaaaactgttttctggagtgtgcctatcaatacgacgatgacggctaccagagctactgcaccatctgttgcggcggaagagaggtgctgatgtgtggaaataacaactgctgccggtgcttctgcgtggaatgcgtggacctgctggtgggccccggcgccgcccaggccgctattaaggaagatccttggaactgctacatgtgcggccacaagggcacatacggcctgctgagacggagagaggactggcctagcagactgcagatgttcttcgccaataaccacgaccaggagttcgacccccctaaggtgtaccctcccgtccccgccgagaagagaaagcccatccgggtcctgagcctgttcgatggcatcgccaccggtctgctggtgctgaaggacctgggcatccaggtggataggtacattgcctccgaggtgtgcgaggactccatcaccgtgggaatggtgcgtcatcagggcaagatcatgtacgtgggcgacgtgcggagcgtgacacagaagcatatccaggagtggggccctttcgacctggtgatcggcggcagcccttgcaatgacctgagcatcgtgaacccagcccggaagggcctgtacgagggaaccggcagactgttcttcgagttttacagactgctgcacgacgcccggcctaaggaaggcgacgaccggcccttcttttggctgttcgagaatgtggtggccatgggagtcagcgacaagcgggatattagccggttcctggagagcaaccccgtgatgatcgatgccaaggaagtgagcgccgcccaccgggccagatacttctggggcaatctgcctggcatgaacagacccctggccagcaccgtgaacgacaagctggagctgcaggagtgcctggagcacggccggatcgccaagttcagcaaggtgagaaccatcaccacccgaagcaacagcatcaaacaaggcaaggaccagcactttcctgtgttcatgaacgagaaggaggacatcctgtggtgtaccgagatggagagagtgttcgggttcccagtccactacacagatgtcagcaacatgtctagactggccagacagagactgctgggaagaagctggtccgtccctgtgatcagacacctgttcgcccctctgaaggagtacttcgcctgcgtgagcagcggcaacagcaacgccaacagccggggccccagcttctctagcggcctggtgccactgtccctgagagggagccacatgggccccatggagatctacaaaaccgtgagcgcctggaagcggcagcctgtgcgcgtgctgagcctgtttcggaatatcgataaagtcctgaaaagcctgggattcctggagagcggctctggctccggcggtggcaccctgaagtacgtggaggatgtgacaaacgtggtcagacgggatgtggagaagtggggccccttcgatctggtgtacggcagcacccaacccctgggcagctcttgtgaccggtgccctggctggtacatgtttcagttccaccggatcctgcagtacgccctgccgagacaggagtcccagcggccattcttttggattttcatggacaacttgctgctgaccgaggatgaccaggaaactaccactcggttcctgcagaccgaagccgtgaccctgcaggacgtgagaggccgggactaccagaacgccatgcgggtgtggtccaacatccctggactgaaaagcaagcacgcacctctgacccctaaagaagaggagtacctgcaggcccaggtgcggagcagaagcaagctggacgcccctaaggtggatctgctggtgaagaattgcctcctgcccctgagagagtacttcaagtatttcagccagaatagtctgcccctgggaggcagcggcggcggcgccctggtgacatttgaggacgtcgccgtgcggttcacccaggaggaatgggctctgctggatccttctcagaaaatcctgtaccgggacgtgatgagagagacataccggaatctgacctccgtgggcatcaactgggaatgttgggaccttgaagcctgcttcagaagcctgggaagaaacctgagagtgcaggtggtgaagagaaagtgcgagctgaccaacagcggcccctgcgccgagggcggcccaagcagcggcgcccctcctcccagcggcggcagcccagccggctccccaacctctaccgaggagggcacctctgagtccgccacccccgagagcggccctggcacctccaccgagcccagcgagggcagcgcacccggcagccctgccggcagccccacctccacagaggagggaaccagcaccgagcccagcgaaggcagcgccccaggcaccagcaccgagcctagtgagcaggagattaaacggatcaacaagatcagaagaagacttgtgaaagacagcaacaccaagaaggccggcaagacaggccccatgaaaaccctgctggttagagtgatgacacccgatctgagagagcggctggaaaacctgagaaagaagcctgaaaatatcccccagcccatcagcaatacatctagagccaacctgaataagctgctgaccgattacaccgaaatgaagaaggcgatcctgcatgtgtactgggaagagttccagaaggaccctgtgggcctgatgagccgggtggcccagcctgccagcaagaagatcgatcagaacaagctgaaacctgagatggacgagaagggcaacctgaccaccgccggctttgcctgctctcagtgtggccagcccctgttcgtgtacaagctggagcaggtgtctgagaagggcaaggcttacaccaactacttcggacggtgcaatgtggccgagcacgaaaagctgatcctgctggcccagctgaagcccgagaaggatagcgacgaagccgtgacatatagcctgggaaagtttgggcagagggccctggatttctacagcattcatgtgaccaaggagtccacccaccccgtgaagcccctggcccagatcgccggaaacagatacgcctccggacctgtgggaaaggccctgagcgacgcatgtatgggcacaatcgcctccttcctgtctaagtaccaggacatcatcatcgaacaccagaaggtggtgaagggcaaccagaagagactggagagcctgcgggagctggccggcaaggaaaacctggaataccctagcgtgaccctgccacctcagcctcacaccaaggagggcgttgatgcctacaacgaagtgatcgcccgggtgcgaatgtgggtgaacctgaacctgtggcagaagctgaagctaagcagagatgatgccaagcctctgctgagactgaagggattcccttcctttcctctggtcgagagacaggccaacgaagtggactggtgggacatggtgtgtaacgtgaagaagctgatcaacgagaaaaaggaggatggcaaggtgttttggcagaatctggctggctacaagagacaggaagccctgagaccatacctgagcagcgaggaagatcggaagaagggaaagaaattcgctcggtaccagctgggcgacctgctgctgcacctggaaaagaagcacggcgaggactggggaaaggtgtacgacgaggcctgggagcggattgacaagaaagtggaaggcctgagcaagcacatcaagctggaagaggaacggagaagcgaggacgcccagagcaaggccgccctgaccgactggctgcgggctaaggccagcttcgtgatcgagggcctgaaggaggccgacaaggacgagttctgcagatgcgagctgaagctgcagaagtggtacggggacctgcggggaaagcccttcgccatcgaagccgagaacagcatcctggacatcagcggcttcagcaagcagtacaactgtgccttcatctggcagaaggacggcgtgaagaagctgaacctgtacctgatcatcaactacttcaagggcggcaagctgcggttcaagaagatcaaacctgaagccttcgaagccaacagattctacaccgtgatcaacaaaaagagcggcgagatcgtgcccatggaggtgaacttcaacttcgacgaccccaacctgatcatcctgcctctggcctttggcaagagacagggcagagaattcatctggaacgacctgctgtccctggaaaccggcagcctgaagctggccaacggaagagtgatcgagaagacactgtacaacagaagaacccggcaggatgagcctgccctgttcgtggccctgaccttcgagcggcgggaggtcctggactcctccaatatcaaaccaatgaacctgatcggcgtggcaagaggcgaaaacatccccgccgtgatcgccctgaccgaccccgagggctgcccactgagccggtttaaggatagcctgggaaacccaacccacatcctgagaatcggcgagagctataaggagaagcagcggaccatccaggccaagaaggaggtggagcagcggagagccggcggctacagccggaagtacgccagcaaagccaagaatctggcagacgatatggtgagaaacaccgctagagatctgctgtactacgccgtgacccaggatgccatgctgatcttcgccaacctgagccggggcttcggccggcagggcaagcggaccttcatggccgagagacagtacacacggatggaggactggctgaccgccaagctggcctacgagggcctgagcaagacctacctgtccaagacactggcccagtacacctccaagacatgcagcaactgtgggtttaccatcaccagcgccgactacgacagggtgctggagaagctgaagaagacagcaacaggctggatgaccacaattaacggcaaggagctgaaggtggagggccagattacctactacaacagatacaagagacagaacgtagtcaaggacctgtccgtcgagctggatagactgagcgaagaatctgtgaacaacgacatctcctcctggacaaagggcagaagcggagaagctctgagcctcctgaagaaaagattctcccatagacccgtgcaggagaagttcgtgtgcctgaactgcggcttcgagacacacgcagccgagcaagccgccctgaacatcgccagatcctggctgttcctgcggagccaggagtacaagaaataccagacaaacaagacaaccggcaacaccgataagagagccttcgtcgagacctggcagtccttttaccggaagaagcttaaggaggtgtggaaacctgccgtgcggtctggcggatctggcggaggctccacccagggccaggtgaccttcagggacgtggccatcgagttcagccaggaggagtggacctgcctggaccccgcccagaggagcctgtacagggacgtgatgctggagaactacaggaacctggccagcctgggcatcagctgcttcgacctgagcatcatcagcatgctggagcagaggaaggagcccttcaccctggagagccaggtgcagatcgccggcaaccccgacggctgggagtggggcggcccaagcagcggcgcccctcctcccagcggcggcagcccagccggctccccaacctctaccgaggagggcacctctgagtccgccacccccgagagcggccctggcacctccaccgagcccagcgagggcagcgcacccggcagccctgccggcagccccacctccacagaggagggaaccagcaccgagcccagcgaaggcagcgccccaggcaccagcaccgagcctagtgagcaggagattaaacggatcaacaagatcagaagaagacttgtgaaagacagcaacaccaagaaggccggcaagacaggccccatgaaaaccctgctggttagagtgatgacacccgatctgagagagcggctggaaaacctgagaaagaagcctgaaaatatcccccagcccatcagcaatacatctagagccaacctgaataagctgctgaccgattacaccgaaatgaagaaggcgatcctgcatgtgtactgggaagagttccagaaggaccctgtgggcctgatgagccgggtggcccagcctgccagcaagaagatcgatcagaacaagctgaaacctgagatggacgagaagggcaacctgaccaccgccggctttgcctgctctcagtgtggccagcccctgttcgtgtacaagctggagcaggtgtctgagaagggcaaggcttacaccaactacttcggacggtgcaatgtggccgagcacgaaaagctgatcctgctggcccagctgaagcccgagaaggatagcgacgaagccgtgacatatagcctgggaaagtttgggcagagggccctggatttctacagcattcatgtgaccaaggagtccacccaccccgtgaagcccctggcccagatcgccggaaacagatacgcctccggacctgtgggaaaggccctgagcgacgcatgtatgggcacaatcgcctccttcctgtctaagtaccaggacatcatcatcgaacaccagaaggtggtgaagggcaaccagaagagactggagagcctgcgggagctggccggcaaggaaaacctggaataccctagcgtgaccctgccacctcagcctcacaccaaggagggcgttgatgcctacaacgaagtgatcgcccgggtgcgaatgtgggtgaacctgaacctgtggcagaagctgaagctaagcagagatgatgccaagcctctgctgagactgaagggattcccttcctttcctctggtcgagagacaggccaacgaagtggactggtgggacatggtgtgtaacgtgaagaagctgatcaacgagaaaaaggaggatggcaaggtgttttggcagaatctggctggctacaagagacaggaagccctgagaccatacctgagcagcgaggaagatcggaagaagggaaagaaattcgctcggtaccagctgggcgacctgctgctgcacctggaaaagaagcacggcgaggactggggaaaggtgtacgacgaggcctgggagcggattgacaagaaagtggaaggcctgagcaagcacatcaagctggaagaggaacggagaagcgaggacgcccagagcaaggccgccctgaccgactggctgcgggctaaggccagcttcgtgatcgagggcctgaaggaggccgacaaggacgagttctgcagatgcgagctgaagctgcagaagtggtacggggacctgcggggaaagcccttcgccatcgaagccgagaacagcatcctggacatcagcggcttcagcaagcagtacaactgtgccttcatctggcagaaggacggcgtgaagaagctgaacctgtacctgatcatcaactacttcaagggcggcaagctgcggttcaagaagatcaaacctgaagccttcgaagccaacagattctacaccgtgatcaacaaaaagagcggcgagatcgtgcccatggaggtgaacttcaacttcgacgaccccaacctgatcatcctgcctctggcctttggcaagagacagggcagagaattcatctggaacgacctgctgtccctggaaaccggcagcctgaagctggccaacggaagagtgatcgagaagacactgtacaacagaagaacccggcaggatgagcctgccctgttcgtggccctgaccttcgagcggcgggaggtcctggactcctccaatatcaaaccaatgaacctgatcggcgtggcaagaggcgaaaacatccccgccgtgatcgccctgaccgaccccgagggctgcccactgagccggtttaaggatagcctgggaaacccaacccacatcctgagaatcggcgagagctataaggagaagcagcggaccatccaggccaagaaggaggtggagcagcggagagccggcggctacagccggaagtacgccagcaaagccaagaatctggcagacgatatggtgagaaacaccgctagagatctgctgtactacgccgtgacccaggatgccatgctgatcttcgccaacctgagccggggcttcggccggcagggcaagcggaccttcatggccgagagacagtacacacggatggaggactggctgaccgccaagctggcctacgagggcctgagcaagacctacctgtccaagacactggcccagtacacctccaagacatgcagcaactgtgggtttaccatcaccagcgccgactacgacagggtgctggagaagctgaagaagacagcaacaggctggatgaccacaattaacggcaaggagctgaaggtggagggccagattacctactacaacagatacaagagacagaacgtagtcaaggacctgtccgtcgagctggatagactgagcgaagaatctgtgaacaacgacatctcctcctggacaaagggcagaagcggagaagctctgagcctcctgaagaaaagattctcccatagacccgtgcaggagaagttcgtgtgcctgaactgcggcttcgagacacacgcagccgagcaagccgccctgaacatcgccagatcctggctgttcctgcggagccaggagtacaagaaataccagacaaacaagacaaccggcaacaccgataagagagccttcgtcgagacctggcagtccttttaccggaagaagcttaaggaggtgtggaaacctgccgtgcggtctggcggatctggcggaggctcctacccagggccaggtgaccttcagggacgtggccatcgagttcagccaggaggagtggacctgcctggaccccgcccagaggagcctgtacagggacgtgatgctggagaactacaggaacctggccagcctgggcatcagctgcttcgacctgagcatcatcagcatgctggagcagaggaaggagcccttcaccctggagagccaggtgcagatcgccggcaaccccgacggctgggagtggggatctggctccggcagcggccccaagaaaaagagaaaagtctaagctgccttctgcggggcttgccttctggccatgcccttcttctctcccttgcacctgtacctcttggtctttgaataaagcctgagtaggaaggctagcaaaaaaaaaaaaaaaaaaaaaaaaaaaaaaaaaaaaaaaaaaaaaaaaaaaaaaaaaaaaaaaaaaaaaaaaaaaaaaaa

SEQ ID NO: 16571 - RNA, 9485 nt, synthetic construct
  source 1..9485: mol_type = other RNA
aggaaataagagagaaaagaagagtaagaagaaatataagagccaccatggcccctaagaagaagcgtaaagtgagccggatggaacgcctcgtctacgaggtgcggcagaagtgcagaaacatcgaggacatctgcatctcctgcggatctctgaacgtgaccctggagcacccactgttcatcggcggcatgtgccagaactgtaaaaactgttttctggagtgtgcctatcaatacgacgatgacggctaccagagctactgcaccatctgttgcggcggaagagaggtgctgatgtgtggaaataacaactgctgccggtgcttctgcgtggaatgcgtggacctgctggtgggccccggcgccgcccaggccgctattaaggaagatccttggaactgctacatgtgcggccacaagggcacatacggcctgctgagacggagagaggactggcctagcagactgcagatgttcttcgccaataaccacgaccaggagttcgacccccctaaggtgtaccctcccgtccccgccgagaagagaaagcccatccgggtcctgagcctgttcgatggcatcgccaccggtctgctggtgctgaaggacctgggcatccaggtggataggtacattgcctccgaggtgtgcgaggactccatcaccgtgggaatggtgcgtcatcagggcaagatcatgtacgtgggcgacgtgcggagcgtgacacagaagcatatccaggagtggggccctttcgacctggtgatcggcggcagcccttgcaatgacctgagcatcgtgaacccagcccggaagggcctgtacgagggaaccggcagactgttcttcgagttttacagactgctgcacgacgcccggcctaaggaaggcgacgaccggcccttcttttggctgttcgagaatgtggtggccatgggagtcagcgacaagcgggatattagccggttcctggagagcaaccccgtgatgatcgatgccaaggaagtgagcgccgcccaccgggccagatacttctggggcaatctgcctggcatgaacagacccctggccagcaccgtgaacgacaagctggagctgcaggagtgcctggagcacggccggatcgccaagttcagcaaggtgagaaccatcaccacccgaagcaacagcatcaaacaaggcaaggaccagcactttcctgtgttcatgaacgagaaggaggacatcctgtggtgtaccgagatggagagagtgttcgggttcccagtccactacacagatgtcagcaacatgtctagactggccagacagagactgctgggaagaagctggtccgtccctgtgatcagacacctgttcgcccctctgaaggagtacttcgcctgcgtgagcagcggcaacagcaacgccaacagccggggccccagcttctctagcggcctggtgccactgtccctgagagggagccacatgggccccatggagatctacaaaaccgtgagcgcctggaagcggcagcctgtgcgcgtgctgagcctgtttcggaatatcgataaagtcctgaaaagcctgggattcctggagagcggctctggctccggcggtggcaccctgaagtacgtggaggatgtgacaaacgtggtcagacgggatgtggagaagtggggccccttcgatctggtgtacggcagcacccaacccctgggcagctcttgtgaccggtgccctggctggtacatgtttcagttccaccggatcctgcagtacgccctgccgagacaggagtcccagcggccattcttttggattttcatggacaacttgctgctgaccgaggatgaccaggaaactaccactcggttcctgcagaccgaagccgtgaccctgcaggacgtgagaggccgggactaccagaacgccatgcgggtgtggtccaacatccctggactgaaaagcaagcacgcacctctgacccctaaagaagaggagtacctgcaggcccaggtgcggagcagaagcaagctggacgcccctaaggtggatctgctggtgaagaattgcctcctgcccctgagagagtacttcaagtatttcagccagaatagtctgcccctgggaggcagcggcggcggcgccctggtgacatttgaggacgtcgccgtgcggttcacccaggaggaatgggctctgctggatccttctcagaaaatcctgtaccgggacgtgatgagagagacataccggaatctgacctccgtgggcatcaactgggaatgttgggaccttgaagcctgcttcagaagcctgggaagaaacctgagagtgcaggtggtgaagagaaagtgcgagctgaccaacagcggcccctgcgccgagggcggcccaagcagcggcgcccctcctcccagcggcggcagcccagccggctccccaacctctaccgaggagggcacctctgagtccgccacccccgagagcggccctggcacctccaccgagcccagcgagggcagcgcacccggcagccctgccggcagccccacctccacagaggagggaaccagcaccgagcccagcgaaggcagcgccccaggcaccagcaccgagcctagtgagcaggagattaaacggatcaacaagatcagaagaagacttgtgaaagacagcaacaccaagaaggccggcaagacaggccccatgaaaaccctgctggttagagtgatgacacccgatctgagagagcggctggaaaacctgagaaagaagcctgaaaatatcccccagcccatcagcaatacatctagagccaacctgaataagctgctgaccgattacaccgaaatgaagaaggcgatcctgcatgtgtactgggaagagttccagaaggaccctgtgggcctgatgagccgggtggcccagcctgccagcaagaagatcgatcagaacaagctgaaacctgagatggacgagaagggcaacctgaccaccgccggctttgcctgctctcagtgtggccagcccctgttcgtgtacaagctggagcaggtgtctgagaagggcaaggcttacaccaactacttcggacggtgcaatgtggccgagcacgaaaagctgatcctgctggcccagctgaagcccgagaaggatagcgacgaagccgtgacatatagcctgggaaagtttgggcagagggccctggatttctacagcattcatgtgaccaaggagtccacccaccccgtgaagcccctggcccagatcgccggaaacagatacgcctccggacctgtgggaaaggccctgagcgacgcatgtatgggcacaatcgcctccttcctgtctaagtaccaggacatcatcatcgaacaccagaaggtggtgaagggcaaccagaagagactggagagcctgcgggagctggccggcaaggaaaacctggaataccctagcgtgaccctgccacctcagcctcacaccaaggagggcgttgatgcctacaacgaagtgatcgcccgggtgcgaatgtgggtgaacctgaacctgtggcagaagctgaagctaagcagagatgatgccaagcctctgctgagactgaagggattcccttcctttcctctggtcgagagacaggccaacgaagtggactggtgggacatggtgtgtaacgtgaagaagctgatcaacgagaaaaaggaggatggcaaggtgttttggcagaatctggctggctacaagagacaggaagccctgagaccatacctgagcagcgaggaagatcggaagaagggaaagaaattcgctcggtaccagctgggcgacctgctgctgcacctggaaaagaagcacggcgaggactggggaaaggtgtacgacgaggcctgggagcggattgacaagaaagtggaaggcctgagcaagcacatcaagctggaagaggaacggagaagcgaggacgcccagagcaaggccgccctgaccgactggctgcgggctaaggccagcttcgtgatcgagggcctgaaggaggccgacaaggacgagttctgcagatgcgagctgaagctgcagaagtggtacggggacctgcggggaaagcccttcgccatcgaagccgagaacagcatcctggacatcagcggcttcagcaagcagtacaactgtgccttcatctggcagaaggacggcgtgaagaagctgaacctgtacctgatcatcaactacttcaagggcggcaagctgcggttcaagaagatcaaacctgaagccttcgaagccaacagattctacaccgtgatcaacaaaaagagcggcgagatcgtgcccatggaggtgaacttcaacttcgacgaccccaacctgatcatcctgcctctggcctttggcaagagacagggcagagaattcatctggaacgacctgctgtccctggaaaccggcagcctgaagctggccaacggaagagtgatcgagaagacactgtacaacagaagaacccggcaggatgagcctgccctgttcgtggccctgaccttcgagcggcgggaggtcctggactcctccaatatcaaaccaatgaacctgatcggcgtggcaagaggcgaaaacatccccgccgtgatcgccctgaccgaccccgagggctgcccactgagccggtttaaggatagcctgggaaacccaacccacatcctgagaatcggcgagagctataaggagaagcagcggaccatccaggccaagaaggaggtggagcagcggagagccggcggctacagccggaagtacgccagcaaagccaagaatctggcagacgatatggtgagaaacaccgctagagatctgctgtactacgccgtgacccaggatgccatgctgatcttcgccaacctgagccggggcttcggccggcagggcaagcggaccttcatggccgagagacagtacacacggatggaggactggctgaccgccaagctggcctacgagggcctgagcaagacctacctgtccaagacactggcccagtacacctccaagacatgcagcaactgtgggtttaccatcaccagcgccgactacgacagggtgctggagaagctgaagaagacagcaacaggctggatgaccacaattaacggcaaggagctgaaggtggagggccagattacctactacaacagatacaagagacagaacgtagtcaaggacctgtccgtcgagctggatagactgagcgaagaatctgtgaacaacgacatctcctcctggacaaagggcagaagcggagaagctctgagcctcctgaagaaaagattctcccatagacccgtgcaggagaagttcgtgtgcctgaactgcggcttcgagacacacgcagccgagcaagccgccctgaacatcgccagatcctggctgttcctgcggagccaggagtacaagaaataccagacaaacaagacaaccggcaacaccgataagagagccttcgtcgagacctggcagtccttttaccggaagaagcttaaggaggtgtggaaacctgccgtgcggtctggcggatctggcggaggctccgacagggtgaagttcaccttcagcgacgtggccgtgtacttcagcgaggaggagtggcagctgctggaggagcagcagaaggagctgtacaggaacgtgatgaaggagaactacaccaccctgaccagcctgggctacaccaccgtgaagcccgacgtgatcagcaagatcgagcagggcaagcagcccagcgtgagcagccccagcggcagcaagggcaggagggccgtgggcaggcccaccggcggcccaagcagcggcgcccctcctcccagcggcggcagcccagccggctccccaacctctaccgaggagggcacctctgagtccgccacccccgagagcggccctggcacctccaccgagcccagcgagggcagcgcacccggcagccctgccggcagccccacctccacagaggagggaaccagcaccgagcccagcgaaggcagcgccccaggcaccagcaccgagcctagtgagcaggagattaaacggatcaacaagatcagaagaagacttgtgaaagacagcaacaccaagaaggccggcaagacaggccccatgaaaaccctgctggttagagtgatgacacccgatctgagagagcggctggaaaacctgagaaagaagcctgaaaatatcccccagcccatcagcaatacatctagagccaacctgaataagctgctgaccgattacaccgaaatgaagaaggcgatcctgcatgtgtactgggaagagttccagaaggaccctgtgggcctgatgagccgggtggcccagcctgccagcaagaagatcgatcagaacaagctgaaacctgagatggacgagaagggcaacctgaccaccgccggctttgcctgctctcagtgtggccagcccctgttcgtgtacaagctggagcaggtgtctgagaagggcaaggcttacaccaactacttcggacggtgcaatgtggccgagcacgaaaagctgatcctgctggcccagctgaagcccgagaaggatagcgacgaagccgtgacatatagcctgggaaagtttgggcagagggccctggatttctacagcattcatgtgaccaaggagtccacccaccccgtgaagcccctggcccagatcgccggaaacagatacgcctccggacctgtgggaaaggccctgagcgacgcatgtatgggcacaatcgcctccttcctgtctaagtaccaggacatcatcatcgaacaccagaaggtggtgaagggcaaccagaagagactggagagcctgcgggagctggccggcaaggaaaacctggaataccctagcgtgaccctgccacctcagcctcacaccaaggagggcgttgatgcctacaacgaagtgatcgcccgggtgcgaatgtgggtgaacctgaacctgtggcagaagctgaagctaagcagagatgatgccaagcctctgctgagactgaagggattcccttcctttcctctggtcgagagacaggccaacgaagtggactggtgggacatggtgtgtaacgtgaagaagctgatcaacgagaaaaaggaggatggcaaggtgttttggcagaatctggctggctacaagagacaggaagccctgagaccatacctgagcagcgaggaagatcggaagaagggaaagaaattcgctcggtaccagctgggcgacctgctgctgcacctggaaaagaagcacggcgaggactggggaaaggtgtacgacgaggcctgggagcggattgacaagaaagtggaaggcctgagcaagcacatcaagctggaagaggaacggagaagcgaggacgcccagagcaaggccgccctgaccgactggctgcgggctaaggccagcttcgtgatcgagggcctgaaggaggccgacaaggacgagttctgcagatgcgagctgaagctgcagaagtggtacggggacctgcggggaaagcccttcgccatcgaagccgagaacagcatcctggacatcagcggcttcagcaagcagtacaactgtgccttcatctggcagaaggacggcgtgaagaagctgaacctgtacctgatcatcaactacttcaagggcggcaagctgcggttcaagaagatcaaacctgaagccttcgaagccaacagattctacaccgtgatcaacaaaaagagcggcgagatcgtgcccatggaggtgaacttcaacttcgacgaccccaacctgatcatcctgcctctggcctttggcaagagacagggcagagaattcatctggaacgacctgctgtccctggaaaccggcagcctgaagctggccaacggaagagtgatcgagaagacactgtacaacagaagaacccggcaggatgagcctgccctgttcgtggccctgaccttcgagcggcgggaggtcctggactcctccaatatcaaaccaatgaacctgatcggcgtggcaagaggcgaaaacatccccgccgtgatcgccctgaccgaccccgagggctgcccactgagccggtttaaggatagcctgggaaacccaacccacatcctgagaatcggcgagagctataaggagaagcagcggaccatccaggccaagaaggaggtggagcagcggagagccggcggctacagccggaagtacgccagcaaagccaagaatctggcagacgatatggtgagaaacaccgctagagatctgctgtactacgccgtgacccaggatgccatgctgatcttcgccaacctgagccggggcttcggccggcagggcaagcggaccttcatggccgagagacagtacacacggatggaggactggctgaccgccaagctggcctacgagggcctgagcaagacctacctgtccaagacactggcccagtacacctccaagacatgcagcaactgtgggtttaccatcaccagcgccgactacgacagggtgctggagaagctgaagaagacagcaacaggctggatgaccacaattaacggcaaggagctgaaggtggagggccagattacctactacaacagatacaagagacagaacgtagtcaaggacctgtccgtcgagctggatagactgagcgaagaatctgtgaacaacgacatctcctcctggacaaagggcagaagcggagaagctctgagcctcctgaagaaaagattctcccatagacccgtgcaggagaagttcgtgtgcctgaactgcggcttcgagacacacgcagccgagcaagccgccctgaacatcgccagatcctggctgttcctgcggagccaggagtacaagaaataccagacaaacaagacaaccggcaacaccgataagagagccttcgtcgagacctggcagtccttttaccggaagaagcttaaggaggtgtggaaacctgccgtgcggtctggcggatctggcggaggctcctgacagggtgaagttcaccttcagcgacgtggccgtgtacttcagcgaggaggagtggcagctgctggaggagcagcagaaggagctgtacaggaacgtgatgaaggagaactacaccaccctgaccagcctgggctacaccaccgtgaagcccgacgtgatcagcaagatcgagcagggcaagcagcccagcgtgagcagccccagcggcagcaagggcaggagggccgtgggcaggcccaccggatctggctccggcagcggccccaagaaaaagagaaaagtctaagctgccttctgcggggcttgccttctggccatgcccttcttctctcccttgcacctgtacctcttggtctttgaataaagcctgagtaggaaggctagcaaaaaaaaaaaaaaaaaaaaaaaaaaaaaaaaaaaaaaaaaaaaaaaaaaaaaaaaaaaaaaaaaaaaaaaaaaaaaaaa

SEQ ID NO: 16572 - RNA, 9485 nt, synthetic construct
  source 1..9485: mol_type = other RNA
aggaaataagagagaaaagaagagtaagaagaaatataagagccaccatggcccctaagaagaagcgtaaagtgagccggatggaacgcctcgtctacgaggtgcggcagaagtgcagaaacatcgaggacatctgcatctcctgcggatctctgaacgtgaccctggagcacccactgttcatcggcggcatgtgccagaactgtaaaaactgttttctggagtgtgcctatcaatacgacgatgacggctaccagagctactgcaccatctgttgcggcggaagagaggtgctgatgtgtggaaataacaactgctgccggtgcttctgcgtggaatgcgtggacctgctggtgggccccggcgccgcccaggccgctattaaggaagatccttggaactgctacatgtgcggccacaagggcacatacggcctgctgagacggagagaggactggcctagcagactgcagatgttcttcgccaataaccacgaccaggagttcgacccccctaaggtgtaccctcccgtccccgccgagaagagaaagcccatccgggtcctgagcctgttcgatggcatcgccaccggtctgctggtgctgaaggacctgggcatccaggtggataggtacattgcctccgaggtgtgcgaggactccatcaccgtgggaatggtgcgtcatcagggcaagatcatgtacgtgggcgacgtgcggagcgtgacacagaagcatatccaggagtggggccctttcgacctggtgatcggcggcagcccttgcaatgacctgagcatcgtgaacccagcccggaagggcctgtacgagggaaccggcagactgttcttcgagttttacagactgctgcacgacgcccggcctaaggaaggcgacgaccggcccttcttttggctgttcgagaatgtggtggccatgggagtcagcgacaagcgggatattagccggttcctggagagcaaccccgtgatgatcgatgccaaggaagtgagcgccgcccaccgggccagatacttctggggcaatctgcctggcatgaacagacccctggccagcaccgtgaacgacaagctggagctgcaggagtgcctggagcacggccggatcgccaagttcagcaaggtgagaaccatcaccacccgaagcaacagcatcaaacaaggcaaggaccagcactttcctgtgttcatgaacgagaaggaggacatcctgtggtgtaccgagatggagagagtgttcgggttcccagtccactacacagatgtcagcaacatgtctagactggccagacagagactgctgggaagaagctggtccgtccctgtgatcagacacctgttcgcccctctgaaggagtacttcgcctgcgtgagcagcggcaacagcaacgccaacagccggggccccagcttctctagcggcctggtgccactgtccctgagagggagccacatgggccccatggagatctacaaaaccgtgagcgcctggaagcggcagcctgtgcgcgtgctgagcctgtttcggaatatcgataaagtcctgaaaagcctgggattcctggagagcggctctggctccggcggtggcaccctgaagtacgtggaggatgtgacaaacgtggtcagacgggatgtggagaagtggggccccttcgatctggtgtacggcagcacccaacccctgggcagctcttgtgaccggtgccctggctggtacatgtttcagttccaccggatcctgcagtacgccctgccgagacaggagtcccagcggccattcttttggattttcatggacaacttgctgctgaccgaggatgaccaggaaactaccactcggttcctgcagaccgaagccgtgaccctgcaggacgtgagaggccgggactaccagaacgccatgcgggtgtggtccaacatccctggactgaaaagcaagcacgcacctctgacccctaaagaagaggagtacctgcaggcccaggtgcggagcagaagcaagctggacgcccctaaggtggatctgctggtgaagaattgcctcctgcccctgagagagtacttcaagtatttcagccagaatagtctgcccctgggaggcagcggcggcggcgccctggtgacatttgaggacgtcgccgtgcggttcacccaggaggaatgggctctgctggatccttctcagaaaatcctgtaccgggacgtgatgagagagacataccggaatctgacctccgtgggcatcaactgggaatgttgggaccttgaagcctgcttcagaagcctgggaagaaacctgagagtgcaggtggtgaagagaaagtgcgagctgaccaacagcggcccctgcgccgagggcggcccaagcagcggcgcccctcctcccagcggcggcagcccagccggctccccaacctctaccgaggagggcacctctgagtccgccacccccgagagcggccctggcacctccaccgagcccagcgagggcagcgcacccggcagccctgccggcagccccacctccacagaggagggaaccagcaccgagcccagcgaaggcagcgccccaggcaccagcaccgagcctagtgagcaggagattaaacggatcaacaagatcagaagaagacttgtgaaagacagcaacaccaagaaggccggcaagacaggccccatgaaaaccctgctggttagagtgatgacacccgatctgagagagcggctggaaaacctgagaaagaagcctgaaaatatcccccagcccatcagcaatacatctagagccaacctgaataagctgctgaccgattacaccgaaatgaagaaggcgatcctgcatgtgtactgggaagagttccagaaggaccctgtgggcctgatgagccgggtggcccagcctgccagcaagaagatcgatcagaacaagctgaaacctgagatggacgagaagggcaacctgaccaccgccggctttgcctgctctcagtgtggccagcccctgttcgtgtacaagctggagcaggtgtctgagaagggcaaggcttacaccaactacttcggacggtgcaatgtggccgagcacgaaaagctgatcctgctggcccagctgaagcccgagaaggatagcgacgaagccgtgacatatagcctgggaaagtttgggcagagggccctggatttctacagcattcatgtgaccaaggagtccacccaccccgtgaagcccctggcccagatcgccggaaacagatacgcctccggacctgtgggaaaggccctgagcgacgcatgtatgggcacaatcgcctccttcctgtctaagtaccaggacatcatcatcgaacaccagaaggtggtgaagggcaaccagaagagactggagagcctgcgggagctggccggcaaggaaaacctggaataccctagcgtgaccctgccacctcagcctcacaccaaggagggcgttgatgcctacaacgaagtgatcgcccgggtgcgaatgtgggtgaacctgaacctgtggcagaagctgaagctaagcagagatgatgccaagcctctgctgagactgaagggattcccttcctttcctctggtcgagagacaggccaacgaagtggactggtgggacatggtgtgtaacgtgaagaagctgatcaacgagaaaaaggaggatggcaaggtgttttggcagaatctggctggctacaagagacaggaagccctgagaccatacctgagcagcgaggaagatcggaagaagggaaagaaattcgctcggtaccagctgggcgacctgctgctgcacctggaaaagaagcacggcgaggactggggaaaggtgtacgacgaggcctgggagcggattgacaagaaagtggaaggcctgagcaagcacatcaagctggaagaggaacggagaagcgaggacgcccagagcaaggccgccctgaccgactggctgcgggctaaggccagcttcgtgatcgagggcctgaaggaggccgacaaggacgagttctgcagatgcgagctgaagctgcagaagtggtacggggacctgcggggaaagcccttcgccatcgaagccgagaacagcatcctggacatcagcggcttcagcaagcagtacaactgtgccttcatctggcagaaggacggcgtgaagaagctgaacctgtacctgatcatcaactacttcaagggcggcaagctgcggttcaagaagatcaaacctgaagccttcgaagccaacagattctacaccgtgatcaacaaaaagagcggcgagatcgtgcccatggaggtgaacttcaacttcgacgaccccaacctgatcatcctgcctctggcctttggcaagagacagggcagagaattcatctggaacgacctgctgtccctggaaaccggcagcctgaagctggccaacggaagagtgatcgagaagacactgtacaacagaagaacccggcaggatgagcctgccctgttcgtggccctgaccttcgagcggcgggaggtcctggactcctccaatatcaaaccaatgaacctgatcggcgtggcaagaggcgaaaacatccccgccgtgatcgccctgaccgaccccgagggctgcccactgagccggtttaaggatagcctgggaaacccaacccacatcctgagaatcggcgagagctataaggagaagcagcggaccatccaggccaagaaggaggtggagcagcggagagccggcggctacagccggaagtacgccagcaaagccaagaatctggcagacgatatggtgagaaacaccgctagagatctgctgtactacgccgtgacccaggatgccatgctgatcttcgccaacctgagccggggcttcggccggcagggcaagcggaccttcatggccgagagacagtacacacggatggaggactggctgaccgccaagctggcctacgagggcctgagcaagacctacctgtccaagacactggcccagtacacctccaagacatgcagcaactgtgggtttaccatcaccagcgccgactacgacagggtgctggagaagctgaagaagacagcaacaggctggatgaccacaattaacggcaaggagctgaaggtggagggccagattacctactacaacagatacaagagacagaacgtagtcaaggacctgtccgtcgagctggatagactgagcgaagaatctgtgaacaacgacatctcctcctggacaaagggcagaagcggagaagctctgagcctcctgaagaaaagattctcccatagacccgtgcaggagaagttcgtgtgcctgaactgcggcttcgagacacacgcagccgagcaagccgccctgaacatcgccagatcctggctgttcctgcggagccaggagtacaagaaataccagacaaacaagacaaccggcaacaccgataagagagccttcgtcgagacctggcagtccttttaccggaagaagcttaaggaggtgtggaaacctgccgtgcggtctggcggatctggcggaggctccagccagcacctggtgaccttcgaggacgtggccgtgaacttcacccaggaggagtggaccctgctggaccagacccagagggacctgtacagggacgtgatgctggagaactaccagaacctgatggccctggccggcagcgagagctgcaagccccacgtgaacagccccctggagggcgccgaggagctgaggaccagggccaggaggatcctgcagagcgagttcatggccgagagcgacggcggcccaagcagcggcgcccctcctcccagcggcggcagcccagccggctccccaacctctaccgaggagggcacctctgagtccgccacccccgagagcggccctggcacctccaccgagcccagcgagggcagcgcacccggcagccctgccggcagccccacctccacagaggagggaaccagcaccgagcccagcgaaggcagcgccccaggcaccagcaccgagcctagtgagcaggagattaaacggatcaacaagatcagaagaagacttgtgaaagacagcaacaccaagaaggccggcaagacaggccccatgaaaaccctgctggttagagtgatgacacccgatctgagagagcggctggaaaacctgagaaagaagcctgaaaatatcccccagcccatcagcaatacatctagagccaacctgaataagctgctgaccgattacaccgaaatgaagaaggcgatcctgcatgtgtactgggaagagttccagaaggaccctgtgggcctgatgagccgggtggcccagcctgccagcaagaagatcgatcagaacaagctgaaacctgagatggacgagaagggcaacctgaccaccgccggctttgcctgctctcagtgtggccagcccctgttcgtgtacaagctggagcaggtgtctgagaagggcaaggcttacaccaactacttcggacggtgcaatgtggccgagcacgaaaagctgatcctgctggcccagctgaagcccgagaaggatagcgacgaagccgtgacatatagcctgggaaagtttgggcagagggccctggatttctacagcattcatgtgaccaaggagtccacccaccccgtgaagcccctggcccagatcgccggaaacagatacgcctccggacctgtgggaaaggccctgagcgacgcatgtatgggcacaatcgcctccttcctgtctaagtaccaggacatcatcatcgaacaccagaaggtggtgaagggcaaccagaagagactggagagcctgcgggagctggccggcaaggaaaacctggaataccctagcgtgaccctgccacctcagcctcacaccaaggagggcgttgatgcctacaacgaagtgatcgcccgggtgcgaatgtgggtgaacctgaacctgtggcagaagctgaagctaagcagagatgatgccaagcctctgctgagactgaagggattcccttcctttcctctggtcgagagacaggccaacgaagtggactggtgggacatggtgtgtaacgtgaagaagctgatcaacgagaaaaaggaggatggcaaggtgttttggcagaatctggctggctacaagagacaggaagccctgagaccatacctgagcagcgaggaagatcggaagaagggaaagaaattcgctcggtaccagctgggcgacctgctgctgcacctggaaaagaagcacggcgaggactggggaaaggtgtacgacgaggcctgggagcggattgacaagaaagtggaaggcctgagcaagcacatcaagctggaagaggaacggagaagcgaggacgcccagagcaaggccgccctgaccgactggctgcgggctaaggccagcttcgtgatcgagggcctgaaggaggccgacaaggacgagttctgcagatgcgagctgaagctgcagaagtggtacggggacctgcggggaaagcccttcgccatcgaagccgagaacagcatcctggacatcagcggcttcagcaagcagtacaactgtgccttcatctggcagaaggacggcgtgaagaagctgaacctgtacctgatcatcaactacttcaagggcggcaagctgcggttcaagaagatcaaacctgaagccttcgaagccaacagattctacaccgtgatcaacaaaaagagcggcgagatcgtgcccatggaggtgaacttcaacttcgacgaccccaacctgatcatcctgcctctggcctttggcaagagacagggcagagaattcatctggaacgacctgctgtccctggaaaccggcagcctgaagctggccaacggaagagtgatcgagaagacactgtacaacagaagaacccggcaggatgagcctgccctgttcgtggccctgaccttcgagcggcgggaggtcctggactcctccaatatcaaaccaatgaacctgatcggcgtggcaagaggcgaaaacatccccgccgtgatcgccctgaccgaccccgagggctgcccactgagccggtttaaggatagcctgggaaacccaacccacatcctgagaatcggcgagagctataaggagaagcagcggaccatccaggccaagaaggaggtggagcagcggagagccggcggctacagccggaagtacgccagcaaagccaagaatctggcagacgatatggtgagaaacaccgctagagatctgctgtactacgccgtgacccaggatgccatgctgatcttcgccaacctgagccggggcttcggccggcagggcaagcggaccttcatggccgagagacagtacacacggatggaggactggctgaccgccaagctggcctacgagggcctgagcaagacctacctgtccaagacactggcccagtacacctccaagacatgcagcaactgtgggtttaccatcaccagcgccgactacgacagggtgctggagaagctgaagaagacagcaacaggctggatgaccacaattaacggcaaggagctgaaggtggagggccagattacctactacaacagatacaagagacagaacgtagtcaaggacctgtccgtcgagctggatagactgagcgaagaatctgtgaacaacgacatctcctcctggacaaagggcagaagcggagaagctctgagcctcctgaagaaaagattctcccatagacccgtgcaggagaagttcgtgtgcctgaactgcggcttcgagacacacgcagccgagcaagccgccctgaacatcgccagatcctggctgttcctgcggagccaggagtacaagaaataccagacaaacaagacaaccggcaacaccgataagagagccttcgtcgagacctggcagtccttttaccggaagaagcttaaggaggtgtggaaacctgccgtgcggtctggcggatctggcggaggctcctagccagcacctggtgaccttcgaggacgtggccgtgaacttcacccaggaggagtggaccctgctggaccagacccagagggacctgtacagggacgtgatgctggagaactaccagaacctgatggccctggccggcagcgagagctgcaagccccacgtgaacagccccctggagggcgccgaggagctgaggaccagggccaggaggatcctgcagagcgagttcatggccgagagcgacggatctggctccggcagcggccccaagaaaaagagaaaagtctaagctgccttctgcggggcttgccttctggccatgcccttcttctctcccttgcacctgtacctcttggtctttgaataaagcctgagtaggaaggctagcaaaaaaaaaaaaaaaaaaaaaaaaaaaaaaaaaaaaaaaaaaaaaaaaaaaaaaaaaaaaaaaaaaaaaaaaaaaaaaaa

SEQ ID NO: 16573 - RNA, 9485 nt, synthetic construct
  source 1..9485: mol_type = other RNA
aggaaataagagagaaaagaagagtaagaagaaatataagagccaccatggcccctaagaagaagcgtaaagtgagccggatggaacgcctcgtctacgaggtgcggcagaagtgcagaaacatcgaggacatctgcatctcctgcggatctctgaacgtgaccctggagcacccactgttcatcggcggcatgtgccagaactgtaaaaactgttttctggagtgtgcctatcaatacgacgatgacggctaccagagctactgcaccatctgttgcggcggaagagaggtgctgatgtgtggaaataacaactgctgccggtgcttctgcgtggaatgcgtggacctgctggtgggccccggcgccgcccaggccgctattaaggaagatccttggaactgctacatgtgcggccacaagggcacatacggcctgctgagacggagagaggactggcctagcagactgcagatgttcttcgccaataaccacgaccaggagttcgacccccctaaggtgtaccctcccgtccccgccgagaagagaaagcccatccgggtcctgagcctgttcgatggcatcgccaccggtctgctggtgctgaaggacctgggcatccaggtggataggtacattgcctccgaggtgtgcgaggactccatcaccgtgggaatggtgcgtcatcagggcaagatcatgtacgtgggcgacgtgcggagcgtgacacagaagcatatccaggagtggggccctttcgacctggtgatcggcggcagcccttgcaatgacctgagcatcgtgaacccagcccggaagggcctgtacgagggaaccggcagactgttcttcgagttttacagactgctgcacgacgcccggcctaaggaaggcgacgaccggcccttcttttggctgttcgagaatgtggtggccatgggagtcagcgacaagcgggatattagccggttcctggagagcaaccccgtgatgatcgatgccaaggaagtgagcgccgcccaccgggccagatacttctggggcaatctgcctggcatgaacagacccctggccagcaccgtgaacgacaagctggagctgcaggagtgcctggagcacggccggatcgccaagttcagcaaggtgagaaccatcaccacccgaagcaacagcatcaaacaaggcaaggaccagcactttcctgtgttcatgaacgagaaggaggacatcctgtggtgtaccgagatggagagagtgttcgggttcccagtccactacacagatgtcagcaacatgtctagactggccagacagagactgctgggaagaagctggtccgtccctgtgatcagacacctgttcgcccctctgaaggagtacttcgcctgcgtgagcagcggcaacagcaacgccaacagccggggccccagcttctctagcggcctggtgccactgtccctgagagggagccacatgggccccatggagatctacaaaaccgtgagcgcctggaagcggcagcctgtgcgcgtgctgagcctgtttcggaatatcgataaagtcctgaaaagcctgggattcctggagagcggctctggctccggcggtggcaccctgaagtacgtggaggatgtgacaaacgtggtcagacgggatgtggagaagtggggccccttcgatctggtgtacggcagcacccaacccctgggcagctcttgtgaccggtgccctggctggtacatgtttcagttccaccggatcctgcagtacgccctgccgagacaggagtcccagcggccattcttttggattttcatggacaacttgctgctgaccgaggatgaccaggaaactaccactcggttcctgcagaccgaagccgtgaccctgcaggacgtgagaggccgggactaccagaacgccatgcgggtgtggtccaacatccctggactgaaaagcaagcacgcacctctgacccctaaagaagaggagtacctgcaggcccaggtgcggagcagaagcaagctggacgcccctaaggtggatctgctggtgaagaattgcctcctgcccctgagagagtacttcaagtatttcagccagaatagtctgcccctgggaggcagcggcggcggcgccctggtgacatttgaggacgtcgccgtgcggttcacccaggaggaatgggctctgctggatccttctcagaaaatcctgtaccgggacgtgatgagagagacataccggaatctgacctccgtgggcatcaactgggaatgttgggaccttgaagcctgcttcagaagcctgggaagaaacctgagagtgcaggtggtgaagagaaagtgcgagctgaccaacagcggcccctgcgccgagggcggcccaagcagcggcgcccctcctcccagcggcggcagcccagccggctccccaacctctaccgaggagggcacctctgagtccgccacccccgagagcggccctggcacctccaccgagcccagcgagggcagcgcacccggcagccctgccggcagccccacctccacagaggagggaaccagcaccgagcccagcgaaggcagcgccccaggcaccagcaccgagcctagtgagcaggagattaaacggatcaacaagatcagaagaagacttgtgaaagacagcaacaccaagaaggccggcaagacaggccccatgaaaaccctgctggttagagtgatgacacccgatctgagagagcggctggaaaacctgagaaagaagcctgaaaatatcccccagcccatcagcaatacatctagagccaacctgaataagctgctgaccgattacaccgaaatgaagaaggcgatcctgcatgtgtactgggaagagttccagaaggaccctgtgggcctgatgagccgggtggcccagcctgccagcaagaagatcgatcagaacaagctgaaacctgagatggacgagaagggcaacctgaccaccgccggctttgcctgctctcagtgtggccagcccctgttcgtgtacaagctggagcaggtgtctgagaagggcaaggcttacaccaactacttcggacggtgcaatgtggccgagcacgaaaagctgatcctgctggcccagctgaagcccgagaaggatagcgacgaagccgtgacatatagcctgggaaagtttgggcagagggccctggatttctacagcattcatgtgaccaaggagtccacccaccccgtgaagcccctggcccagatcgccggaaacagatacgcctccggacctgtgggaaaggccctgagcgacgcatgtatgggcacaatcgcctccttcctgtctaagtaccaggacatcatcatcgaacaccagaaggtggtgaagggcaaccagaagagactggagagcctgcgggagctggccggcaaggaaaacctggaataccctagcgtgaccctgccacctcagcctcacaccaaggagggcgttgatgcctacaacgaagtgatcgcccgggtgcgaatgtgggtgaacctgaacctgtggcagaagctgaagctaagcagagatgatgccaagcctctgctgagactgaagggattcccttcctttcctctggtcgagagacaggccaacgaagtggactggtgggacatggtgtgtaacgtgaagaagctgatcaacgagaaaaaggaggatggcaaggtgttttggcagaatctggctggctacaagagacaggaagccctgagaccatacctgagcagcgaggaagatcggaagaagggaaagaaattcgctcggtaccagctgggcgacctgctgctgcacctggaaaagaagcacggcgaggactggggaaaggtgtacgacgaggcctgggagcggattgacaagaaagtggaaggcctgagcaagcacatcaagctggaagaggaacggagaagcgaggacgcccagagcaaggccgccctgaccgactggctgcgggctaaggccagcttcgtgatcgagggcctgaaggaggccgacaaggacgagttctgcagatgcgagctgaagctgcagaagtggtacggggacctgcggggaaagcccttcgccatcgaagccgagaacagcatcctggacatcagcggcttcagcaagcagtacaactgtgccttcatctggcagaaggacggcgtgaagaagctgaacctgtacctgatcatcaactacttcaagggcggcaagctgcggttcaagaagatcaaacctgaagccttcgaagccaacagattctacaccgtgatcaacaaaaagagcggcgagatcgtgcccatggaggtgaacttcaacttcgacgaccccaacctgatcatcctgcctctggcctttggcaagagacagggcagagaattcatctggaacgacctgctgtccctggaaaccggcagcctgaagctggccaacggaagagtgatcgagaagacactgtacaacagaagaacccggcaggatgagcctgccctgttcgtggccctgaccttcgagcggcgggaggtcctggactcctccaatatcaaaccaatgaacctgatcggcgtggcaagaggcgaaaacatccccgccgtgatcgccctgaccgaccccgagggctgcccactgagccggtttaaggatagcctgggaaacccaacccacatcctgagaatcggcgagagctataaggagaagcagcggaccatccaggccaagaaggaggtggagcagcggagagccggcggctacagccggaagtacgccagcaaagccaagaatctggcagacgatatggtgagaaacaccgctagagatctgctgtactacgccgtgacccaggatgccatgctgatcttcgccaacctgagccggggcttcggccggcagggcaagcggaccttcatggccgagagacagtacacacggatggaggactggctgaccgccaagctggcctacgagggcctgagcaagacctacctgtccaagacactggcccagtacacctccaagacatgcagcaactgtgggtttaccatcaccagcgccgactacgacagggtgctggagaagctgaagaagacagcaacaggctggatgaccacaattaacggcaaggagctgaaggtggagggccagattacctactacaacagatacaagagacagaacgtagtcaaggacctgtccgtcgagctggatagactgagcgaagaatctgtgaacaacgacatctcctcctggacaaagggcagaagcggagaagctctgagcctcctgaagaaaagattctcccatagacccgtgcaggagaagttcgtgtgcctgaactgcggcttcgagacacacgcagccgagcaagccgccctgaacatcgccagatcctggctgttcctgcggagccaggagtacaagaaataccagacaaacaagacaaccggcaacaccgataagagagccttcgtcgagacctggcagtccttttaccggaagaagcttaaggaggtgtggaaacctgccgtgcggtctggcggatctggcggaggctcctgcgagggcctggtgagcttcgaggacgtgaccatggacttcagcagggaggagtggcagcagctggaccccgcccagaggtgcctgtactgggacgtgatgctggagatctacagccacctgctgagcgtgggctaccacatccccaaccccgagatcatcagcaggatggagaagggcaagaagagctggatcaggggcgcccagctgccccaccagaggcacagggaggtggtgttcggcggcggcccaagcagcggcgcccctcctcccagcggcggcagcccagccggctccccaacctctaccgaggagggcacctctgagtccgccacccccgagagcggccctggcacctccaccgagcccagcgagggcagcgcacccggcagccctgccggcagccccacctccacagaggagggaaccagcaccgagcccagcgaaggcagcgccccaggcaccagcaccgagcctagtgagcaggagattaaacggatcaacaagatcagaagaagacttgtgaaagacagcaacaccaagaaggccggcaagacaggccccatgaaaaccctgctggttagagtgatgacacccgatctgagagagcggctggaaaacctgagaaagaagcctgaaaatatcccccagcccatcagcaatacatctagagccaacctgaataagctgctgaccgattacaccgaaatgaagaaggcgatcctgcatgtgtactgggaagagttccagaaggaccctgtgggcctgatgagccgggtggcccagcctgccagcaagaagatcgatcagaacaagctgaaacctgagatggacgagaagggcaacctgaccaccgccggctttgcctgctctcagtgtggccagcccctgttcgtgtacaagctggagcaggtgtctgagaagggcaaggcttacaccaactacttcggacggtgcaatgtggccgagcacgaaaagctgatcctgctggcccagctgaagcccgagaaggatagcgacgaagccgtgacatatagcctgggaaagtttgggcagagggccctggatttctacagcattcatgtgaccaaggagtccacccaccccgtgaagcccctggcccagatcgccggaaacagatacgcctccggacctgtgggaaaggccctgagcgacgcatgtatgggcacaatcgcctccttcctgtctaagtaccaggacatcatcatcgaacaccagaaggtggtgaagggcaaccagaagagactggagagcctgcgggagctggccggcaaggaaaacctggaataccctagcgtgaccctgccacctcagcctcacaccaaggagggcgttgatgcctacaacgaagtgatcgcccgggtgcgaatgtgggtgaacctgaacctgtggcagaagctgaagctaagcagagatgatgccaagcctctgctgagactgaagggattcccttcctttcctctggtcgagagacaggccaacgaagtggactggtgggacatggtgtgtaacgtgaagaagctgatcaacgagaaaaaggaggatggcaaggtgttttggcagaatctggctggctacaagagacaggaagccctgagaccatacctgagcagcgaggaagatcggaagaagggaaagaaattcgctcggtaccagctgggcgacctgctgctgcacctggaaaagaagcacggcgaggactggggaaaggtgtacgacgaggcctgggagcggattgacaagaaagtggaaggcctgagcaagcacatcaagctggaagaggaacggagaagcgaggacgcccagagcaaggccgccctgaccgactggctgcgggctaaggccagcttcgtgatcgagggcctgaaggaggccgacaaggacgagttctgcagatgcgagctgaagctgcagaagtggtacggggacctgcggggaaagcccttcgccatcgaagccgagaacagcatcctggacatcagcggcttcagcaagcagtacaactgtgccttcatctggcagaaggacggcgtgaagaagctgaacctgtacctgatcatcaactacttcaagggcggcaagctgcggttcaagaagatcaaacctgaagccttcgaagccaacagattctacaccgtgatcaacaaaaagagcggcgagatcgtgcccatggaggtgaacttcaacttcgacgaccccaacctgatcatcctgcctctggcctttggcaagagacagggcagagaattcatctggaacgacctgctgtccctggaaaccggcagcctgaagctggccaacggaagagtgatcgagaagacactgtacaacagaagaacccggcaggatgagcctgccctgttcgtggccctgaccttcgagcggcgggaggtcctggactcctccaatatcaaaccaatgaacctgatcggcgtggcaagaggcgaaaacatccccgccgtgatcgccctgaccgaccccgagggctgcccactgagccggtttaaggatagcctgggaaacccaacccacatcctgagaatcggcgagagctataaggagaagcagcggaccatccaggccaagaaggaggtggagcagcggagagccggcggctacagccggaagtacgccagcaaagccaagaatctggcagacgatatggtgagaaacaccgctagagatctgctgtactacgccgtgacccaggatgccatgctgatcttcgccaacctgagccggggcttcggccggcagggcaagcggaccttcatggccgagagacagtacacacggatggaggactggctgaccgccaagctggcctacgagggcctgagcaagacctacctgtccaagacactggcccagtacacctccaagacatgcagcaactgtgggtttaccatcaccagcgccgactacgacagggtgctggagaagctgaagaagacagcaacaggctggatgaccacaattaacggcaaggagctgaaggtggagggccagattacctactacaacagatacaagagacagaacgtagtcaaggacctgtccgtcgagctggatagactgagcgaagaatctgtgaacaacgacatctcctcctggacaaagggcagaagcggagaagctctgagcctcctgaagaaaagattctcccatagacccgtgcaggagaagttcgtgtgcctgaactgcggcttcgagacacacgcagccgagcaagccgccctgaacatcgccagatcctggctgttcctgcggagccaggagtacaagaaataccagacaaacaagacaaccggcaacaccgataagagagccttcgtcgagacctggcagtccttttaccggaagaagcttaaggaggtgtggaaacctgccgtgcggtctggcggatctggcggaggctccttgcgagggcctggtgagcttcgaggacgtgaccatggacttcagcagggaggagtggcagcagctggaccccgcccagaggtgcctgtactgggacgtgatgctggagatctacagccacctgctgagcgtgggctaccacatccccaaccccgagatcatcagcaggatggagaagggcaagaagagctggatcaggggcgcccagctgccccaccagaggcacagggaggtggtgttcggcggatctggctccggcagcggccccaagaaaaagagaaaagtctaagctgccttctgcggggcttgccttctggccatgcccttcttctctcccttgcacctgtacctcttggtctttgaataaagcctgagtaggaaggctagcaaaaaaaaaaaaaaaaaaaaaaaaaaaaaaaaaaaaaaaaaaaaaaaaaaaaaaaaaaaaaaaaaaaaaaaaaaaaaaaa

SEQ ID NO: 16574 - RNA, 9485 nt, synthetic construct
  source 1..9485: mol_type = other RNA
aggaaataagagagaaaagaagagtaagaagaaatataagagccaccatggcccctaagaagaagcgtaaagtgagccggatggaacgcctcgtctacgaggtgcggcagaagtgcagaaacatcgaggacatctgcatctcctgcggatctctgaacgtgaccctggagcacccactgttcatcggcggcatgtgccagaactgtaaaaactgttttctggagtgtgcctatcaatacgacgatgacggctaccagagctactgcaccatctgttgcggcggaagagaggtgctgatgtgtggaaataacaactgctgccggtgcttctgcgtggaatgcgtggacctgctggtgggccccggcgccgcccaggccgctattaaggaagatccttggaactgctacatgtgcggccacaagggcacatacggcctgctgagacggagagaggactggcctagcagactgcagatgttcttcgccaataaccacgaccaggagttcgacccccctaaggtgtaccctcccgtccccgccgagaagagaaagcccatccgggtcctgagcctgttcgatggcatcgccaccggtctgctggtgctgaaggacctgggcatccaggtggataggtacattgcctccgaggtgtgcgaggactccatcaccgtgggaatggtgcgtcatcagggcaagatcatgtacgtgggcgacgtgcggagcgtgacacagaagcatatccaggagtggggccctttcgacctggtgatcggcggcagcccttgcaatgacctgagcatcgtgaacccagcccggaagggcctgtacgagggaaccggcagactgttcttcgagttttacagactgctgcacgacgcccggcctaaggaaggcgacgaccggcccttcttttggctgttcgagaatgtggtggccatgggagtcagcgacaagcgggatattagccggttcctggagagcaaccccgtgatgatcgatgccaaggaagtgagcgccgcccaccgggccagatacttctggggcaatctgcctggcatgaacagacccctggccagcaccgtgaacgacaagctggagctgcaggagtgcctggagcacggccggatcgccaagttcagcaaggtgagaaccatcaccacccgaagcaacagcatcaaacaaggcaaggaccagcactttcctgtgttcatgaacgagaaggaggacatcctgtggtgtaccgagatggagagagtgttcgggttcccagtccactacacagatgtcagcaacatgtctagactggccagacagagactgctgggaagaagctggtccgtccctgtgatcagacacctgttcgcccctctgaaggagtacttcgcctgcgtgagcagcggcaacagcaacgccaacagccggggccccagcttctctagcggcctggtgccactgtccctgagagggagccacatgggccccatggagatctacaaaaccgtgagcgcctggaagcggcagcctgtgcgcgtgctgagcctgtttcggaatatcgataaagtcctgaaaagcctgggattcctggagagcggctctggctccggcggtggcaccctgaagtacgtggaggatgtgacaaacgtggtcagacgggatgtggagaagtggggccccttcgatctggtgtacggcagcacccaacccctgggcagctcttgtgaccggtgccctggctggtacatgtttcagttccaccggatcctgcagtacgccctgccgagacaggagtcccagcggccattcttttggattttcatggacaacttgctgctgaccgaggatgaccaggaaactaccactcggttcctgcagaccgaagccgtgaccctgcaggacgtgagaggccgggactaccagaacgccatgcgggtgtggtccaacatccctggactgaaaagcaagcacgcacctctgacccctaaagaagaggagtacctgcaggcccaggtgcggagcagaagcaagctggacgcccctaaggtggatctgctggtgaagaattgcctcctgcccctgagagagtacttcaagtatttcagccagaatagtctgcccctgggaggcagcggcggcggcgccctggtgacatttgaggacgtcgccgtgcggttcacccaggaggaatgggctctgctggatccttctcagaaaatcctgtaccgggacgtgatgagagagacataccggaatctgacctccgtgggcatcaactgggaatgttgggaccttgaagcctgcttcagaagcctgggaagaaacctgagagtgcaggtggtgaagagaaagtgcgagctgaccaacagcggcccctgcgccgagggcggcccaagcagcggcgcccctcctcccagcggcggcagcccagccggctccccaacctctaccgaggagggcacctctgagtccgccacccccgagagcggccctggcacctccaccgagcccagcgagggcagcgcacccggcagccctgccggcagccccacctccacagaggagggaaccagcaccgagcccagcgaaggcagcgccccaggcaccagcaccgagcctagtgagcaggagattaaacggatcaacaagatcagaagaagacttgtgaaagacagcaacaccaagaaggccggcaagacaggccccatgaaaaccctgctggttagagtgatgacacccgatctgagagagcggctggaaaacctgagaaagaagcctgaaaatatcccccagcccatcagcaatacatctagagccaacctgaataagctgctgaccgattacaccgaaatgaagaaggcgatcctgcatgtgtactgggaagagttccagaaggaccctgtgggcctgatgagccgggtggcccagcctgccagcaagaagatcgatcagaacaagctgaaacctgagatggacgagaagggcaacctgaccaccgccggctttgcctgctctcagtgtggccagcccctgttcgtgtacaagctggagcaggtgtctgagaagggcaaggcttacaccaactacttcggacggtgcaatgtggccgagcacgaaaagctgatcctgctggcccagctgaagcccgagaaggatagcgacgaagccgtgacatatagcctgggaaagtttgggcagagggccctggatttctacagcattcatgtgaccaaggagtccacccaccccgtgaagcccctggcccagatcgccggaaacagatacgcctccggacctgtgggaaaggccctgagcgacgcatgtatgggcacaatcgcctccttcctgtctaagtaccaggacatcatcatcgaacaccagaaggtggtgaagggcaaccagaagagactggagagcctgcgggagctggccggcaaggaaaacctggaataccctagcgtgaccctgccacctcagcctcacaccaaggagggcgttgatgcctacaacgaagtgatcgcccgggtgcgaatgtgggtgaacctgaacctgtggcagaagctgaagctaagcagagatgatgccaagcctctgctgagactgaagggattcccttcctttcctctggtcgagagacaggccaacgaagtggactggtgggacatggtgtgtaacgtgaagaagctgatcaacgagaaaaaggaggatggcaaggtgttttggcagaatctggctggctacaagagacaggaagccctgagaccatacctgagcagcgaggaagatcggaagaagggaaagaaattcgctcggtaccagctgggcgacctgctgctgcacctggaaaagaagcacggcgaggactggggaaaggtgtacgacgaggcctgggagcggattgacaagaaagtggaaggcctgagcaagcacatcaagctggaagaggaacggagaagcgaggacgcccagagcaaggccgccctgaccgactggctgcgggctaaggccagcttcgtgatcgagggcctgaaggaggccgacaaggacgagttctgcagatgcgagctgaagctgcagaagtggtacggggacctgcggggaaagcccttcgccatcgaagccgagaacagcatcctggacatcagcggcttcagcaagcagtacaactgtgccttcatctggcagaaggacggcgtgaagaagctgaacctgtacctgatcatcaactacttcaagggcggcaagctgcggttcaagaagatcaaacctgaagccttcgaagccaacagattctacaccgtgatcaacaaaaagagcggcgagatcgtgcccatggaggtgaacttcaacttcgacgaccccaacctgatcatcctgcctctggcctttggcaagagacagggcagagaattcatctggaacgacctgctgtccctggaaaccggcagcctgaagctggccaacggaagagtgatcgagaagacactgtacaacagaagaacccggcaggatgagcctgccctgttcgtggccctgaccttcgagcggcgggaggtcctggactcctccaatatcaaaccaatgaacctgatcggcgtggcaagaggcgaaaacatccccgccgtgatcgccctgaccgaccccgagggctgcccactgagccggtttaaggatagcctgggaaacccaacccacatcctgagaatcggcgagagctataaggagaagcagcggaccatccaggccaagaaggaggtggagcagcggagagccggcggctacagccggaagtacgccagcaaagccaagaatctggcagacgatatggtgagaaacaccgctagagatctgctgtactacgccgtgacccaggatgccatgctgatcttcgccaacctgagccggggcttcggccggcagggcaagcggaccttcatggccgagagacagtacacacggatggaggactggctgaccgccaagctggcctacgagggcctgagcaagacctacctgtccaagacactggcccagtacacctccaagacatgcagcaactgtgggtttaccatcaccagcgccgactacgacagggtgctggagaagctgaagaagacagcaacaggctggatgaccacaattaacggcaaggagctgaaggtggagggccagattacctactacaacagatacaagagacagaacgtagtcaaggacctgtccgtcgagctggatagactgagcgaagaatctgtgaacaacgacatctcctcctggacaaagggcagaagcggagaagctctgagcctcctgaagaaaagattctcccatagacccgtgcaggagaagttcgtgtgcctgaactgcggcttcgagacacacgcagccgagcaagccgccctgaacatcgccagatcctggctgttcctgcggagccaggagtacaagaaataccagacaaacaagacaaccggcaacaccgataagagagccttcgtcgagacctggcagtccttttaccggaagaagcttaaggaggtgtggaaacctgccgtgcggtctggcggatctggcggaggctccttccaggagcccgtgaccttcgaggacgtggccgtgtacttcacccagaacgagtgggccagcctgcaccccacccagagggccctgtacagggaggtgatgctggagaactacgccaacgtgaccagcctgagcgccttccccttccccaagcccgacctgatcttccagctggagcagggcgaggccgcctggggccccgacccctggaccctggccggcggcgaggccctgaggggcatgggcggcccaagcagcggcgcccctcctcccagcggcggcagcccagccggctccccaacctctaccgaggagggcacctctgagtccgccacccccgagagcggccctggcacctccaccgagcccagcgagggcagcgcacccggcagccctgccggcagccccacctccacagaggagggaaccagcaccgagcccagcgaaggcagcgccccaggcaccagcaccgagcctagtgagcaggagattaaacggatcaacaagatcagaagaagacttgtgaaagacagcaacaccaagaaggccggcaagacaggccccatgaaaaccctgctggttagagtgatgacacccgatctgagagagcggctggaaaacctgagaaagaagcctgaaaatatcccccagcccatcagcaatacatctagagccaacctgaataagctgctgaccgattacaccgaaatgaagaaggcgatcctgcatgtgtactgggaagagttccagaaggaccctgtgggcctgatgagccgggtggcccagcctgccagcaagaagatcgatcagaacaagctgaaacctgagatggacgagaagggcaacctgaccaccgccggctttgcctgctctcagtgtggccagcccctgttcgtgtacaagctggagcaggtgtctgagaagggcaaggcttacaccaactacttcggacggtgcaatgtggccgagcacgaaaagctgatcctgctggcccagctgaagcccgagaaggatagcgacgaagccgtgacatatagcctgggaaagtttgggcagagggccctggatttctacagcattcatgtgaccaaggagtccacccaccccgtgaagcccctggcccagatcgccggaaacagatacgcctccggacctgtgggaaaggccctgagcgacgcatgtatgggcacaatcgcctccttcctgtctaagtaccaggacatcatcatcgaacaccagaaggtggtgaagggcaaccagaagagactggagagcctgcgggagctggccggcaaggaaaacctggaataccctagcgtgaccctgccacctcagcctcacaccaaggagggcgttgatgcctacaacgaagtgatcgcccgggtgcgaatgtgggtgaacctgaacctgtggcagaagctgaagctaagcagagatgatgccaagcctctgctgagactgaagggattcccttcctttcctctggtcgagagacaggccaacgaagtggactggtgggacatggtgtgtaacgtgaagaagctgatcaacgagaaaaaggaggatggcaaggtgttttggcagaatctggctggctacaagagacaggaagccctgagaccatacctgagcagcgaggaagatcggaagaagggaaagaaattcgctcggtaccagctgggcgacctgctgctgcacctggaaaagaagcacggcgaggactggggaaaggtgtacgacgaggcctgggagcggattgacaagaaagtggaaggcctgagcaagcacatcaagctggaagaggaacggagaagcgaggacgcccagagcaaggccgccctgaccgactggctgcgggctaaggccagcttcgtgatcgagggcctgaaggaggccgacaaggacgagttctgcagatgcgagctgaagctgcagaagtggtacggggacctgcggggaaagcccttcgccatcgaagccgagaacagcatcctggacatcagcggcttcagcaagcagtacaactgtgccttcatctggcagaaggacggcgtgaagaagctgaacctgtacctgatcatcaactacttcaagggcggcaagctgcggttcaagaagatcaaacctgaagccttcgaagccaacagattctacaccgtgatcaacaaaaagagcggcgagatcgtgcccatggaggtgaacttcaacttcgacgaccccaacctgatcatcctgcctctggcctttggcaagagacagggcagagaattcatctggaacgacctgctgtccctggaaaccggcagcctgaagctggccaacggaagagtgatcgagaagacactgtacaacagaagaacccggcaggatgagcctgccctgttcgtggccctgaccttcgagcggcgggaggtcctggactcctccaatatcaaaccaatgaacctgatcggcgtggcaagaggcgaaaacatccccgccgtgatcgccctgaccgaccccgagggctgcccactgagccggtttaaggatagcctgggaaacccaacccacatcctgagaatcggcgagagctataaggagaagcagcggaccatccaggccaagaaggaggtggagcagcggagagccggcggctacagccggaagtacgccagcaaagccaagaatctggcagacgatatggtgagaaacaccgctagagatctgctgtactacgccgtgacccaggatgccatgctgatcttcgccaacctgagccggggcttcggccggcagggcaagcggaccttcatggccgagagacagtacacacggatggaggactggctgaccgccaagctggcctacgagggcctgagcaagacctacctgtccaagacactggcccagtacacctccaagacatgcagcaactgtgggtttaccatcaccagcgccgactacgacagggtgctggagaagctgaagaagacagcaacaggctggatgaccacaattaacggcaaggagctgaaggtggagggccagattacctactacaacagatacaagagacagaacgtagtcaaggacctgtccgtcgagctggatagactgagcgaagaatctgtgaacaacgacatctcctcctggacaaagggcagaagcggagaagctctgagcctcctgaagaaaagattctcccatagacccgtgcaggagaagttcgtgtgcctgaactgcggcttcgagacacacgcagccgagcaagccgccctgaacatcgccagatcctggctgttcctgcggagccaggagtacaagaaataccagacaaacaagacaaccggcaacaccgataagagagccttcgtcgagacctggcagtccttttaccggaagaagcttaaggaggtgtggaaacctgccgtgcggtctggcggatctggcggaggctcctttccaggagcccgtgaccttcgaggacgtggccgtgtacttcacccagaacgagtgggccagcctgcaccccacccagagggccctgtacagggaggtgatgctggagaactacgccaacgtgaccagcctgagcgccttccccttccccaagcccgacctgatcttccagctggagcagggcgaggccgcctggggccccgacccctggaccctggccggcggcgaggccctgaggggcatgggatctggctccggcagcggccccaagaaaaagagaaaagtctaagctgccttctgcggggcttgccttctggccatgcccttcttctctcccttgcacctgtacctcttggtctttgaataaagcctgagtaggaaggctagcaaaaaaaaaaaaaaaaaaaaaaaaaaaaaaaaaaaaaaaaaaaaaaaaaaaaaaaaaaaaaaaaaaaaaaaaaaaaaaaa

SEQ ID NO: 16575 - RNA, 9479 nt, synthetic construct
  source 1..9479: mol_type = other RNA
aggaaataagagagaaaagaagagtaagaagaaatataagagccaccatggcccctaagaagaagcgtaaagtgagccggatggaacgcctcgtctacgaggtgcggcagaagtgcagaaacatcgaggacatctgcatctcctgcggatctctgaacgtgaccctggagcacccactgttcatcggcggcatgtgccagaactgtaaaaactgttttctggagtgtgcctatcaatacgacgatgacggctaccagagctactgcaccatctgttgcggcggaagagaggtgctgatgtgtggaaataacaactgctgccggtgcttctgcgtggaatgcgtggacctgctggtgggccccggcgccgcccaggccgctattaaggaagatccttggaactgctacatgtgcggccacaagggcacatacggcctgctgagacggagagaggactggcctagcagactgcagatgttcttcgccaataaccacgaccaggagttcgacccccctaaggtgtaccctcccgtccccgccgagaagagaaagcccatccgggtcctgagcctgttcgatggcatcgccaccggtctgctggtgctgaaggacctgggcatccaggtggataggtacattgcctccgaggtgtgcgaggactccatcaccgtgggaatggtgcgtcatcagggcaagatcatgtacgtgggcgacgtgcggagcgtgacacagaagcatatccaggagtggggccctttcgacctggtgatcggcggcagcccttgcaatgacctgagcatcgtgaacccagcccggaagggcctgtacgagggaaccggcagactgttcttcgagttttacagactgctgcacgacgcccggcctaaggaaggcgacgaccggcccttcttttggctgttcgagaatgtggtggccatgggagtcagcgacaagcgggatattagccggttcctggagagcaaccccgtgatgatcgatgccaaggaagtgagcgccgcccaccgggccagatacttctggggcaatctgcctggcatgaacagacccctggccagcaccgtgaacgacaagctggagctgcaggagtgcctggagcacggccggatcgccaagttcagcaaggtgagaaccatcaccacccgaagcaacagcatcaaacaaggcaaggaccagcactttcctgtgttcatgaacgagaaggaggacatcctgtggtgtaccgagatggagagagtgttcgggttcccagtccactacacagatgtcagcaacatgtctagactggccagacagagactgctgggaagaagctggtccgtccctgtgatcagacacctgttcgcccctctgaaggagtacttcgcctgcgtgagcagcggcaacagcaacgccaacagccggggccccagcttctctagcggcctggtgccactgtccctgagagggagccacatgggccccatggagatctacaaaaccgtgagcgcctggaagcggcagcctgtgcgcgtgctgagcctgtttcggaatatcgataaagtcctgaaaagcctgggattcctggagagcggctctggctccggcggtggcaccctgaagtacgtggaggatgtgacaaacgtggtcagacgggatgtggagaagtggggccccttcgatctggtgtacggcagcacccaacccctgggcagctcttgtgaccggtgccctggctggtacatgtttcagttccaccggatcctgcagtacgccctgccgagacaggagtcccagcggccattcttttggattttcatggacaacttgctgctgaccgaggatgaccaggaaactaccactcggttcctgcagaccgaagccgtgaccctgcaggacgtgagaggccgggactaccagaacgccatgcgggtgtggtccaacatccctggactgaaaagcaagcacgcacctctgacccctaaagaagaggagtacctgcaggcccaggtgcggagcagaagcaagctggacgcccctaaggtggatctgctggtgaagaattgcctcctgcccctgagagagtacttcaagtatttcagccagaatagtctgcccctgggaggcagcggcggcggcgccctggtgacatttgaggacgtcgccgtgcggttcacccaggaggaatgggctctgctggatccttctcagaaaatcctgtaccgggacgtgatgagagagacataccggaatctgacctccgtgggcatcaactgggaatgttgggaccttgaagcctgcttcagaagcctgggaagaaacctgagagtgcaggtggtgaagagaaagtgcgagctgaccaacagcggcccctgcgccgagggcggcccaagcagcggcgcccctcctcccagcggcggcagcccagccggctccccaacctctaccgaggagggcacctctgagtccgccacccccgagagcggccctggcacctccaccgagcccagcgagggcagcgcacccggcagccctgccggcagccccacctccacagaggagggaaccagcaccgagcccagcgaaggcagcgccccaggcaccagcaccgagcctagtgagcaggagattaaacggatcaacaagatcagaagaagacttgtgaaagacagcaacaccaagaaggccggcaagacaggccccatgaaaaccctgctggttagagtgatgacacccgatctgagagagcggctggaaaacctgagaaagaagcctgaaaatatcccccagcccatcagcaatacatctagagccaacctgaataagctgctgaccgattacaccgaaatgaagaaggcgatcctgcatgtgtactgggaagagttccagaaggaccctgtgggcctgatgagccgggtggcccagcctgccagcaagaagatcgatcagaacaagctgaaacctgagatggacgagaagggcaacctgaccaccgccggctttgcctgctctcagtgtggccagcccctgttcgtgtacaagctggagcaggtgtctgagaagggcaaggcttacaccaactacttcggacggtgcaatgtggccgagcacgaaaagctgatcctgctggcccagctgaagcccgagaaggatagcgacgaagccgtgacatatagcctgggaaagtttgggcagagggccctggatttctacagcattcatgtgaccaaggagtccacccaccccgtgaagcccctggcccagatcgccggaaacagatacgcctccggacctgtgggaaaggccctgagcgacgcatgtatgggcacaatcgcctccttcctgtctaagtaccaggacatcatcatcgaacaccagaaggtggtgaagggcaaccagaagagactggagagcctgcgggagctggccggcaaggaaaacctggaataccctagcgtgaccctgccacctcagcctcacaccaaggagggcgttgatgcctacaacgaagtgatcgcccgggtgcgaatgtgggtgaacctgaacctgtggcagaagctgaagctaagcagagatgatgccaagcctctgctgagactgaagggattcccttcctttcctctggtcgagagacaggccaacgaagtggactggtgggacatggtgtgtaacgtgaagaagctgatcaacgagaaaaaggaggatggcaaggtgttttggcagaatctggctggctacaagagacaggaagccctgagaccatacctgagcagcgaggaagatcggaagaagggaaagaaattcgctcggtaccagctgggcgacctgctgctgcacctggaaaagaagcacggcgaggactggggaaaggtgtacgacgaggcctgggagcggattgacaagaaagtggaaggcctgagcaagcacatcaagctggaagaggaacggagaagcgaggacgcccagagcaaggccgccctgaccgactggctgcgggctaaggccagcttcgtgatcgagggcctgaaggaggccgacaaggacgagttctgcagatgcgagctgaagctgcagaagtggtacggggacctgcggggaaagcccttcgccatcgaagccgagaacagcatcctggacatcagcggcttcagcaagcagtacaactgtgccttcatctggcagaaggacggcgtgaagaagctgaacctgtacctgatcatcaactacttcaagggcggcaagctgcggttcaagaagatcaaacctgaagccttcgaagccaacagattctacaccgtgatcaacaaaaagagcggcgagatcgtgcccatggaggtgaacttcaacttcgacgaccccaacctgatcatcctgcctctggcctttggcaagagacagggcagagaattcatctggaacgacctgctgtccctggaaaccggcagcctgaagctggccaacggaagagtgatcgagaagacactgtacaacagaagaacccggcaggatgagcctgccctgttcgtggccctgaccttcgagcggcgggaggtcctggactcctccaatatcaaaccaatgaacctgatcggcgtggcaagaggcgaaaacatccccgccgtgatcgccctgaccgaccccgagggctgcccactgagccggtttaaggatagcctgggaaacccaacccacatcctgagaatcggcgagagctataaggagaagcagcggaccatccaggccaagaaggaggtggagcagcggagagccggcggctacagccggaagtacgccagcaaagccaagaatctggcagacgatatggtgagaaacaccgctagagatctgctgtactacgccgtgacccaggatgccatgctgatcttcgccaacctgagccggggcttcggccggcagggcaagcggaccttcatggccgagagacagtacacacggatggaggactggctgaccgccaagctggcctacgagggcctgagcaagacctacctgtccaagacactggcccagtacacctccaagacatgcagcaactgtgggtttaccatcaccagcgccgactacgacagggtgctggagaagctgaagaagacagcaacaggctggatgaccacaattaacggcaaggagctgaaggtggagggccagattacctactacaacagatacaagagacagaacgtagtcaaggacctgtccgtcgagctggatagactgagcgaagaatctgtgaacaacgacatctcctcctggacaaagggcagaagcggagaagctctgagcctcctgaagaaaagattctcccatagacccgtgcaggagaagttcgtgtgcctgaactgcggcttcgagacacacgcagccgagcaagccgccctgaacatcgccagatcctggctgttcctgcggagccaggagtacaagaaataccagacaaacaagacaaccggcaacaccgataagagagccttcgtcgagacctggcagtccttttaccggaagaagcttaaggaggtgtggaaacctgccgtgcggtctggcggatctggcggaggctccaacatgagccaggccagcgtgagcttccaggacgtgaccgtggagttcaccagagaggagtggcagcacctgggccccgtggagagaaccctgtacagagacgtgatgctggagaactacagccacctgatcagcgtgggctactgcatcaccaagcccaaggtgatcagcaagctggagaagggcgaggagccctggagcctggaggacgagttcctgaaccagagataccccggctacggcggcccaagcagcggcgcccctcctcccagcggcggcagcccagccggctccccaacctctaccgaggagggcacctctgagtccgccacccccgagagcggccctggcacctccaccgagcccagcgagggcagcgcacccggcagccctgccggcagccccacctccacagaggagggaaccagcaccgagcccagcgaaggcagcgccccaggcaccagcaccgagcctagtgagcaggagattaaacggatcaacaagatcagaagaagacttgtgaaagacagcaacaccaagaaggccggcaagacaggccccatgaaaaccctgctggttagagtgatgacacccgatctgagagagcggctggaaaacctgagaaagaagcctgaaaatatcccccagcccatcagcaatacatctagagccaacctgaataagctgctgaccgattacaccgaaatgaagaaggcgatcctgcatgtgtactgggaagagttccagaaggaccctgtgggcctgatgagccgggtggcccagcctgccagcaagaagatcgatcagaacaagctgaaacctgagatggacgagaagggcaacctgaccaccgccggctttgcctgctctcagtgtggccagcccctgttcgtgtacaagctggagcaggtgtctgagaagggcaaggcttacaccaactacttcggacggtgcaatgtggccgagcacgaaaagctgatcctgctggcccagctgaagcccgagaaggatagcgacgaagccgtgacatatagcctgggaaagtttgggcagagggccctggatttctacagcattcatgtgaccaaggagtccacccaccccgtgaagcccctggcccagatcgccggaaacagatacgcctccggacctgtgggaaaggccctgagcgacgcatgtatgggcacaatcgcctccttcctgtctaagtaccaggacatcatcatcgaacaccagaaggtggtgaagggcaaccagaagagactggagagcctgcgggagctggccggcaaggaaaacctggaataccctagcgtgaccctgccacctcagcctcacaccaaggagggcgttgatgcctacaacgaagtgatcgcccgggtgcgaatgtgggtgaacctgaacctgtggcagaagctgaagctaagcagagatgatgccaagcctctgctgagactgaagggattcccttcctttcctctggtcgagagacaggccaacgaagtggactggtgggacatggtgtgtaacgtgaagaagctgatcaacgagaaaaaggaggatggcaaggtgttttggcagaatctggctggctacaagagacaggaagccctgagaccatacctgagcagcgaggaagatcggaagaagggaaagaaattcgctcggtaccagctgggcgacctgctgctgcacctggaaaagaagcacggcgaggactggggaaaggtgtacgacgaggcctgggagcggattgacaagaaagtggaaggcctgagcaagcacatcaagctggaagaggaacggagaagcgaggacgcccagagcaaggccgccctgaccgactggctgcgggctaaggccagcttcgtgatcgagggcctgaaggaggccgacaaggacgagttctgcagatgcgagctgaagctgcagaagtggtacggggacctgcggggaaagcccttcgccatcgaagccgagaacagcatcctggacatcagcggcttcagcaagcagtacaactgtgccttcatctggcagaaggacggcgtgaagaagctgaacctgtacctgatcatcaactacttcaagggcggcaagctgcggttcaagaagatcaaacctgaagccttcgaagccaacagattctacaccgtgatcaacaaaaagagcggcgagatcgtgcccatggaggtgaacttcaacttcgacgaccccaacctgatcatcctgcctctggcctttggcaagagacagggcagagaattcatctggaacgacctgctgtccctggaaaccggcagcctgaagctggccaacggaagagtgatcgagaagacactgtacaacagaagaacccggcaggatgagcctgccctgttcgtggccctgaccttcgagcggcgggaggtcctggactcctccaatatcaaaccaatgaacctgatcggcgtggcaagaggcgaaaacatccccgccgtgatcgccctgaccgaccccgagggctgcccactgagccggtttaaggatagcctgggaaacccaacccacatcctgagaatcggcgagagctataaggagaagcagcggaccatccaggccaagaaggaggtggagcagcggagagccggcggctacagccggaagtacgccagcaaagccaagaatctggcagacgatatggtgagaaacaccgctagagatctgctgtactacgccgtgacccaggatgccatgctgatcttcgccaacctgagccggggcttcggccggcagggcaagcggaccttcatggccgagagacagtacacacggatggaggactggctgaccgccaagctggcctacgagggcctgagcaagacctacctgtccaagacactggcccagtacacctccaagacatgcagcaactgtgggtttaccatcaccagcgccgactacgacagggtgctggagaagctgaagaagacagcaacaggctggatgaccacaattaacggcaaggagctgaaggtggagggccagattacctactacaacagatacaagagacagaacgtagtcaaggacctgtccgtcgagctggatagactgagcgaagaatctgtgaacaacgacatctcctcctggacaaagggcagaagcggagaagctctgagcctcctgaagaaaagattctcccatagacccgtgcaggagaagttcgtgtgcctgaactgcggcttcgagacacacgcagccgagcaagccgccctgaacatcgccagatcctggctgttcctgcggagccaggagtacaagaaataccagacaaacaagacaaccggcaacaccgataagagagccttcgtcgagacctggcagtccttttaccggaagaagcttaaggaggtgtggaaacctgccgtgcggtctggcggatctggcggaggctcctaacatgagccaggccagcgtgagcttccaggacgtgaccgtggagttcaccagagaggagtggcagcacctgggccccgtggagagaaccctgtacagagacgtgatgctggagaactacagccacctgatcagcgtgggctactgcatcaccaagcccaaggtgatcagcaagctggagaagggcgaggagccctggagcctggaggacgagttcctgaaccagagataccccggctacggatctggctccggcagcggccccaagaaaaagagaaaagtctaagctgccttctgcggggcttgccttctggccatgcccttcttctctcccttgcacctgtacctcttggtctttgaataaagcctgagtaggaaggctagcaaaaaaaaaaaaaaaaaaaaaaaaaaaaaaaaaaaaaaaaaaaaaaaaaaaaaaaaaaaaaaaaaaaaaaaaaaaaaaaa

SEQ ID NO: 16576 - RNA, 9485 nt, synthetic construct
  source 1..9485: mol_type = other RNA
aggaaataagagagaaaagaagagtaagaagaaatataagagccaccatggcccctaagaagaagcgtaaagtgagccggatggaacgcctcgtctacgaggtgcggcagaagtgcagaaacatcgaggacatctgcatctcctgcggatctctgaacgtgaccctggagcacccactgttcatcggcggcatgtgccagaactgtaaaaactgttttctggagtgtgcctatcaatacgacgatgacggctaccagagctactgcaccatctgttgcggcggaagagaggtgctgatgtgtggaaataacaactgctgccggtgcttctgcgtggaatgcgtggacctgctggtgggccccggcgccgcccaggccgctattaaggaagatccttggaactgctacatgtgcggccacaagggcacatacggcctgctgagacggagagaggactggcctagcagactgcagatgttcttcgccaataaccacgaccaggagttcgacccccctaaggtgtaccctcccgtccccgccgagaagagaaagcccatccgggtcctgagcctgttcgatggcatcgccaccggtctgctggtgctgaaggacctgggcatccaggtggataggtacattgcctccgaggtgtgcgaggactccatcaccgtgggaatggtgcgtcatcagggcaagatcatgtacgtgggcgacgtgcggagcgtgacacagaagcatatccaggagtggggccctttcgacctggtgatcggcggcagcccttgcaatgacctgagcatcgtgaacccagcccggaagggcctgtacgagggaaccggcagactgttcttcgagttttacagactgctgcacgacgcccggcctaaggaaggcgacgaccggcccttcttttggctgttcgagaatgtggtggccatgggagtcagcgacaagcgggatattagccggttcctggagagcaaccccgtgatgatcgatgccaaggaagtgagcgccgcccaccgggccagatacttctggggcaatctgcctggcatgaacagacccctggccagcaccgtgaacgacaagctggagctgcaggagtgcctggagcacggccggatcgccaagttcagcaaggtgagaaccatcaccacccgaagcaacagcatcaaacaaggcaaggaccagcactttcctgtgttcatgaacgagaaggaggacatcctgtggtgtaccgagatggagagagtgttcgggttcccagtccactacacagatgtcagcaacatgtctagactggccagacagagactgctgggaagaagctggtccgtccctgtgatcagacacctgttcgcccctctgaaggagtacttcgcctgcgtgagcagcggcaacagcaacgccaacagccggggccccagcttctctagcggcctggtgccactgtccctgagagggagccacatgggccccatggagatctacaaaaccgtgagcgcctggaagcggcagcctgtgcgcgtgctgagcctgtttcggaatatcgataaagtcctgaaaagcctgggattcctggagagcggctctggctccggcggtggcaccctgaagtacgtggaggatgtgacaaacgtggtcagacgggatgtggagaagtggggccccttcgatctggtgtacggcagcacccaacccctgggcagctcttgtgaccggtgccctggctggtacatgtttcagttccaccggatcctgcagtacgccctgccgagacaggagtcccagcggccattcttttggattttcatggacaacttgctgctgaccgaggatgaccaggaaactaccactcggttcctgcagaccgaagccgtgaccctgcaggacgtgagaggccgggactaccagaacgccatgcgggtgtggtccaacatccctggactgaaaagcaagcacgcacctctgacccctaaagaagaggagtacctgcaggcccaggtgcggagcagaagcaagctggacgcccctaaggtggatctgctggtgaagaattgcctcctgcccctgagagagtacttcaagtatttcagccagaatagtctgcccctgggaggcagcggcggcggcgccctggtgacatttgaggacgtcgccgtgcggttcacccaggaggaatgggctctgctggatccttctcagaaaatcctgtaccgggacgtgatgagagagacataccggaatctgacctccgtgggcatcaactgggaatgttgggaccttgaagcctgcttcagaagcctgggaagaaacctgagagtgcaggtggtgaagagaaagtgcgagctgaccaacagcggcccctgcgccgagggcggcccaagcagcggcgcccctcctcccagcggcggcagcccagccggctccccaacctctaccgaggagggcacctctgagtccgccacccccgagagcggccctggcacctccaccgagcccagcgagggcagcgcacccggcagccctgccggcagccccacctccacagaggagggaaccagcaccgagcccagcgaaggcagcgccccaggcaccagcaccgagcctagtgagcaggagattaaacggatcaacaagatcagaagaagacttgtgaaagacagcaacaccaagaaggccggcaagacaggccccatgaaaaccctgctggttagagtgatgacacccgatctgagagagcggctggaaaacctgagaaagaagcctgaaaatatcccccagcccatcagcaatacatctagagccaacctgaataagctgctgaccgattacaccgaaatgaagaaggcgatcctgcatgtgtactgggaagagttccagaaggaccctgtgggcctgatgagccgggtggcccagcctgccagcaagaagatcgatcagaacaagctgaaacctgagatggacgagaagggcaacctgaccaccgccggctttgcctgctctcagtgtggccagcccctgttcgtgtacaagctggagcaggtgtctgagaagggcaaggcttacaccaactacttcggacggtgcaatgtggccgagcacgaaaagctgatcctgctggcccagctgaagcccgagaaggatagcgacgaagccgtgacatatagcctgggaaagtttgggcagagggccctggatttctacagcattcatgtgaccaaggagtccacccaccccgtgaagcccctggcccagatcgccggaaacagatacgcctccggacctgtgggaaaggccctgagcgacgcatgtatgggcacaatcgcctccttcctgtctaagtaccaggacatcatcatcgaacaccagaaggtggtgaagggcaaccagaagagactggagagcctgcgggagctggccggcaaggaaaacctggaataccctagcgtgaccctgccacctcagcctcacaccaaggagggcgttgatgcctacaacgaagtgatcgcccgggtgcgaatgtgggtgaacctgaacctgtggcagaagctgaagctaagcagagatgatgccaagcctctgctgagactgaagggattcccttcctttcctctggtcgagagacaggccaacgaagtggactggtgggacatggtgtgtaacgtgaagaagctgatcaacgagaaaaaggaggatggcaaggtgttttggcagaatctggctggctacaagagacaggaagccctgagaccatacctgagcagcgaggaagatcggaagaagggaaagaaattcgctcggtaccagctgggcgacctgctgctgcacctggaaaagaagcacggcgaggactggggaaaggtgtacgacgaggcctgggagcggattgacaagaaagtggaaggcctgagcaagcacatcaagctggaagaggaacggagaagcgaggacgcccagagcaaggccgccctgaccgactggctgcgggctaaggccagcttcgtgatcgagggcctgaaggaggccgacaaggacgagttctgcagatgcgagctgaagctgcagaagtggtacggggacctgcggggaaagcccttcgccatcgaagccgagaacagcatcctggacatcagcggcttcagcaagcagtacaactgtgccttcatctggcagaaggacggcgtgaagaagctgaacctgtacctgatcatcaactacttcaagggcggcaagctgcggttcaagaagatcaaacctgaagccttcgaagccaacagattctacaccgtgatcaacaaaaagagcggcgagatcgtgcccatggaggtgaacttcaacttcgacgaccccaacctgatcatcctgcctctggcctttggcaagagacagggcagagaattcatctggaacgacctgctgtccctggaaaccggcagcctgaagctggccaacggaagagtgatcgagaagacactgtacaacagaagaacccggcaggatgagcctgccctgttcgtggccctgaccttcgagcggcgggaggtcctggactcctccaatatcaaaccaatgaacctgatcggcgtggcaagaggcgaaaacatccccgccgtgatcgccctgaccgaccccgagggctgcccactgagccggtttaaggatagcctgggaaacccaacccacatcctgagaatcggcgagagctataaggagaagcagcggaccatccaggccaagaaggaggtggagcagcggagagccggcggctacagccggaagtacgccagcaaagccaagaatctggcagacgatatggtgagaaacaccgctagagatctgctgtactacgccgtgacccaggatgccatgctgatcttcgccaacctgagccggggcttcggccggcagggcaagcggaccttcatggccgagagacagtacacacggatggaggactggctgaccgccaagctggcctacgagggcctgagcaagacctacctgtccaagacactggcccagtacacctccaagacatgcagcaactgtgggtttaccatcaccagcgccgactacgacagggtgctggagaagctgaagaagacagcaacaggctggatgaccacaattaacggcaaggagctgaaggtggagggccagattacctactacaacagatacaagagacagaacgtagtcaaggacctgtccgtcgagctggatagactgagcgaagaatctgtgaacaacgacatctcctcctggacaaagggcagaagcggagaagctctgagcctcctgaagaaaagattctcccatagacccgtgcaggagaagttcgtgtgcctgaactgcggcttcgagacacacgcagccgagcaagccgccctgaacatcgccagatcctggctgttcctgcggagccaggagtacaagaaataccagacaaacaagacaaccggcaacaccgataagagagccttcgtcgagacctggcagtccttttaccggaagaagcttaaggaggtgtggaaacctgccgtgcggtctggcggatctggcggaggctccctgaaggacctggtgaccttcaaggacgtggccatcgacttcagccaggaggagtggcagtggatgaaccccgcccagaagcacctgtacaggagcatgatgctggagaactaccagagcctggtgagcctgggcctgtgcatcagcaagccctacgtgatcagcctgctggagcagggcagggagccctgggagatgaccagcgagatgaccaggagccccttcagcgactgggagagcatcggcggcccaagcagcggcgcccctcctcccagcggcggcagcccagccggctccccaacctctaccgaggagggcacctctgagtccgccacccccgagagcggccctggcacctccaccgagcccagcgagggcagcgcacccggcagccctgccggcagccccacctccacagaggagggaaccagcaccgagcccagcgaaggcagcgccccaggcaccagcaccgagcctagtgagcaggagattaaacggatcaacaagatcagaagaagacttgtgaaagacagcaacaccaagaaggccggcaagacaggccccatgaaaaccctgctggttagagtgatgacacccgatctgagagagcggctggaaaacctgagaaagaagcctgaaaatatcccccagcccatcagcaatacatctagagccaacctgaataagctgctgaccgattacaccgaaatgaagaaggcgatcctgcatgtgtactgggaagagttccagaaggaccctgtgggcctgatgagccgggtggcccagcctgccagcaagaagatcgatcagaacaagctgaaacctgagatggacgagaagggcaacctgaccaccgccggctttgcctgctctcagtgtggccagcccctgttcgtgtacaagctggagcaggtgtctgagaagggcaaggcttacaccaactacttcggacggtgcaatgtggccgagcacgaaaagctgatcctgctggcccagctgaagcccgagaaggatagcgacgaagccgtgacatatagcctgggaaagtttgggcagagggccctggatttctacagcattcatgtgaccaaggagtccacccaccccgtgaagcccctggcccagatcgccggaaacagatacgcctccggacctgtgggaaaggccctgagcgacgcatgtatgggcacaatcgcctccttcctgtctaagtaccaggacatcatcatcgaacaccagaaggtggtgaagggcaaccagaagagactggagagcctgcgggagctggccggcaaggaaaacctggaataccctagcgtgaccctgccacctcagcctcacaccaaggagggcgttgatgcctacaacgaagtgatcgcccgggtgcgaatgtgggtgaacctgaacctgtggcagaagctgaagctaagcagagatgatgccaagcctctgctgagactgaagggattcccttcctttcctctggtcgagagacaggccaacgaagtggactggtgggacatggtgtgtaacgtgaagaagctgatcaacgagaaaaaggaggatggcaaggtgttttggcagaatctggctggctacaagagacaggaagccctgagaccatacctgagcagcgaggaagatcggaagaagggaaagaaattcgctcggtaccagctgggcgacctgctgctgcacctggaaaagaagcacggcgaggactggggaaaggtgtacgacgaggcctgggagcggattgacaagaaagtggaaggcctgagcaagcacatcaagctggaagaggaacggagaagcgaggacgcccagagcaaggccgccctgaccgactggctgcgggctaaggccagcttcgtgatcgagggcctgaaggaggccgacaaggacgagttctgcagatgcgagctgaagctgcagaagtggtacggggacctgcggggaaagcccttcgccatcgaagccgagaacagcatcctggacatcagcggcttcagcaagcagtacaactgtgccttcatctggcagaaggacggcgtgaagaagctgaacctgtacctgatcatcaactacttcaagggcggcaagctgcggttcaagaagatcaaacctgaagccttcgaagccaacagattctacaccgtgatcaacaaaaagagcggcgagatcgtgcccatggaggtgaacttcaacttcgacgaccccaacctgatcatcctgcctctggcctttggcaagagacagggcagagaattcatctggaacgacctgctgtccctggaaaccggcagcctgaagctggccaacggaagagtgatcgagaagacactgtacaacagaagaacccggcaggatgagcctgccctgttcgtggccctgaccttcgagcggcgggaggtcctggactcctccaatatcaaaccaatgaacctgatcggcgtggcaagaggcgaaaacatccccgccgtgatcgccctgaccgaccccgagggctgcccactgagccggtttaaggatagcctgggaaacccaacccacatcctgagaatcggcgagagctataaggagaagcagcggaccatccaggccaagaaggaggtggagcagcggagagccggcggctacagccggaagtacgccagcaaagccaagaatctggcagacgatatggtgagaaacaccgctagagatctgctgtactacgccgtgacccaggatgccatgctgatcttcgccaacctgagccggggcttcggccggcagggcaagcggaccttcatggccgagagacagtacacacggatggaggactggctgaccgccaagctggcctacgagggcctgagcaagacctacctgtccaagacactggcccagtacacctccaagacatgcagcaactgtgggtttaccatcaccagcgccgactacgacagggtgctggagaagctgaagaagacagcaacaggctggatgaccacaattaacggcaaggagctgaaggtggagggccagattacctactacaacagatacaagagacagaacgtagtcaaggacctgtccgtcgagctggatagactgagcgaagaatctgtgaacaacgacatctcctcctggacaaagggcagaagcggagaagctctgagcctcctgaagaaaagattctcccatagacccgtgcaggagaagttcgtgtgcctgaactgcggcttcgagacacacgcagccgagcaagccgccctgaacatcgccagatcctggctgttcctgcggagccaggagtacaagaaataccagacaaacaagacaaccggcaacaccgataagagagccttcgtcgagacctggcagtccttttaccggaagaagcttaaggaggtgtggaaacctgccgtgcggtctggcggatctggcggaggctcctctgaaggacctggtgaccttcaaggacgtggccatcgacttcagccaggaggagtggcagtggatgaaccccgcccagaagcacctgtacaggagcatgatgctggagaactaccagagcctggtgagcctgggcctgtgcatcagcaagccctacgtgatcagcctgctggagcagggcagggagccctgggagatgaccagcgagatgaccaggagccccttcagcgactgggagagcatcggatctggctccggcagcggccccaagaaaaagagaaaagtctaagctgccttctgcggggcttgccttctggccatgcccttcttctctcccttgcacctgtacctcttggtctttgaataaagcctgagtaggaaggctagcaaaaaaaaaaaaaaaaaaaaaaaaaaaaaaaaaaaaaaaaaaaaaaaaaaaaaaaaaaaaaaaaaaaaaaaaaaaaaaaa

SEQ ID NO: 16577 - RNA, 9485 nt, synthetic construct
  source 1..9485: mol_type = other RNA
aggaaataagagagaaaagaagagtaagaagaaatataagagccaccatggcccctaagaagaagcgtaaagtgagccggatggaacgcctcgtctacgaggtgcggcagaagtgcagaaacatcgaggacatctgcatctcctgcggatctctgaacgtgaccctggagcacccactgttcatcggcggcatgtgccagaactgtaaaaactgttttctggagtgtgcctatcaatacgacgatgacggctaccagagctactgcaccatctgttgcggcggaagagaggtgctgatgtgtggaaataacaactgctgccggtgcttctgcgtggaatgcgtggacctgctggtgggccccggcgccgcccaggccgctattaaggaagatccttggaactgctacatgtgcggccacaagggcacatacggcctgctgagacggagagaggactggcctagcagactgcagatgttcttcgccaataaccacgaccaggagttcgacccccctaaggtgtaccctcccgtccccgccgagaagagaaagcccatccgggtcctgagcctgttcgatggcatcgccaccggtctgctggtgctgaaggacctgggcatccaggtggataggtacattgcctccgaggtgtgcgaggactccatcaccgtgggaatggtgcgtcatcagggcaagatcatgtacgtgggcgacgtgcggagcgtgacacagaagcatatccaggagtggggccctttcgacctggtgatcggcggcagcccttgcaatgacctgagcatcgtgaacccagcccggaagggcctgtacgagggaaccggcagactgttcttcgagttttacagactgctgcacgacgcccggcctaaggaaggcgacgaccggcccttcttttggctgttcgagaatgtggtggccatgggagtcagcgacaagcgggatattagccggttcctggagagcaaccccgtgatgatcgatgccaaggaagtgagcgccgcccaccgggccagatacttctggggcaatctgcctggcatgaacagacccctggccagcaccgtgaacgacaagctggagctgcaggagtgcctggagcacggccggatcgccaagttcagcaaggtgagaaccatcaccacccgaagcaacagcatcaaacaaggcaaggaccagcactttcctgtgttcatgaacgagaaggaggacatcctgtggtgtaccgagatggagagagtgttcgggttcccagtccactacacagatgtcagcaacatgtctagactggccagacagagactgctgggaagaagctggtccgtccctgtgatcagacacctgttcgcccctctgaaggagtacttcgcctgcgtgagcagcggcaacagcaacgccaacagccggggccccagcttctctagcggcctggtgccactgtccctgagagggagccacatgggccccatggagatctacaaaaccgtgagcgcctggaagcggcagcctgtgcgcgtgctgagcctgtttcggaatatcgataaagtcctgaaaagcctgggattcctggagagcggctctggctccggcggtggcaccctgaagtacgtggaggatgtgacaaacgtggtcagacgggatgtggagaagtggggccccttcgatctggtgtacggcagcacccaacccctgggcagctcttgtgaccggtgccctggctggtacatgtttcagttccaccggatcctgcagtacgccctgccgagacaggagtcccagcggccattcttttggattttcatggacaacttgctgctgaccgaggatgaccaggaaactaccactcggttcctgcagaccgaagccgtgaccctgcaggacgtgagaggccgggactaccagaacgccatgcgggtgtggtccaacatccctggactgaaaagcaagcacgcacctctgacccctaaagaagaggagtacctgcaggcccaggtgcggagcagaagcaagctggacgcccctaaggtggatctgctggtgaagaattgcctcctgcccctgagagagtacttcaagtatttcagccagaatagtctgcccctgggaggcagcggcggcggcgccctggtgacatttgaggacgtcgccgtgcggttcacccaggaggaatgggctctgctggatccttctcagaaaatcctgtaccgggacgtgatgagagagacataccggaatctgacctccgtgggcatcaactgggaatgttgggaccttgaagcctgcttcagaagcctgggaagaaacctgagagtgcaggtggtgaagagaaagtgcgagctgaccaacagcggcccctgcgccgagggcggcccaagcagcggcgcccctcctcccagcggcggcagcccagccggctccccaacctctaccgaggagggcacctctgagtccgccacccccgagagcggccctggcacctccaccgagcccagcgagggcagcgcacccggcagccctgccggcagccccacctccacagaggagggaaccagcaccgagcccagcgaaggcagcgccccaggcaccagcaccgagcctagtgagcaggagattaaacggatcaacaagatcagaagaagacttgtgaaagacagcaacaccaagaaggccggcaagacaggccccatgaaaaccctgctggttagagtgatgacacccgatctgagagagcggctggaaaacctgagaaagaagcctgaaaatatcccccagcccatcagcaatacatctagagccaacctgaataagctgctgaccgattacaccgaaatgaagaaggcgatcctgcatgtgtactgggaagagttccagaaggaccctgtgggcctgatgagccgggtggcccagcctgccagcaagaagatcgatcagaacaagctgaaacctgagatggacgagaagggcaacctgaccaccgccggctttgcctgctctcagtgtggccagcccctgttcgtgtacaagctggagcaggtgtctgagaagggcaaggcttacaccaactacttcggacggtgcaatgtggccgagcacgaaaagctgatcctgctggcccagctgaagcccgagaaggatagcgacgaagccgtgacatatagcctgggaaagtttgggcagagggccctggatttctacagcattcatgtgaccaaggagtccacccaccccgtgaagcccctggcccagatcgccggaaacagatacgcctccggacctgtgggaaaggccctgagcgacgcatgtatgggcacaatcgcctccttcctgtctaagtaccaggacatcatcatcgaacaccagaaggtggtgaagggcaaccagaagagactggagagcctgcgggagctggccggcaaggaaaacctggaataccctagcgtgaccctgccacctcagcctcacaccaaggagggcgttgatgcctacaacgaagtgatcgcccgggtgcgaatgtgggtgaacctgaacctgtggcagaagctgaagctaagcagagatgatgccaagcctctgctgagactgaagggattcccttcctttcctctggtcgagagacaggccaacgaagtggactggtgggacatggtgtgtaacgtgaagaagctgatcaacgagaaaaaggaggatggcaaggtgttttggcagaatctggctggctacaagagacaggaagccctgagaccatacctgagcagcgaggaagatcggaagaagggaaagaaattcgctcggtaccagctgggcgacctgctgctgcacctggaaaagaagcacggcgaggactggggaaaggtgtacgacgaggcctgggagcggattgacaagaaagtggaaggcctgagcaagcacatcaagctggaagaggaacggagaagcgaggacgcccagagcaaggccgccctgaccgactggctgcgggctaaggccagcttcgtgatcgagggcctgaaggaggccgacaaggacgagttctgcagatgcgagctgaagctgcagaagtggtacggggacctgcggggaaagcccttcgccatcgaagccgagaacagcatcctggacatcagcggcttcagcaagcagtacaactgtgccttcatctggcagaaggacggcgtgaagaagctgaacctgtacctgatcatcaactacttcaagggcggcaagctgcggttcaagaagatcaaacctgaagccttcgaagccaacagattctacaccgtgatcaacaaaaagagcggcgagatcgtgcccatggaggtgaacttcaacttcgacgaccccaacctgatcatcctgcctctggcctttggcaagagacagggcagagaattcatctggaacgacctgctgtccctggaaaccggcagcctgaagctggccaacggaagagtgatcgagaagacactgtacaacagaagaacccggcaggatgagcctgccctgttcgtggccctgaccttcgagcggcgggaggtcctggactcctccaatatcaaaccaatgaacctgatcggcgtggcaagaggcgaaaacatccccgccgtgatcgccctgaccgaccccgagggctgcccactgagccggtttaaggatagcctgggaaacccaacccacatcctgagaatcggcgagagctataaggagaagcagcggaccatccaggccaagaaggaggtggagcagcggagagccggcggctacagccggaagtacgccagcaaagccaagaatctggcagacgatatggtgagaaacaccgctagagatctgctgtactacgccgtgacccaggatgccatgctgatcttcgccaacctgagccggggcttcggccggcagggcaagcggaccttcatggccgagagacagtacacacggatggaggactggctgaccgccaagctggcctacgagggcctgagcaagacctacctgtccaagacactggcccagtacacctccaagacatgcagcaactgtgggtttaccatcaccagcgccgactacgacagggtgctggagaagctgaagaagacagcaacaggctggatgaccacaattaacggcaaggagctgaaggtggagggccagattacctactacaacagatacaagagacagaacgtagtcaaggacctgtccgtcgagctggatagactgagcgaagaatctgtgaacaacgacatctcctcctggacaaagggcagaagcggagaagctctgagcctcctgaagaaaagattctcccatagacccgtgcaggagaagttcgtgtgcctgaactgcggcttcgagacacacgcagccgagcaagccgccctgaacatcgccagatcctggctgttcctgcggagccaggagtacaagaaataccagacaaacaagacaaccggcaacaccgataagagagccttcgtcgagacctggcagtccttttaccggaagaagcttaaggaggtgtggaaacctgccgtgcggtctggcggatctggcggaggctccatggacatggcccaggagcccgtgaccttcagggacgtggccatctacttcagcagggaggagtgggcctgcctggagcccagccagagggccctgtacagggacgtgatgctggacaacttcagcagcgtggccgccctgggcttctgcagccccaggcccgacctggtgagcaggctggagcagtgggaggagccctgggtggaggactgggagaggcccgagctgcaggccgtgcagaggggcggcccaagcagcggcgcccctcctcccagcggcggcagcccagccggctccccaacctctaccgaggagggcacctctgagtccgccacccccgagagcggccctggcacctccaccgagcccagcgagggcagcgcacccggcagccctgccggcagccccacctccacagaggagggaaccagcaccgagcccagcgaaggcagcgccccaggcaccagcaccgagcctagtgagcaggagattaaacggatcaacaagatcagaagaagacttgtgaaagacagcaacaccaagaaggccggcaagacaggccccatgaaaaccctgctggttagagtgatgacacccgatctgagagagcggctggaaaacctgagaaagaagcctgaaaatatcccccagcccatcagcaatacatctagagccaacctgaataagctgctgaccgattacaccgaaatgaagaaggcgatcctgcatgtgtactgggaagagttccagaaggaccctgtgggcctgatgagccgggtggcccagcctgccagcaagaagatcgatcagaacaagctgaaacctgagatggacgagaagggcaacctgaccaccgccggctttgcctgctctcagtgtggccagcccctgttcgtgtacaagctggagcaggtgtctgagaagggcaaggcttacaccaactacttcggacggtgcaatgtggccgagcacgaaaagctgatcctgctggcccagctgaagcccgagaaggatagcgacgaagccgtgacatatagcctgggaaagtttgggcagagggccctggatttctacagcattcatgtgaccaaggagtccacccaccccgtgaagcccctggcccagatcgccggaaacagatacgcctccggacctgtgggaaaggccctgagcgacgcatgtatgggcacaatcgcctccttcctgtctaagtaccaggacatcatcatcgaacaccagaaggtggtgaagggcaaccagaagagactggagagcctgcgggagctggccggcaaggaaaacctggaataccctagcgtgaccctgccacctcagcctcacaccaaggagggcgttgatgcctacaacgaagtgatcgcccgggtgcgaatgtgggtgaacctgaacctgtggcagaagctgaagctaagcagagatgatgccaagcctctgctgagactgaagggattcccttcctttcctctggtcgagagacaggccaacgaagtggactggtgggacatggtgtgtaacgtgaagaagctgatcaacgagaaaaaggaggatggcaaggtgttttggcagaatctggctggctacaagagacaggaagccctgagaccatacctgagcagcgaggaagatcggaagaagggaaagaaattcgctcggtaccagctgggcgacctgctgctgcacctggaaaagaagcacggcgaggactggggaaaggtgtacgacgaggcctgggagcggattgacaagaaagtggaaggcctgagcaagcacatcaagctggaagaggaacggagaagcgaggacgcccagagcaaggccgccctgaccgactggctgcgggctaaggccagcttcgtgatcgagggcctgaaggaggccgacaaggacgagttctgcagatgcgagctgaagctgcagaagtggtacggggacctgcggggaaagcccttcgccatcgaagccgagaacagcatcctggacatcagcggcttcagcaagcagtacaactgtgccttcatctggcagaaggacggcgtgaagaagctgaacctgtacctgatcatcaactacttcaagggcggcaagctgcggttcaagaagatcaaacctgaagccttcgaagccaacagattctacaccgtgatcaacaaaaagagcggcgagatcgtgcccatggaggtgaacttcaacttcgacgaccccaacctgatcatcctgcctctggcctttggcaagagacagggcagagaattcatctggaacgacctgctgtccctggaaaccggcagcctgaagctggccaacggaagagtgatcgagaagacactgtacaacagaagaacccggcaggatgagcctgccctgttcgtggccctgaccttcgagcggcgggaggtcctggactcctccaatatcaaaccaatgaacctgatcggcgtggcaagaggcgaaaacatccccgccgtgatcgccctgaccgaccccgagggctgcccactgagccggtttaaggatagcctgggaaacccaacccacatcctgagaatcggcgagagctataaggagaagcagcggaccatccaggccaagaaggaggtggagcagcggagagccggcggctacagccggaagtacgccagcaaagccaagaatctggcagacgatatggtgagaaacaccgctagagatctgctgtactacgccgtgacccaggatgccatgctgatcttcgccaacctgagccggggcttcggccggcagggcaagcggaccttcatggccgagagacagtacacacggatggaggactggctgaccgccaagctggcctacgagggcctgagcaagacctacctgtccaagacactggcccagtacacctccaagacatgcagcaactgtgggtttaccatcaccagcgccgactacgacagggtgctggagaagctgaagaagacagcaacaggctggatgaccacaattaacggcaaggagctgaaggtggagggccagattacctactacaacagatacaagagacagaacgtagtcaaggacctgtccgtcgagctggatagactgagcgaagaatctgtgaacaacgacatctcctcctggacaaagggcagaagcggagaagctctgagcctcctgaagaaaagattctcccatagacccgtgcaggagaagttcgtgtgcctgaactgcggcttcgagacacacgcagccgagcaagccgccctgaacatcgccagatcctggctgttcctgcggagccaggagtacaagaaataccagacaaacaagacaaccggcaacaccgataagagagccttcgtcgagacctggcagtccttttaccggaagaagcttaaggaggtgtggaaacctgccgtgcggtctggcggatctggcggaggctcctatggacatggcccaggagcccgtgaccttcagggacgtggccatctacttcagcagggaggagtgggcctgcctggagcccagccagagggccctgtacagggacgtgatgctggacaacttcagcagcgtggccgccctgggcttctgcagccccaggcccgacctggtgagcaggctggagcagtgggaggagccctgggtggaggactgggagaggcccgagctgcaggccgtgcagaggggatctggctccggcagcggccccaagaaaaagagaaaagtctaagctgccttctgcggggcttgccttctggccatgcccttcttctctcccttgcacctgtacctcttggtctttgaataaagcctgagtaggaaggctagcaaaaaaaaaaaaaaaaaaaaaaaaaaaaaaaaaaaaaaaaaaaaaaaaaaaaaaaaaaaaaaaaaaaaaaaaaaaaaaaa

SEQ ID NO: 16578 - RNA, 9485 nt, synthetic construct
  source 1..9485: mol_type = other RNA
aggaaataagagagaaaagaagagtaagaagaaatataagagccaccatggcccctaagaagaagcgtaaagtgagccggatggaacgcctcgtctacgaggtgcggcagaagtgcagaaacatcgaggacatctgcatctcctgcggatctctgaacgtgaccctggagcacccactgttcatcggcggcatgtgccagaactgtaaaaactgttttctggagtgtgcctatcaatacgacgatgacggctaccagagctactgcaccatctgttgcggcggaagagaggtgctgatgtgtggaaataacaactgctgccggtgcttctgcgtggaatgcgtggacctgctggtgggccccggcgccgcccaggccgctattaaggaagatccttggaactgctacatgtgcggccacaagggcacatacggcctgctgagacggagagaggactggcctagcagactgcagatgttcttcgccaataaccacgaccaggagttcgacccccctaaggtgtaccctcccgtccccgccgagaagagaaagcccatccgggtcctgagcctgttcgatggcatcgccaccggtctgctggtgctgaaggacctgggcatccaggtggataggtacattgcctccgaggtgtgcgaggactccatcaccgtgggaatggtgcgtcatcagggcaagatcatgtacgtgggcgacgtgcggagcgtgacacagaagcatatccaggagtggggccctttcgacctggtgatcggcggcagcccttgcaatgacctgagcatcgtgaacccagcccggaagggcctgtacgagggaaccggcagactgttcttcgagttttacagactgctgcacgacgcccggcctaaggaaggcgacgaccggcccttcttttggctgttcgagaatgtggtggccatgggagtcagcgacaagcgggatattagccggttcctggagagcaaccccgtgatgatcgatgccaaggaagtgagcgccgcccaccgggccagatacttctggggcaatctgcctggcatgaacagacccctggccagcaccgtgaacgacaagctggagctgcaggagtgcctggagcacggccggatcgccaagttcagcaaggtgagaaccatcaccacccgaagcaacagcatcaaacaaggcaaggaccagcactttcctgtgttcatgaacgagaaggaggacatcctgtggtgtaccgagatggagagagtgttcgggttcccagtccactacacagatgtcagcaacatgtctagactggccagacagagactgctgggaagaagctggtccgtccctgtgatcagacacctgttcgcccctctgaaggagtacttcgcctgcgtgagcagcggcaacagcaacgccaacagccggggccccagcttctctagcggcctggtgccactgtccctgagagggagccacatgggccccatggagatctacaaaaccgtgagcgcctggaagcggcagcctgtgcgcgtgctgagcctgtttcggaatatcgataaagtcctgaaaagcctgggattcctggagagcggctctggctccggcggtggcaccctgaagtacgtggaggatgtgacaaacgtggtcagacgggatgtggagaagtggggccccttcgatctggtgtacggcagcacccaacccctgggcagctcttgtgaccggtgccctggctggtacatgtttcagttccaccggatcctgcagtacgccctgccgagacaggagtcccagcggccattcttttggattttcatggacaacttgctgctgaccgaggatgaccaggaaactaccactcggttcctgcagaccgaagccgtgaccctgcaggacgtgagaggccgggactaccagaacgccatgcgggtgtggtccaacatccctggactgaaaagcaagcacgcacctctgacccctaaagaagaggagtacctgcaggcccaggtgcggagcagaagcaagctggacgcccctaaggtggatctgctggtgaagaattgcctcctgcccctgagagagtacttcaagtatttcagccagaatagtctgcccctgggaggcagcggcggcggcgccctggtgacatttgaggacgtcgccgtgcggttcacccaggaggaatgggctctgctggatccttctcagaaaatcctgtaccgggacgtgatgagagagacataccggaatctgacctccgtgggcatcaactgggaatgttgggaccttgaagcctgcttcagaagcctgggaagaaacctgagagtgcaggtggtgaagagaaagtgcgagctgaccaacagcggcccctgcgccgagggcggcccaagcagcggcgcccctcctcccagcggcggcagcccagccggctccccaacctctaccgaggagggcacctctgagtccgccacccccgagagcggccctggcacctccaccgagcccagcgagggcagcgcacccggcagccctgccggcagccccacctccacagaggagggaaccagcaccgagcccagcgaaggcagcgccccaggcaccagcaccgagcctagtgagcaggagattaaacggatcaacaagatcagaagaagacttgtgaaagacagcaacaccaagaaggccggcaagacaggccccatgaaaaccctgctggttagagtgatgacacccgatctgagagagcggctggaaaacctgagaaagaagcctgaaaatatcccccagcccatcagcaatacatctagagccaacctgaataagctgctgaccgattacaccgaaatgaagaaggcgatcctgcatgtgtactgggaagagttccagaaggaccctgtgggcctgatgagccgggtggcccagcctgccagcaagaagatcgatcagaacaagctgaaacctgagatggacgagaagggcaacctgaccaccgccggctttgcctgctctcagtgtggccagcccctgttcgtgtacaagctggagcaggtgtctgagaagggcaaggcttacaccaactacttcggacggtgcaatgtggccgagcacgaaaagctgatcctgctggcccagctgaagcccgagaaggatagcgacgaagccgtgacatatagcctgggaaagtttgggcagagggccctggatttctacagcattcatgtgaccaaggagtccacccaccccgtgaagcccctggcccagatcgccggaaacagatacgcctccggacctgtgggaaaggccctgagcgacgcatgtatgggcacaatcgcctccttcctgtctaagtaccaggacatcatcatcgaacaccagaaggtggtgaagggcaaccagaagagactggagagcctgcgggagctggccggcaaggaaaacctggaataccctagcgtgaccctgccacctcagcctcacaccaaggagggcgttgatgcctacaacgaagtgatcgcccgggtgcgaatgtgggtgaacctgaacctgtggcagaagctgaagctaagcagagatgatgccaagcctctgctgagactgaagggattcccttcctttcctctggtcgagagacaggccaacgaagtggactggtgggacatggtgtgtaacgtgaagaagctgatcaacgagaaaaaggaggatggcaaggtgttttggcagaatctggctggctacaagagacaggaagccctgagaccatacctgagcagcgaggaagatcggaagaagggaaagaaattcgctcggtaccagctgggcgacctgctgctgcacctggaaaagaagcacggcgaggactggggaaaggtgtacgacgaggcctgggagcggattgacaagaaagtggaaggcctgagcaagcacatcaagctggaagaggaacggagaagcgaggacgcccagagcaaggccgccctgaccgactggctgcgggctaaggccagcttcgtgatcgagggcctgaaggaggccgacaaggacgagttctgcagatgcgagctgaagctgcagaagtggtacggggacctgcggggaaagcccttcgccatcgaagccgagaacagcatcctggacatcagcggcttcagcaagcagtacaactgtgccttcatctggcagaaggacggcgtgaagaagctgaacctgtacctgatcatcaactacttcaagggcggcaagctgcggttcaagaagatcaaacctgaagccttcgaagccaacagattctacaccgtgatcaacaaaaagagcggcgagatcgtgcccatggaggtgaacttcaacttcgacgaccccaacctgatcatcctgcctctggcctttggcaagagacagggcagagaattcatctggaacgacctgctgtccctggaaaccggcagcctgaagctggccaacggaagagtgatcgagaagacactgtacaacagaagaacccggcaggatgagcctgccctgttcgtggccctgaccttcgagcggcgggaggtcctggactcctccaatatcaaaccaatgaacctgatcggcgtggcaagaggcgaaaacatccccgccgtgatcgccctgaccgaccccgagggctgcccactgagccggtttaaggatagcctgggaaacccaacccacatcctgagaatcggcgagagctataaggagaagcagcggaccatccaggccaagaaggaggtggagcagcggagagccggcggctacagccggaagtacgccagcaaagccaagaatctggcagacgatatggtgagaaacaccgctagagatctgctgtactacgccgtgacccaggatgccatgctgatcttcgccaacctgagccggggcttcggccggcagggcaagcggaccttcatggccgagagacagtacacacggatggaggactggctgaccgccaagctggcctacgagggcctgagcaagacctacctgtccaagacactggcccagtacacctccaagacatgcagcaactgtgggtttaccatcaccagcgccgactacgacagggtgctggagaagctgaagaagacagcaacaggctggatgaccacaattaacggcaaggagctgaaggtggagggccagattacctactacaacagatacaagagacagaacgtagtcaaggacctgtccgtcgagctggatagactgagcgaagaatctgtgaacaacgacatctcctcctggacaaagggcagaagcggagaagctctgagcctcctgaagaaaagattctcccatagacccgtgcaggagaagttcgtgtgcctgaactgcggcttcgagacacacgcagccgagcaagccgccctgaacatcgccagatcctggctgttcctgcggagccaggagtacaagaaataccagacaaacaagacaaccggcaacaccgataagagagccttcgtcgagacctggcagtccttttaccggaagaagcttaaggaggtgtggaaacctgccgtgcggtctggcggatctggcggaggctccatgggcctgctgaccttcagggacgtggccatcgagttcagcctggaggagtggcagtgcctggacaccgcccagaagaacctgtacaggaacgtgatgctggagaactacaggaacctggccttcctgggcgtggccgtgagcaagcccgacctgatcatctgcctggagaaggacaaggagccctggaacatgaagaggcacgagatggtggacgagccccccggcctgaccgtgagcaacggcggcccaagcagcggcgcccctcctcccagcggcggcagcccagccggctccccaacctctaccgaggagggcacctctgagtccgccacccccgagagcggccctggcacctccaccgagcccagcgagggcagcgcacccggcagccctgccggcagccccacctccacagaggagggaaccagcaccgagcccagcgaaggcagcgccccaggcaccagcaccgagcctagtgagcaggagattaaacggatcaacaagatcagaagaagacttgtgaaagacagcaacaccaagaaggccggcaagacaggccccatgaaaaccctgctggttagagtgatgacacccgatctgagagagcggctggaaaacctgagaaagaagcctgaaaatatcccccagcccatcagcaatacatctagagccaacctgaataagctgctgaccgattacaccgaaatgaagaaggcgatcctgcatgtgtactgggaagagttccagaaggaccctgtgggcctgatgagccgggtggcccagcctgccagcaagaagatcgatcagaacaagctgaaacctgagatggacgagaagggcaacctgaccaccgccggctttgcctgctctcagtgtggccagcccctgttcgtgtacaagctggagcaggtgtctgagaagggcaaggcttacaccaactacttcggacggtgcaatgtggccgagcacgaaaagctgatcctgctggcccagctgaagcccgagaaggatagcgacgaagccgtgacatatagcctgggaaagtttgggcagagggccctggatttctacagcattcatgtgaccaaggagtccacccaccccgtgaagcccctggcccagatcgccggaaacagatacgcctccggacctgtgggaaaggccctgagcgacgcatgtatgggcacaatcgcctccttcctgtctaagtaccaggacatcatcatcgaacaccagaaggtggtgaagggcaaccagaagagactggagagcctgcgggagctggccggcaaggaaaacctggaataccctagcgtgaccctgccacctcagcctcacaccaaggagggcgttgatgcctacaacgaagtgatcgcccgggtgcgaatgtgggtgaacctgaacctgtggcagaagctgaagctaagcagagatgatgccaagcctctgctgagactgaagggattcccttcctttcctctggtcgagagacaggccaacgaagtggactggtgggacatggtgtgtaacgtgaagaagctgatcaacgagaaaaaggaggatggcaaggtgttttggcagaatctggctggctacaagagacaggaagccctgagaccatacctgagcagcgaggaagatcggaagaagggaaagaaattcgctcggtaccagctgggcgacctgctgctgcacctggaaaagaagcacggcgaggactggggaaaggtgtacgacgaggcctgggagcggattgacaagaaagtggaaggcctgagcaagcacatcaagctggaagaggaacggagaagcgaggacgcccagagcaaggccgccctgaccgactggctgcgggctaaggccagcttcgtgatcgagggcctgaaggaggccgacaaggacgagttctgcagatgcgagctgaagctgcagaagtggtacggggacctgcggggaaagcccttcgccatcgaagccgagaacagcatcctggacatcagcggcttcagcaagcagtacaactgtgccttcatctggcagaaggacggcgtgaagaagctgaacctgtacctgatcatcaactacttcaagggcggcaagctgcggttcaagaagatcaaacctgaagccttcgaagccaacagattctacaccgtgatcaacaaaaagagcggcgagatcgtgcccatggaggtgaacttcaacttcgacgaccccaacctgatcatcctgcctctggcctttggcaagagacagggcagagaattcatctggaacgacctgctgtccctggaaaccggcagcctgaagctggccaacggaagagtgatcgagaagacactgtacaacagaagaacccggcaggatgagcctgccctgttcgtggccctgaccttcgagcggcgggaggtcctggactcctccaatatcaaaccaatgaacctgatcggcgtggcaagaggcgaaaacatccccgccgtgatcgccctgaccgaccccgagggctgcccactgagccggtttaaggatagcctgggaaacccaacccacatcctgagaatcggcgagagctataaggagaagcagcggaccatccaggccaagaaggaggtggagcagcggagagccggcggctacagccggaagtacgccagcaaagccaagaatctggcagacgatatggtgagaaacaccgctagagatctgctgtactacgccgtgacccaggatgccatgctgatcttcgccaacctgagccggggcttcggccggcagggcaagcggaccttcatggccgagagacagtacacacggatggaggactggctgaccgccaagctggcctacgagggcctgagcaagacctacctgtccaagacactggcccagtacacctccaagacatgcagcaactgtgggtttaccatcaccagcgccgactacgacagggtgctggagaagctgaagaagacagcaacaggctggatgaccacaattaacggcaaggagctgaaggtggagggccagattacctactacaacagatacaagagacagaacgtagtcaaggacctgtccgtcgagctggatagactgagcgaagaatctgtgaacaacgacatctcctcctggacaaagggcagaagcggagaagctctgagcctcctgaagaaaagattctcccatagacccgtgcaggagaagttcgtgtgcctgaactgcggcttcgagacacacgcagccgagcaagccgccctgaacatcgccagatcctggctgttcctgcggagccaggagtacaagaaataccagacaaacaagacaaccggcaacaccgataagagagccttcgtcgagacctggcagtccttttaccggaagaagcttaaggaggtgtggaaacctgccgtgcggtctggcggatctggcggaggctcctatgggcctgctgaccttcagggacgtggccatcgagttcagcctggaggagtggcagtgcctggacaccgcccagaagaacctgtacaggaacgtgatgctggagaactacaggaacctggccttcctgggcgtggccgtgagcaagcccgacctgatcatctgcctggagaaggacaaggagccctggaacatgaagaggcacgagatggtggacgagccccccggcctgaccgtgagcaacggatctggctccggcagcggccccaagaaaaagagaaaagtctaagctgccttctgcggggcttgccttctggccatgcccttcttctctcccttgcacctgtacctcttggtctttgaataaagcctgagtaggaaggctagcaaaaaaaaaaaaaaaaaaaaaaaaaaaaaaaaaaaaaaaaaaaaaaaaaaaaaaaaaaaaaaaaaaaaaaaaaaaaaaaa

SEQ ID NO: 16579 - RNA, 9485 nt, synthetic construct
  source 1..9485: mol_type = other RNA
aggaaataagagagaaaagaagagtaagaagaaatataagagccaccatggcccctaagaagaagcgtaaagtgagccggatggaacgcctcgtctacgaggtgcggcagaagtgcagaaacatcgaggacatctgcatctcctgcggatctctgaacgtgaccctggagcacccactgttcatcggcggcatgtgccagaactgtaaaaactgttttctggagtgtgcctatcaatacgacgatgacggctaccagagctactgcaccatctgttgcggcggaagagaggtgctgatgtgtggaaataacaactgctgccggtgcttctgcgtggaatgcgtggacctgctggtgggccccggcgccgcccaggccgctattaaggaagatccttggaactgctacatgtgcggccacaagggcacatacggcctgctgagacggagagaggactggcctagcagactgcagatgttcttcgccaataaccacgaccaggagttcgacccccctaaggtgtaccctcccgtccccgccgagaagagaaagcccatccgggtcctgagcctgttcgatggcatcgccaccggtctgctggtgctgaaggacctgggcatccaggtggataggtacattgcctccgaggtgtgcgaggactccatcaccgtgggaatggtgcgtcatcagggcaagatcatgtacgtgggcgacgtgcggagcgtgacacagaagcatatccaggagtggggccctttcgacctggtgatcggcggcagcccttgcaatgacctgagcatcgtgaacccagcccggaagggcctgtacgagggaaccggcagactgttcttcgagttttacagactgctgcacgacgcccggcctaaggaaggcgacgaccggcccttcttttggctgttcgagaatgtggtggccatgggagtcagcgacaagcgggatattagccggttcctggagagcaaccccgtgatgatcgatgccaaggaagtgagcgccgcccaccgggccagatacttctggggcaatctgcctggcatgaacagacccctggccagcaccgtgaacgacaagctggagctgcaggagtgcctggagcacggccggatcgccaagttcagcaaggtgagaaccatcaccacccgaagcaacagcatcaaacaaggcaaggaccagcactttcctgtgttcatgaacgagaaggaggacatcctgtggtgtaccgagatggagagagtgttcgggttcccagtccactacacagatgtcagcaacatgtctagactggccagacagagactgctgggaagaagctggtccgtccctgtgatcagacacctgttcgcccctctgaaggagtacttcgcctgcgtgagcagcggcaacagcaacgccaacagccggggccccagcttctctagcggcctggtgccactgtccctgagagggagccacatgggccccatggagatctacaaaaccgtgagcgcctggaagcggcagcctgtgcgcgtgctgagcctgtttcggaatatcgataaagtcctgaaaagcctgggattcctggagagcggctctggctccggcggtggcaccctgaagtacgtggaggatgtgacaaacgtggtcagacgggatgtggagaagtggggccccttcgatctggtgtacggcagcacccaacccctgggcagctcttgtgaccggtgccctggctggtacatgtttcagttccaccggatcctgcagtacgccctgccgagacaggagtcccagcggccattcttttggattttcatggacaacttgctgctgaccgaggatgaccaggaaactaccactcggttcctgcagaccgaagccgtgaccctgcaggacgtgagaggccgggactaccagaacgccatgcgggtgtggtccaacatccctggactgaaaagcaagcacgcacctctgacccctaaagaagaggagtacctgcaggcccaggtgcggagcagaagcaagctggacgcccctaaggtggatctgctggtgaagaattgcctcctgcccctgagagagtacttcaagtatttcagccagaatagtctgcccctgggaggcagcggcggcggcgccctggtgacatttgaggacgtcgccgtgcggttcacccaggaggaatgggctctgctggatccttctcagaaaatcctgtaccgggacgtgatgagagagacataccggaatctgacctccgtgggcatcaactgggaatgttgggaccttgaagcctgcttcagaagcctgggaagaaacctgagagtgcaggtggtgaagagaaagtgcgagctgaccaacagcggcccctgcgccgagggcggcccaagcagcggcgcccctcctcccagcggcggcagcccagccggctccccaacctctaccgaggagggcacctctgagtccgccacccccgagagcggccctggcacctccaccgagcccagcgagggcagcgcacccggcagccctgccggcagccccacctccacagaggagggaaccagcaccgagcccagcgaaggcagcgccccaggcaccagcaccgagcctagtgagcaggagattaaacggatcaacaagatcagaagaagacttgtgaaagacagcaacaccaagaaggccggcaagacaggccccatgaaaaccctgctggttagagtgatgacacccgatctgagagagcggctggaaaacctgagaaagaagcctgaaaatatcccccagcccatcagcaatacatctagagccaacctgaataagctgctgaccgattacaccgaaatgaagaaggcgatcctgcatgtgtactgggaagagttccagaaggaccctgtgggcctgatgagccgggtggcccagcctgccagcaagaagatcgatcagaacaagctgaaacctgagatggacgagaagggcaacctgaccaccgccggctttgcctgctctcagtgtggccagcccctgttcgtgtacaagctggagcaggtgtctgagaagggcaaggcttacaccaactacttcggacggtgcaatgtggccgagcacgaaaagctgatcctgctggcccagctgaagcccgagaaggatagcgacgaagccgtgacatatagcctgggaaagtttgggcagagggccctggatttctacagcattcatgtgaccaaggagtccacccaccccgtgaagcccctggcccagatcgccggaaacagatacgcctccggacctgtgggaaaggccctgagcgacgcatgtatgggcacaatcgcctccttcctgtctaagtaccaggacatcatcatcgaacaccagaaggtggtgaagggcaaccagaagagactggagagcctgcgggagctggccggcaaggaaaacctggaataccctagcgtgaccctgccacctcagcctcacaccaaggagggcgttgatgcctacaacgaagtgatcgcccgggtgcgaatgtgggtgaacctgaacctgtggcagaagctgaagctaagcagagatgatgccaagcctctgctgagactgaagggattcccttcctttcctctggtcgagagacaggccaacgaagtggactggtgggacatggtgtgtaacgtgaagaagctgatcaacgagaaaaaggaggatggcaaggtgttttggcagaatctggctggctacaagagacaggaagccctgagaccatacctgagcagcgaggaagatcggaagaagggaaagaaattcgctcggtaccagctgggcgacctgctgctgcacctggaaaagaagcacggcgaggactggggaaaggtgtacgacgaggcctgggagcggattgacaagaaagtggaaggcctgagcaagcacatcaagctggaagaggaacggagaagcgaggacgcccagagcaaggccgccctgaccgactggctgcgggctaaggccagcttcgtgatcgagggcctgaaggaggccgacaaggacgagttctgcagatgcgagctgaagctgcagaagtggtacggggacctgcggggaaagcccttcgccatcgaagccgagaacagcatcctggacatcagcggcttcagcaagcagtacaactgtgccttcatctggcagaaggacggcgtgaagaagctgaacctgtacctgatcatcaactacttcaagggcggcaagctgcggttcaagaagatcaaacctgaagccttcgaagccaacagattctacaccgtgatcaacaaaaagagcggcgagatcgtgcccatggaggtgaacttcaacttcgacgaccccaacctgatcatcctgcctctggcctttggcaagagacagggcagagaattcatctggaacgacctgctgtccctggaaaccggcagcctgaagctggccaacggaagagtgatcgagaagacactgtacaacagaagaacccggcaggatgagcctgccctgttcgtggccctgaccttcgagcggcgggaggtcctggactcctccaatatcaaaccaatgaacctgatcggcgtggcaagaggcgaaaacatccccgccgtgatcgccctgaccgaccccgagggctgcccactgagccggtttaaggatagcctgggaaacccaacccacatcctgagaatcggcgagagctataaggagaagcagcggaccatccaggccaagaaggaggtggagcagcggagagccggcggctacagccggaagtacgccagcaaagccaagaatctggcagacgatatggtgagaaacaccgctagagatctgctgtactacgccgtgacccaggatgccatgctgatcttcgccaacctgagccggggcttcggccggcagggcaagcggaccttcatggccgagagacagtacacacggatggaggactggctgaccgccaagctggcctacgagggcctgagcaagacctacctgtccaagacactggcccagtacacctccaagacatgcagcaactgtgggtttaccatcaccagcgccgactacgacagggtgctggagaagctgaagaagacagcaacaggctggatgaccacaattaacggcaaggagctgaaggtggagggccagattacctactacaacagatacaagagacagaacgtagtcaaggacctgtccgtcgagctggatagactgagcgaagaatctgtgaacaacgacatctcctcctggacaaagggcagaagcggagaagctctgagcctcctgaagaaaagattctcccatagacccgtgcaggagaagttcgtgtgcctgaactgcggcttcgagacacacgcagccgagcaagccgccctgaacatcgccagatcctggctgttcctgcggagccaggagtacaagaaataccagacaaacaagacaaccggcaacaccgataagagagccttcgtcgagacctggcagtccttttaccggaagaagcttaaggaggtgtggaaacctgccgtgcggtctggcggatctggcggaggctccagccccggcctgctgaccttcagggacgtggtgatcgagttcagcctggaggagtggcagtgcctggaccacgcccagcagaacctgtacagggacgtgatgctggagaactacaggaacctggtgagcctgggcatcgccgtgagcaagcccgacctgatcacctgcctggagcagaacaaggacccctggaacatcaagaggaacgagatggtgaccaagcaccccgtgatgtgcagccacggcggcccaagcagcggcgcccctcctcccagcggcggcagcccagccggctccccaacctctaccgaggagggcacctctgagtccgccacccccgagagcggccctggcacctccaccgagcccagcgagggcagcgcacccggcagccctgccggcagccccacctccacagaggagggaaccagcaccgagcccagcgaaggcagcgccccaggcaccagcaccgagcctagtgagcaggagattaaacggatcaacaagatcagaagaagacttgtgaaagacagcaacaccaagaaggccggcaagacaggccccatgaaaaccctgctggttagagtgatgacacccgatctgagagagcggctggaaaacctgagaaagaagcctgaaaatatcccccagcccatcagcaatacatctagagccaacctgaataagctgctgaccgattacaccgaaatgaagaaggcgatcctgcatgtgtactgggaagagttccagaaggaccctgtgggcctgatgagccgggtggcccagcctgccagcaagaagatcgatcagaacaagctgaaacctgagatggacgagaagggcaacctgaccaccgccggctttgcctgctctcagtgtggccagcccctgttcgtgtacaagctggagcaggtgtctgagaagggcaaggcttacaccaactacttcggacggtgcaatgtggccgagcacgaaaagctgatcctgctggcccagctgaagcccgagaaggatagcgacgaagccgtgacatatagcctgggaaagtttgggcagagggccctggatttctacagcattcatgtgaccaaggagtccacccaccccgtgaagcccctggcccagatcgccggaaacagatacgcctccggacctgtgggaaaggccctgagcgacgcatgtatgggcacaatcgcctccttcctgtctaagtaccaggacatcatcatcgaacaccagaaggtggtgaagggcaaccagaagagactggagagcctgcgggagctggccggcaaggaaaacctggaataccctagcgtgaccctgccacctcagcctcacaccaaggagggcgttgatgcctacaacgaagtgatcgcccgggtgcgaatgtgggtgaacctgaacctgtggcagaagctgaagctaagcagagatgatgccaagcctctgctgagactgaagggattcccttcctttcctctggtcgagagacaggccaacgaagtggactggtgggacatggtgtgtaacgtgaagaagctgatcaacgagaaaaaggaggatggcaaggtgttttggcagaatctggctggctacaagagacaggaagccctgagaccatacctgagcagcgaggaagatcggaagaagggaaagaaattcgctcggtaccagctgggcgacctgctgctgcacctggaaaagaagcacggcgaggactggggaaaggtgtacgacgaggcctgggagcggattgacaagaaagtggaaggcctgagcaagcacatcaagctggaagaggaacggagaagcgaggacgcccagagcaaggccgccctgaccgactggctgcgggctaaggccagcttcgtgatcgagggcctgaaggaggccgacaaggacgagttctgcagatgcgagctgaagctgcagaagtggtacggggacctgcggggaaagcccttcgccatcgaagccgagaacagcatcctggacatcagcggcttcagcaagcagtacaactgtgccttcatctggcagaaggacggcgtgaagaagctgaacctgtacctgatcatcaactacttcaagggcggcaagctgcggttcaagaagatcaaacctgaagccttcgaagccaacagattctacaccgtgatcaacaaaaagagcggcgagatcgtgcccatggaggtgaacttcaacttcgacgaccccaacctgatcatcctgcctctggcctttggcaagagacagggcagagaattcatctggaacgacctgctgtccctggaaaccggcagcctgaagctggccaacggaagagtgatcgagaagacactgtacaacagaagaacccggcaggatgagcctgccctgttcgtggccctgaccttcgagcggcgggaggtcctggactcctccaatatcaaaccaatgaacctgatcggcgtggcaagaggcgaaaacatccccgccgtgatcgccctgaccgaccccgagggctgcccactgagccggtttaaggatagcctgggaaacccaacccacatcctgagaatcggcgagagctataaggagaagcagcggaccatccaggccaagaaggaggtggagcagcggagagccggcggctacagccggaagtacgccagcaaagccaagaatctggcagacgatatggtgagaaacaccgctagagatctgctgtactacgccgtgacccaggatgccatgctgatcttcgccaacctgagccggggcttcggccggcagggcaagcggaccttcatggccgagagacagtacacacggatggaggactggctgaccgccaagctggcctacgagggcctgagcaagacctacctgtccaagacactggcccagtacacctccaagacatgcagcaactgtgggtttaccatcaccagcgccgactacgacagggtgctggagaagctgaagaagacagcaacaggctggatgaccacaattaacggcaaggagctgaaggtggagggccagattacctactacaacagatacaagagacagaacgtagtcaaggacctgtccgtcgagctggatagactgagcgaagaatctgtgaacaacgacatctcctcctggacaaagggcagaagcggagaagctctgagcctcctgaagaaaagattctcccatagacccgtgcaggagaagttcgtgtgcctgaactgcggcttcgagacacacgcagccgagcaagccgccctgaacatcgccagatcctggctgttcctgcggagccaggagtacaagaaataccagacaaacaagacaaccggcaacaccgataagagagccttcgtcgagacctggcagtccttttaccggaagaagcttaaggaggtgtggaaacctgccgtgcggtctggcggatctggcggaggctcctagccccggcctgctgaccttcagggacgtggtgatcgagttcagcctggaggagtggcagtgcctggaccacgcccagcagaacctgtacagggacgtgatgctggagaactacaggaacctggtgagcctgggcatcgccgtgagcaagcccgacctgatcacctgcctggagcagaacaaggacccctggaacatcaagaggaacgagatggtgaccaagcaccccgtgatgtgcagccacggatctggctccggcagcggccccaagaaaaagagaaaagtctaagctgccttctgcggggcttgccttctggccatgcccttcttctctcccttgcacctgtacctcttggtctttgaataaagcctgagtaggaaggctagcaaaaaaaaaaaaaaaaaaaaaaaaaaaaaaaaaaaaaaaaaaaaaaaaaaaaaaaaaaaaaaaaaaaaaaaaaaaaaaaa

SEQ ID NO: 16580 - RNA, 9485 nt, synthetic construct
  source 1..9485: mol_type = other RNA
aggaaataagagagaaaagaagagtaagaagaaatataagagccaccatggcccctaagaagaagcgtaaagtgagccggatggaacgcctcgtctacgaggtgcggcagaagtgcagaaacatcgaggacatctgcatctcctgcggatctctgaacgtgaccctggagcacccactgttcatcggcggcatgtgccagaactgtaaaaactgttttctggagtgtgcctatcaatacgacgatgacggctaccagagctactgcaccatctgttgcggcggaagagaggtgctgatgtgtggaaataacaactgctgccggtgcttctgcgtggaatgcgtggacctgctggtgggccccggcgccgcccaggccgctattaaggaagatccttggaactgctacatgtgcggccacaagggcacatacggcctgctgagacggagagaggactggcctagcagactgcagatgttcttcgccaataaccacgaccaggagttcgacccccctaaggtgtaccctcccgtccccgccgagaagagaaagcccatccgggtcctgagcctgttcgatggcatcgccaccggtctgctggtgctgaaggacctgggcatccaggtggataggtacattgcctccgaggtgtgcgaggactccatcaccgtgggaatggtgcgtcatcagggcaagatcatgtacgtgggcgacgtgcggagcgtgacacagaagcatatccaggagtggggccctttcgacctggtgatcggcggcagcccttgcaatgacctgagcatcgtgaacccagcccggaagggcctgtacgagggaaccggcagactgttcttcgagttttacagactgctgcacgacgcccggcctaaggaaggcgacgaccggcccttcttttggctgttcgagaatgtggtggccatgggagtcagcgacaagcgggatattagccggttcctggagagcaaccccgtgatgatcgatgccaaggaagtgagcgccgcccaccgggccagatacttctggggcaatctgcctggcatgaacagacccctggccagcaccgtgaacgacaagctggagctgcaggagtgcctggagcacggccggatcgccaagttcagcaaggtgagaaccatcaccacccgaagcaacagcatcaaacaaggcaaggaccagcactttcctgtgttcatgaacgagaaggaggacatcctgtggtgtaccgagatggagagagtgttcgggttcccagtccactacacagatgtcagcaacatgtctagactggccagacagagactgctgggaagaagctggtccgtccctgtgatcagacacctgttcgcccctctgaaggagtacttcgcctgcgtgagcagcggcaacagcaacgccaacagccggggccccagcttctctagcggcctggtgccactgtccctgagagggagccacatgggccccatggagatctacaaaaccgtgagcgcctggaagcggcagcctgtgcgcgtgctgagcctgtttcggaatatcgataaagtcctgaaaagcctgggattcctggagagcggctctggctccggcggtggcaccctgaagtacgtggaggatgtgacaaacgtggtcagacgggatgtggagaagtggggccccttcgatctggtgtacggcagcacccaacccctgggcagctcttgtgaccggtgccctggctggtacatgtttcagttccaccggatcctgcagtacgccctgccgagacaggagtcccagcggccattcttttggattttcatggacaacttgctgctgaccgaggatgaccaggaaactaccactcggttcctgcagaccgaagccgtgaccctgcaggacgtgagaggccgggactaccagaacgccatgcgggtgtggtccaacatccctggactgaaaagcaagcacgcacctctgacccctaaagaagaggagtacctgcaggcccaggtgcggagcagaagcaagctggacgcccctaaggtggatctgctggtgaagaattgcctcctgcccctgagagagtacttcaagtatttcagccagaatagtctgcccctgggaggcagcggcggcggcgccctggtgacatttgaggacgtcgccgtgcggttcacccaggaggaatgggctctgctggatccttctcagaaaatcctgtaccgggacgtgatgagagagacataccggaatctgacctccgtgggcatcaactgggaatgttgggaccttgaagcctgcttcagaagcctgggaagaaacctgagagtgcaggtggtgaagagaaagtgcgagctgaccaacagcggcccctgcgccgagggcggcccaagcagcggcgcccctcctcccagcggcggcagcccagccggctccccaacctctaccgaggagggcacctctgagtccgccacccccgagagcggccctggcacctccaccgagcccagcgagggcagcgcacccggcagccctgccggcagccccacctccacagaggagggaaccagcaccgagcccagcgaaggcagcgccccaggcaccagcaccgagcctagtgagcaggagattaaacggatcaacaagatcagaagaagacttgtgaaagacagcaacaccaagaaggccggcaagacaggccccatgaaaaccctgctggttagagtgatgacacccgatctgagagagcggctggaaaacctgagaaagaagcctgaaaatatcccccagcccatcagcaatacatctagagccaacctgaataagctgctgaccgattacaccgaaatgaagaaggcgatcctgcatgtgtactgggaagagttccagaaggaccctgtgggcctgatgagccgggtggcccagcctgccagcaagaagatcgatcagaacaagctgaaacctgagatggacgagaagggcaacctgaccaccgccggctttgcctgctctcagtgtggccagcccctgttcgtgtacaagctggagcaggtgtctgagaagggcaaggcttacaccaactacttcggacggtgcaatgtggccgagcacgaaaagctgatcctgctggcccagctgaagcccgagaaggatagcgacgaagccgtgacatatagcctgggaaagtttgggcagagggccctggatttctacagcattcatgtgaccaaggagtccacccaccccgtgaagcccctggcccagatcgccggaaacagatacgcctccggacctgtgggaaaggccctgagcgacgcatgtatgggcacaatcgcctccttcctgtctaagtaccaggacatcatcatcgaacaccagaaggtggtgaagggcaaccagaagagactggagagcctgcgggagctggccggcaaggaaaacctggaataccctagcgtgaccctgccacctcagcctcacaccaaggagggcgttgatgcctacaacgaagtgatcgcccgggtgcgaatgtgggtgaacctgaacctgtggcagaagctgaagctaagcagagatgatgccaagcctctgctgagactgaagggattcccttcctttcctctggtcgagagacaggccaacgaagtggactggtgggacatggtgtgtaacgtgaagaagctgatcaacgagaaaaaggaggatggcaaggtgttttggcagaatctggctggctacaagagacaggaagccctgagaccatacctgagcagcgaggaagatcggaagaagggaaagaaattcgctcggtaccagctgggcgacctgctgctgcacctggaaaagaagcacggcgaggactggggaaaggtgtacgacgaggcctgggagcggattgacaagaaagtggaaggcctgagcaagcacatcaagctggaagaggaacggagaagcgaggacgcccagagcaaggccgccctgaccgactggctgcgggctaaggccagcttcgtgatcgagggcctgaaggaggccgacaaggacgagttctgcagatgcgagctgaagctgcagaagtggtacggggacctgcggggaaagcccttcgccatcgaagccgagaacagcatcctggacatcagcggcttcagcaagcagtacaactgtgccttcatctggcagaaggacggcgtgaagaagctgaacctgtacctgatcatcaactacttcaagggcggcaagctgcggttcaagaagatcaaacctgaagccttcgaagccaacagattctacaccgtgatcaacaaaaagagcggcgagatcgtgcccatggaggtgaacttcaacttcgacgaccccaacctgatcatcctgcctctggcctttggcaagagacagggcagagaattcatctggaacgacctgctgtccctggaaaccggcagcctgaagctggccaacggaagagtgatcgagaagacactgtacaacagaagaacccggcaggatgagcctgccctgttcgtggccctgaccttcgagcggcgggaggtcctggactcctccaatatcaaaccaatgaacctgatcggcgtggcaagaggcgaaaacatccccgccgtgatcgccctgaccgaccccgagggctgcccactgagccggtttaaggatagcctgggaaacccaacccacatcctgagaatcggcgagagctataaggagaagcagcggaccatccaggccaagaaggaggtggagcagcggagagccggcggctacagccggaagtacgccagcaaagccaagaatctggcagacgatatggtgagaaacaccgctagagatctgctgtactacgccgtgacccaggatgccatgctgatcttcgccaacctgagccggggcttcggccggcagggcaagcggaccttcatggccgagagacagtacacacggatggaggactggctgaccgccaagctggcctacgagggcctgagcaagacctacctgtccaagacactggcccagtacacctccaagacatgcagcaactgtgggtttaccatcaccagcgccgactacgacagggtgctggagaagctgaagaagacagcaacaggctggatgaccacaattaacggcaaggagctgaaggtggagggccagattacctactacaacagatacaagagacagaacgtagtcaaggacctgtccgtcgagctggatagactgagcgaagaatctgtgaacaacgacatctcctcctggacaaagggcagaagcggagaagctctgagcctcctgaagaaaagattctcccatagacccgtgcaggagaagttcgtgtgcctgaactgcggcttcgagacacacgcagccgagcaagccgccctgaacatcgccagatcctggctgttcctgcggagccaggagtacaagaaataccagacaaacaagacaaccggcaacaccgataagagagccttcgtcgagacctggcagtccttttaccggaagaagcttaaggaggtgtggaaacctgccgtgcggtctggcggatctggcggaggctccagccagggcctggtgaccttcagggacgtggccctggacttcagccaggaggagtgggagtggctggaccccagccagaaggacctgtacagggacgtgatgctggagaactacaggaacctggtgtggctgggcctgagcatcagcaagcccaacatgatcagcctgctggagcagggcaaggagccctggatggtggagaaggagatgagcgacggccagtgcgccgactgggagagctggggcggcccaagcagcggcgcccctcctcccagcggcggcagcccagccggctccccaacctctaccgaggagggcacctctgagtccgccacccccgagagcggccctggcacctccaccgagcccagcgagggcagcgcacccggcagccctgccggcagccccacctccacagaggagggaaccagcaccgagcccagcgaaggcagcgccccaggcaccagcaccgagcctagtgagcaggagattaaacggatcaacaagatcagaagaagacttgtgaaagacagcaacaccaagaaggccggcaagacaggccccatgaaaaccctgctggttagagtgatgacacccgatctgagagagcggctggaaaacctgagaaagaagcctgaaaatatcccccagcccatcagcaatacatctagagccaacctgaataagctgctgaccgattacaccgaaatgaagaaggcgatcctgcatgtgtactgggaagagttccagaaggaccctgtgggcctgatgagccgggtggcccagcctgccagcaagaagatcgatcagaacaagctgaaacctgagatggacgagaagggcaacctgaccaccgccggctttgcctgctctcagtgtggccagcccctgttcgtgtacaagctggagcaggtgtctgagaagggcaaggcttacaccaactacttcggacggtgcaatgtggccgagcacgaaaagctgatcctgctggcccagctgaagcccgagaaggatagcgacgaagccgtgacatatagcctgggaaagtttgggcagagggccctggatttctacagcattcatgtgaccaaggagtccacccaccccgtgaagcccctggcccagatcgccggaaacagatacgcctccggacctgtgggaaaggccctgagcgacgcatgtatgggcacaatcgcctccttcctgtctaagtaccaggacatcatcatcgaacaccagaaggtggtgaagggcaaccagaagagactggagagcctgcgggagctggccggcaaggaaaacctggaataccctagcgtgaccctgccacctcagcctcacaccaaggagggcgttgatgcctacaacgaagtgatcgcccgggtgcgaatgtgggtgaacctgaacctgtggcagaagctgaagctaagcagagatgatgccaagcctctgctgagactgaagggattcccttcctttcctctggtcgagagacaggccaacgaagtggactggtgggacatggtgtgtaacgtgaagaagctgatcaacgagaaaaaggaggatggcaaggtgttttggcagaatctggctggctacaagagacaggaagccctgagaccatacctgagcagcgaggaagatcggaagaagggaaagaaattcgctcggtaccagctgggcgacctgctgctgcacctggaaaagaagcacggcgaggactggggaaaggtgtacgacgaggcctgggagcggattgacaagaaagtggaaggcctgagcaagcacatcaagctggaagaggaacggagaagcgaggacgcccagagcaaggccgccctgaccgactggctgcgggctaaggccagcttcgtgatcgagggcctgaaggaggccgacaaggacgagttctgcagatgcgagctgaagctgcagaagtggtacggggacctgcggggaaagcccttcgccatcgaagccgagaacagcatcctggacatcagcggcttcagcaagcagtacaactgtgccttcatctggcagaaggacggcgtgaagaagctgaacctgtacctgatcatcaactacttcaagggcggcaagctgcggttcaagaagatcaaacctgaagccttcgaagccaacagattctacaccgtgatcaacaaaaagagcggcgagatcgtgcccatggaggtgaacttcaacttcgacgaccccaacctgatcatcctgcctctggcctttggcaagagacagggcagagaattcatctggaacgacctgctgtccctggaaaccggcagcctgaagctggccaacggaagagtgatcgagaagacactgtacaacagaagaacccggcaggatgagcctgccctgttcgtggccctgaccttcgagcggcgggaggtcctggactcctccaatatcaaaccaatgaacctgatcggcgtggcaagaggcgaaaacatccccgccgtgatcgccctgaccgaccccgagggctgcccactgagccggtttaaggatagcctgggaaacccaacccacatcctgagaatcggcgagagctataaggagaagcagcggaccatccaggccaagaaggaggtggagcagcggagagccggcggctacagccggaagtacgccagcaaagccaagaatctggcagacgatatggtgagaaacaccgctagagatctgctgtactacgccgtgacccaggatgccatgctgatcttcgccaacctgagccggggcttcggccggcagggcaagcggaccttcatggccgagagacagtacacacggatggaggactggctgaccgccaagctggcctacgagggcctgagcaagacctacctgtccaagacactggcccagtacacctccaagacatgcagcaactgtgggtttaccatcaccagcgccgactacgacagggtgctggagaagctgaagaagacagcaacaggctggatgaccacaattaacggcaaggagctgaaggtggagggccagattacctactacaacagatacaagagacagaacgtagtcaaggacctgtccgtcgagctggatagactgagcgaagaatctgtgaacaacgacatctcctcctggacaaagggcagaagcggagaagctctgagcctcctgaagaaaagattctcccatagacccgtgcaggagaagttcgtgtgcctgaactgcggcttcgagacacacgcagccgagcaagccgccctgaacatcgccagatcctggctgttcctgcggagccaggagtacaagaaataccagacaaacaagacaaccggcaacaccgataagagagccttcgtcgagacctggcagtccttttaccggaagaagcttaaggaggtgtggaaacctgccgtgcggtctggcggatctggcggaggctcctagccagggcctggtgaccttcagggacgtggccctggacttcagccaggaggagtgggagtggctggaccccagccagaaggacctgtacagggacgtgatgctggagaactacaggaacctggtgtggctgggcctgagcatcagcaagcccaacatgatcagcctgctggagcagggcaaggagccctggatggtggagaaggagatgagcgacggccagtgcgccgactgggagagctggggatctggctccggcagcggccccaagaaaaagagaaaagtctaagctgccttctgcggggcttgccttctggccatgcccttcttctctcccttgcacctgtacctcttggtctttgaataaagcctgagtaggaaggctagcaaaaaaaaaaaaaaaaaaaaaaaaaaaaaaaaaaaaaaaaaaaaaaaaaaaaaaaaaaaaaaaaaaaaaaaaaaaaaaaa

SEQ ID NO: 16581 - RNA, 9485 nt, synthetic construct
  source 1..9485: mol_type = other RNA
aggaaataagagagaaaagaagagtaagaagaaatataagagccaccatggcccctaagaagaagcgtaaagtgagccggatggaacgcctcgtctacgaggtgcggcagaagtgcagaaacatcgaggacatctgcatctcctgcggatctctgaacgtgaccctggagcacccactgttcatcggcggcatgtgccagaactgtaaaaactgttttctggagtgtgcctatcaatacgacgatgacggctaccagagctactgcaccatctgttgcggcggaagagaggtgctgatgtgtggaaataacaactgctgccggtgcttctgcgtggaatgcgtggacctgctggtgggccccggcgccgcccaggccgctattaaggaagatccttggaactgctacatgtgcggccacaagggcacatacggcctgctgagacggagagaggactggcctagcagactgcagatgttcttcgccaataaccacgaccaggagttcgacccccctaaggtgtaccctcccgtccccgccgagaagagaaagcccatccgggtcctgagcctgttcgatggcatcgccaccggtctgctggtgctgaaggacctgggcatccaggtggataggtacattgcctccgaggtgtgcgaggactccatcaccgtgggaatggtgcgtcatcagggcaagatcatgtacgtgggcgacgtgcggagcgtgacacagaagcatatccaggagtggggccctttcgacctggtgatcggcggcagcccttgcaatgacctgagcatcgtgaacccagcccggaagggcctgtacgagggaaccggcagactgttcttcgagttttacagactgctgcacgacgcccggcctaaggaaggcgacgaccggcccttcttttggctgttcgagaatgtggtggccatgggagtcagcgacaagcgggatattagccggttcctggagagcaaccccgtgatgatcgatgccaaggaagtgagcgccgcccaccgggccagatacttctggggcaatctgcctggcatgaacagacccctggccagcaccgtgaacgacaagctggagctgcaggagtgcctggagcacggccggatcgccaagttcagcaaggtgagaaccatcaccacccgaagcaacagcatcaaacaaggcaaggaccagcactttcctgtgttcatgaacgagaaggaggacatcctgtggtgtaccgagatggagagagtgttcgggttcccagtccactacacagatgtcagcaacatgtctagactggccagacagagactgctgggaagaagctggtccgtccctgtgatcagacacctgttcgcccctctgaaggagtacttcgcctgcgtgagcagcggcaacagcaacgccaacagccggggccccagcttctctagcggcctggtgccactgtccctgagagggagccacatgggccccatggagatctacaaaaccgtgagcgcctggaagcggcagcctgtgcgcgtgctgagcctgtttcggaatatcgataaagtcctgaaaagcctgggattcctggagagcggctctggctccggcggtggcaccctgaagtacgtggaggatgtgacaaacgtggtcagacgggatgtggagaagtggggccccttcgatctggtgtacggcagcacccaacccctgggcagctcttgtgaccggtgccctggctggtacatgtttcagttccaccggatcctgcagtacgccctgccgagacaggagtcccagcggccattcttttggattttcatggacaacttgctgctgaccgaggatgaccaggaaactaccactcggttcctgcagaccgaagccgtgaccctgcaggacgtgagaggccgggactaccagaacgccatgcgggtgtggtccaacatccctggactgaaaagcaagcacgcacctctgacccctaaagaagaggagtacctgcaggcccaggtgcggagcagaagcaagctggacgcccctaaggtggatctgctggtgaagaattgcctcctgcccctgagagagtacttcaagtatttcagccagaatagtctgcccctgggaggcagcggcggcggcgccctggtgacatttgaggacgtcgccgtgcggttcacccaggaggaatgggctctgctggatccttctcagaaaatcctgtaccgggacgtgatgagagagacataccggaatctgacctccgtgggcatcaactgggaatgttgggaccttgaagcctgcttcagaagcctgggaagaaacctgagagtgcaggtggtgaagagaaagtgcgagctgaccaacagcggcccctgcgccgagggcggcccaagcagcggcgcccctcctcccagcggcggcagcccagccggctccccaacctctaccgaggagggcacctctgagtccgccacccccgagagcggccctggcacctccaccgagcccagcgagggcagcgcacccggcagccctgccggcagccccacctccacagaggagggaaccagcaccgagcccagcgaaggcagcgccccaggcaccagcaccgagcctagtgagcaggagattaaacggatcaacaagatcagaagaagacttgtgaaagacagcaacaccaagaaggccggcaagacaggccccatgaaaaccctgctggttagagtgatgacacccgatctgagagagcggctggaaaacctgagaaagaagcctgaaaatatcccccagcccatcagcaatacatctagagccaacctgaataagctgctgaccgattacaccgaaatgaagaaggcgatcctgcatgtgtactgggaagagttccagaaggaccctgtgggcctgatgagccgggtggcccagcctgccagcaagaagatcgatcagaacaagctgaaacctgagatggacgagaagggcaacctgaccaccgccggctttgcctgctctcagtgtggccagcccctgttcgtgtacaagctggagcaggtgtctgagaagggcaaggcttacaccaactacttcggacggtgcaatgtggccgagcacgaaaagctgatcctgctggcccagctgaagcccgagaaggatagcgacgaagccgtgacatatagcctgggaaagtttgggcagagggccctggatttctacagcattcatgtgaccaaggagtccacccaccccgtgaagcccctggcccagatcgccggaaacagatacgcctccggacctgtgggaaaggccctgagcgacgcatgtatgggcacaatcgcctccttcctgtctaagtaccaggacatcatcatcgaacaccagaaggtggtgaagggcaaccagaagagactggagagcctgcgggagctggccggcaaggaaaacctggaataccctagcgtgaccctgccacctcagcctcacaccaaggagggcgttgatgcctacaacgaagtgatcgcccgggtgcgaatgtgggtgaacctgaacctgtggcagaagctgaagctaagcagagatgatgccaagcctctgctgagactgaagggattcccttcctttcctctggtcgagagacaggccaacgaagtggactggtgggacatggtgtgtaacgtgaagaagctgatcaacgagaaaaaggaggatggcaaggtgttttggcagaatctggctggctacaagagacaggaagccctgagaccatacctgagcagcgaggaagatcggaagaagggaaagaaattcgctcggtaccagctgggcgacctgctgctgcacctggaaaagaagcacggcgaggactggggaaaggtgtacgacgaggcctgggagcggattgacaagaaagtggaaggcctgagcaagcacatcaagctggaagaggaacggagaagcgaggacgcccagagcaaggccgccctgaccgactggctgcgggctaaggccagcttcgtgatcgagggcctgaaggaggccgacaaggacgagttctgcagatgcgagctgaagctgcagaagtggtacggggacctgcggggaaagcccttcgccatcgaagccgagaacagcatcctggacatcagcggcttcagcaagcagtacaactgtgccttcatctggcagaaggacggcgtgaagaagctgaacctgtacctgatcatcaactacttcaagggcggcaagctgcggttcaagaagatcaaacctgaagccttcgaagccaacagattctacaccgtgatcaacaaaaagagcggcgagatcgtgcccatggaggtgaacttcaacttcgacgaccccaacctgatcatcctgcctctggcctttggcaagagacagggcagagaattcatctggaacgacctgctgtccctggaaaccggcagcctgaagctggccaacggaagagtgatcgagaagacactgtacaacagaagaacccggcaggatgagcctgccctgttcgtggccctgaccttcgagcggcgggaggtcctggactcctccaatatcaaaccaatgaacctgatcggcgtggcaagaggcgaaaacatccccgccgtgatcgccctgaccgaccccgagggctgcccactgagccggtttaaggatagcctgggaaacccaacccacatcctgagaatcggcgagagctataaggagaagcagcggaccatccaggccaagaaggaggtggagcagcggagagccggcggctacagccggaagtacgccagcaaagccaagaatctggcagacgatatggtgagaaacaccgctagagatctgctgtactacgccgtgacccaggatgccatgctgatcttcgccaacctgagccggggcttcggccggcagggcaagcggaccttcatggccgagagacagtacacacggatggaggactggctgaccgccaagctggcctacgagggcctgagcaagacctacctgtccaagacactggcccagtacacctccaagacatgcagcaactgtgggtttaccatcaccagcgccgactacgacagggtgctggagaagctgaagaagacagcaacaggctggatgaccacaattaacggcaaggagctgaaggtggagggccagattacctactacaacagatacaagagacagaacgtagtcaaggacctgtccgtcgagctggatagactgagcgaagaatctgtgaacaacgacatctcctcctggacaaagggcagaagcggagaagctctgagcctcctgaagaaaagattctcccatagacccgtgcaggagaagttcgtgtgcctgaactgcggcttcgagacacacgcagccgagcaagccgccctgaacatcgccagatcctggctgttcctgcggagccaggagtacaagaaataccagacaaacaagacaaccggcaacaccgataagagagccttcgtcgagacctggcagtccttttaccggaagaagcttaaggaggtgtggaaacctgccgtgcggtctggcggatctggcggaggctccatcggcagcgacctgttcagggacgtggccgtggtgttcagcagggaggagtgggagcagctgacccccgcccagagggacctgtacagggacgtgatgctggagatctacagcatcctgctgagcctgggccccgacctggccgtgagcaagcccgacgtgatcagcttcctggagcagggcaaggagccctggagggtggaggaggccgtgaccggcggcctgtgccccgtgctggagagcggcggcccaagcagcggcgcccctcctcccagcggcggcagcccagccggctccccaacctctaccgaggagggcacctctgagtccgccacccccgagagcggccctggcacctccaccgagcccagcgagggcagcgcacccggcagccctgccggcagccccacctccacagaggagggaaccagcaccgagcccagcgaaggcagcgccccaggcaccagcaccgagcctagtgagcaggagattaaacggatcaacaagatcagaagaagacttgtgaaagacagcaacaccaagaaggccggcaagacaggccccatgaaaaccctgctggttagagtgatgacacccgatctgagagagcggctggaaaacctgagaaagaagcctgaaaatatcccccagcccatcagcaatacatctagagccaacctgaataagctgctgaccgattacaccgaaatgaagaaggcgatcctgcatgtgtactgggaagagttccagaaggaccctgtgggcctgatgagccgggtggcccagcctgccagcaagaagatcgatcagaacaagctgaaacctgagatggacgagaagggcaacctgaccaccgccggctttgcctgctctcagtgtggccagcccctgttcgtgtacaagctggagcaggtgtctgagaagggcaaggcttacaccaactacttcggacggtgcaatgtggccgagcacgaaaagctgatcctgctggcccagctgaagcccgagaaggatagcgacgaagccgtgacatatagcctgggaaagtttgggcagagggccctggatttctacagcattcatgtgaccaaggagtccacccaccccgtgaagcccctggcccagatcgccggaaacagatacgcctccggacctgtgggaaaggccctgagcgacgcatgtatgggcacaatcgcctccttcctgtctaagtaccaggacatcatcatcgaacaccagaaggtggtgaagggcaaccagaagagactggagagcctgcgggagctggccggcaaggaaaacctggaataccctagcgtgaccctgccacctcagcctcacaccaaggagggcgttgatgcctacaacgaagtgatcgcccgggtgcgaatgtgggtgaacctgaacctgtggcagaagctgaagctaagcagagatgatgccaagcctctgctgagactgaagggattcccttcctttcctctggtcgagagacaggccaacgaagtggactggtgggacatggtgtgtaacgtgaagaagctgatcaacgagaaaaaggaggatggcaaggtgttttggcagaatctggctggctacaagagacaggaagccctgagaccatacctgagcagcgaggaagatcggaagaagggaaagaaattcgctcggtaccagctgggcgacctgctgctgcacctggaaaagaagcacggcgaggactggggaaaggtgtacgacgaggcctgggagcggattgacaagaaagtggaaggcctgagcaagcacatcaagctggaagaggaacggagaagcgaggacgcccagagcaaggccgccctgaccgactggctgcgggctaaggccagcttcgtgatcgagggcctgaaggaggccgacaaggacgagttctgcagatgcgagctgaagctgcagaagtggtacggggacctgcggggaaagcccttcgccatcgaagccgagaacagcatcctggacatcagcggcttcagcaagcagtacaactgtgccttcatctggcagaaggacggcgtgaagaagctgaacctgtacctgatcatcaactacttcaagggcggcaagctgcggttcaagaagatcaaacctgaagccttcgaagccaacagattctacaccgtgatcaacaaaaagagcggcgagatcgtgcccatggaggtgaacttcaacttcgacgaccccaacctgatcatcctgcctctggcctttggcaagagacagggcagagaattcatctggaacgacctgctgtccctggaaaccggcagcctgaagctggccaacggaagagtgatcgagaagacactgtacaacagaagaacccggcaggatgagcctgccctgttcgtggccctgaccttcgagcggcgggaggtcctggactcctccaatatcaaaccaatgaacctgatcggcgtggcaagaggcgaaaacatccccgccgtgatcgccctgaccgaccccgagggctgcccactgagccggtttaaggatagcctgggaaacccaacccacatcctgagaatcggcgagagctataaggagaagcagcggaccatccaggccaagaaggaggtggagcagcggagagccggcggctacagccggaagtacgccagcaaagccaagaatctggcagacgatatggtgagaaacaccgctagagatctgctgtactacgccgtgacccaggatgccatgctgatcttcgccaacctgagccggggcttcggccggcagggcaagcggaccttcatggccgagagacagtacacacggatggaggactggctgaccgccaagctggcctacgagggcctgagcaagacctacctgtccaagacactggcccagtacacctccaagacatgcagcaactgtgggtttaccatcaccagcgccgactacgacagggtgctggagaagctgaagaagacagcaacaggctggatgaccacaattaacggcaaggagctgaaggtggagggccagattacctactacaacagatacaagagacagaacgtagtcaaggacctgtccgtcgagctggatagactgagcgaagaatctgtgaacaacgacatctcctcctggacaaagggcagaagcggagaagctctgagcctcctgaagaaaagattctcccatagacccgtgcaggagaagttcgtgtgcctgaactgcggcttcgagacacacgcagccgagcaagccgccctgaacatcgccagatcctggctgttcctgcggagccaggagtacaagaaataccagacaaacaagacaaccggcaacaccgataagagagccttcgtcgagacctggcagtccttttaccggaagaagcttaaggaggtgtggaaacctgccgtgcggtctggcggatctggcggaggctcctatcggcagcgacctgttcagggacgtggccgtggtgttcagcagggaggagtgggagcagctgacccccgcccagagggacctgtacagggacgtgatgctggagatctacagcatcctgctgagcctgggccccgacctggccgtgagcaagcccgacgtgatcagcttcctggagcagggcaaggagccctggagggtggaggaggccgtgaccggcggcctgtgccccgtgctggagagcggatctggctccggcagcggccccaagaaaaagagaaaagtctaagctgccttctgcggggcttgccttctggccatgcccttcttctctcccttgcacctgtacctcttggtctttgaataaagcctgagtaggaaggctagcaaaaaaaaaaaaaaaaaaaaaaaaaaaaaaaaaaaaaaaaaaaaaaaaaaaaaaaaaaaaaaaaaaaaaaaaaaaaaaaa

SEQ ID NO: 16582 - RNA, 9485 nt, synthetic construct
  source 1..9485: mol_type = other RNA
aggaaataagagagaaaagaagagtaagaagaaatataagagccaccatggcccctaagaagaagcgtaaagtgagccggatggaacgcctcgtctacgaggtgcggcagaagtgcagaaacatcgaggacatctgcatctcctgcggatctctgaacgtgaccctggagcacccactgttcatcggcggcatgtgccagaactgtaaaaactgttttctggagtgtgcctatcaatacgacgatgacggctaccagagctactgcaccatctgttgcggcggaagagaggtgctgatgtgtggaaataacaactgctgccggtgcttctgcgtggaatgcgtggacctgctggtgggccccggcgccgcccaggccgctattaaggaagatccttggaactgctacatgtgcggccacaagggcacatacggcctgctgagacggagagaggactggcctagcagactgcagatgttcttcgccaataaccacgaccaggagttcgacccccctaaggtgtaccctcccgtccccgccgagaagagaaagcccatccgggtcctgagcctgttcgatggcatcgccaccggtctgctggtgctgaaggacctgggcatccaggtggataggtacattgcctccgaggtgtgcgaggactccatcaccgtgggaatggtgcgtcatcagggcaagatcatgtacgtgggcgacgtgcggagcgtgacacagaagcatatccaggagtggggccctttcgacctggtgatcggcggcagcccttgcaatgacctgagcatcgtgaacccagcccggaagggcctgtacgagggaaccggcagactgttcttcgagttttacagactgctgcacgacgcccggcctaaggaaggcgacgaccggcccttcttttggctgttcgagaatgtggtggccatgggagtcagcgacaagcgggatattagccggttcctggagagcaaccccgtgatgatcgatgccaaggaagtgagcgccgcccaccgggccagatacttctggggcaatctgcctggcatgaacagacccctggccagcaccgtgaacgacaagctggagctgcaggagtgcctggagcacggccggatcgccaagttcagcaaggtgagaaccatcaccacccgaagcaacagcatcaaacaaggcaaggaccagcactttcctgtgttcatgaacgagaaggaggacatcctgtggtgtaccgagatggagagagtgttcgggttcccagtccactacacagatgtcagcaacatgtctagactggccagacagagactgctgggaagaagctggtccgtccctgtgatcagacacctgttcgcccctctgaaggagtacttcgcctgcgtgagcagcggcaacagcaacgccaacagccggggccccagcttctctagcggcctggtgccactgtccctgagagggagccacatgggccccatggagatctacaaaaccgtgagcgcctggaagcggcagcctgtgcgcgtgctgagcctgtttcggaatatcgataaagtcctgaaaagcctgggattcctggagagcggctctggctccggcggtggcaccctgaagtacgtggaggatgtgacaaacgtggtcagacgggatgtggagaagtggggccccttcgatctggtgtacggcagcacccaacccctgggcagctcttgtgaccggtgccctggctggtacatgtttcagttccaccggatcctgcagtacgccctgccgagacaggagtcccagcggccattcttttggattttcatggacaacttgctgctgaccgaggatgaccaggaaactaccactcggttcctgcagaccgaagccgtgaccctgcaggacgtgagaggccgggactaccagaacgccatgcgggtgtggtccaacatccctggactgaaaagcaagcacgcacctctgacccctaaagaagaggagtacctgcaggcccaggtgcggagcagaagcaagctggacgcccctaaggtggatctgctggtgaagaattgcctcctgcccctgagagagtacttcaagtatttcagccagaatagtctgcccctgggaggcagcggcggcggcgccctggtgacatttgaggacgtcgccgtgcggttcacccaggaggaatgggctctgctggatccttctcagaaaatcctgtaccgggacgtgatgagagagacataccggaatctgacctccgtgggcatcaactgggaatgttgggaccttgaagcctgcttcagaagcctgggaagaaacctgagagtgcaggtggtgaagagaaagtgcgagctgaccaacagcggcccctgcgccgagggcggcccaagcagcggcgcccctcctcccagcggcggcagcccagccggctccccaacctctaccgaggagggcacctctgagtccgccacccccgagagcggccctggcacctccaccgagcccagcgagggcagcgcacccggcagccctgccggcagccccacctccacagaggagggaaccagcaccgagcccagcgaaggcagcgccccaggcaccagcaccgagcctagtgagcaggagattaaacggatcaacaagatcagaagaagacttgtgaaagacagcaacaccaagaaggccggcaagacaggccccatgaaaaccctgctggttagagtgatgacacccgatctgagagagcggctggaaaacctgagaaagaagcctgaaaatatcccccagcccatcagcaatacatctagagccaacctgaataagctgctgaccgattacaccgaaatgaagaaggcgatcctgcatgtgtactgggaagagttccagaaggaccctgtgggcctgatgagccgggtggcccagcctgccagcaagaagatcgatcagaacaagctgaaacctgagatggacgagaagggcaacctgaccaccgccggctttgcctgctctcagtgtggccagcccctgttcgtgtacaagctggagcaggtgtctgagaagggcaaggcttacaccaactacttcggacggtgcaatgtggccgagcacgaaaagctgatcctgctggcccagctgaagcccgagaaggatagcgacgaagccgtgacatatagcctgggaaagtttgggcagagggccctggatttctacagcattcatgtgaccaaggagtccacccaccccgtgaagcccctggcccagatcgccggaaacagatacgcctccggacctgtgggaaaggccctgagcgacgcatgtatgggcacaatcgcctccttcctgtctaagtaccaggacatcatcatcgaacaccagaaggtggtgaagggcaaccagaagagactggagagcctgcgggagctggccggcaaggaaaacctggaataccctagcgtgaccctgccacctcagcctcacaccaaggagggcgttgatgcctacaacgaagtgatcgcccgggtgcgaatgtgggtgaacctgaacctgtggcagaagctgaagctaagcagagatgatgccaagcctctgctgagactgaagggattcccttcctttcctctggtcgagagacaggccaacgaagtggactggtgggacatggtgtgtaacgtgaagaagctgatcaacgagaaaaaggaggatggcaaggtgttttggcagaatctggctggctacaagagacaggaagccctgagaccatacctgagcagcgaggaagatcggaagaagggaaagaaattcgctcggtaccagctgggcgacctgctgctgcacctggaaaagaagcacggcgaggactggggaaaggtgtacgacgaggcctgggagcggattgacaagaaagtggaaggcctgagcaagcacatcaagctggaagaggaacggagaagcgaggacgcccagagcaaggccgccctgaccgactggctgcgggctaaggccagcttcgtgatcgagggcctgaaggaggccgacaaggacgagttctgcagatgcgagctgaagctgcagaagtggtacggggacctgcggggaaagcccttcgccatcgaagccgagaacagcatcctggacatcagcggcttcagcaagcagtacaactgtgccttcatctggcagaaggacggcgtgaagaagctgaacctgtacctgatcatcaactacttcaagggcggcaagctgcggttcaagaagatcaaacctgaagccttcgaagccaacagattctacaccgtgatcaacaaaaagagcggcgagatcgtgcccatggaggtgaacttcaacttcgacgaccccaacctgatcatcctgcctctggcctttggcaagagacagggcagagaattcatctggaacgacctgctgtccctggaaaccggcagcctgaagctggccaacggaagagtgatcgagaagacactgtacaacagaagaacccggcaggatgagcctgccctgttcgtggccctgaccttcgagcggcgggaggtcctggactcctccaatatcaaaccaatgaacctgatcggcgtggcaagaggcgaaaacatccccgccgtgatcgccctgaccgaccccgagggctgcccactgagccggtttaaggatagcctgggaaacccaacccacatcctgagaatcggcgagagctataaggagaagcagcggaccatccaggccaagaaggaggtggagcagcggagagccggcggctacagccggaagtacgccagcaaagccaagaatctggcagacgatatggtgagaaacaccgctagagatctgctgtactacgccgtgacccaggatgccatgctgatcttcgccaacctgagccggggcttcggccggcagggcaagcggaccttcatggccgagagacagtacacacggatggaggactggctgaccgccaagctggcctacgagggcctgagcaagacctacctgtccaagacactggcccagtacacctccaagacatgcagcaactgtgggtttaccatcaccagcgccgactacgacagggtgctggagaagctgaagaagacagcaacaggctggatgaccacaattaacggcaaggagctgaaggtggagggccagattacctactacaacagatacaagagacagaacgtagtcaaggacctgtccgtcgagctggatagactgagcgaagaatctgtgaacaacgacatctcctcctggacaaagggcagaagcggagaagctctgagcctcctgaagaaaagattctcccatagacccgtgcaggagaagttcgtgtgcctgaactgcggcttcgagacacacgcagccgagcaagccgccctgaacatcgccagatcctggctgttcctgcggagccaggagtacaagaaataccagacaaacaagacaaccggcaacaccgataagagagccttcgtcgagacctggcagtccttttaccggaagaagcttaaggaggtgtggaaacctgccgtgcggtctggcggatctggcggaggctccatgatcaagagccaggagagcctgaccctggaggacgtggccgtggagttcacctgggaggagtggcagctgctgggccccgcccagaaggacctgtacagggacgtgatgctggagaactacagcaacctggtgagcgtgggctaccaggccagcaagcccgacgccctgttcaagctggagcagggcgagccctggaccgtggagaacgacagccacatctgccccgagatcaagaaggtgggcggcccaagcagcggcgcccctcctcccagcggcggcagcccagccggctccccaacctctaccgaggagggcacctctgagtccgccacccccgagagcggccctggcacctccaccgagcccagcgagggcagcgcacccggcagccctgccggcagccccacctccacagaggagggaaccagcaccgagcccagcgaaggcagcgccccaggcaccagcaccgagcctagtgagcaggagattaaacggatcaacaagatcagaagaagacttgtgaaagacagcaacaccaagaaggccggcaagacaggccccatgaaaaccctgctggttagagtgatgacacccgatctgagagagcggctggaaaacctgagaaagaagcctgaaaatatcccccagcccatcagcaatacatctagagccaacctgaataagctgctgaccgattacaccgaaatgaagaaggcgatcctgcatgtgtactgggaagagttccagaaggaccctgtgggcctgatgagccgggtggcccagcctgccagcaagaagatcgatcagaacaagctgaaacctgagatggacgagaagggcaacctgaccaccgccggctttgcctgctctcagtgtggccagcccctgttcgtgtacaagctggagcaggtgtctgagaagggcaaggcttacaccaactacttcggacggtgcaatgtggccgagcacgaaaagctgatcctgctggcccagctgaagcccgagaaggatagcgacgaagccgtgacatatagcctgggaaagtttgggcagagggccctggatttctacagcattcatgtgaccaaggagtccacccaccccgtgaagcccctggcccagatcgccggaaacagatacgcctccggacctgtgggaaaggccctgagcgacgcatgtatgggcacaatcgcctccttcctgtctaagtaccaggacatcatcatcgaacaccagaaggtggtgaagggcaaccagaagagactggagagcctgcgggagctggccggcaaggaaaacctggaataccctagcgtgaccctgccacctcagcctcacaccaaggagggcgttgatgcctacaacgaagtgatcgcccgggtgcgaatgtgggtgaacctgaacctgtggcagaagctgaagctaagcagagatgatgccaagcctctgctgagactgaagggattcccttcctttcctctggtcgagagacaggccaacgaagtggactggtgggacatggtgtgtaacgtgaagaagctgatcaacgagaaaaaggaggatggcaaggtgttttggcagaatctggctggctacaagagacaggaagccctgagaccatacctgagcagcgaggaagatcggaagaagggaaagaaattcgctcggtaccagctgggcgacctgctgctgcacctggaaaagaagcacggcgaggactggggaaaggtgtacgacgaggcctgggagcggattgacaagaaagtggaaggcctgagcaagcacatcaagctggaagaggaacggagaagcgaggacgcccagagcaaggccgccctgaccgactggctgcgggctaaggccagcttcgtgatcgagggcctgaaggaggccgacaaggacgagttctgcagatgcgagctgaagctgcagaagtggtacggggacctgcggggaaagcccttcgccatcgaagccgagaacagcatcctggacatcagcggcttcagcaagcagtacaactgtgccttcatctggcagaaggacggcgtgaagaagctgaacctgtacctgatcatcaactacttcaagggcggcaagctgcggttcaagaagatcaaacctgaagccttcgaagccaacagattctacaccgtgatcaacaaaaagagcggcgagatcgtgcccatggaggtgaacttcaacttcgacgaccccaacctgatcatcctgcctctggcctttggcaagagacagggcagagaattcatctggaacgacctgctgtccctggaaaccggcagcctgaagctggccaacggaagagtgatcgagaagacactgtacaacagaagaacccggcaggatgagcctgccctgttcgtggccctgaccttcgagcggcgggaggtcctggactcctccaatatcaaaccaatgaacctgatcggcgtggcaagaggcgaaaacatccccgccgtgatcgccctgaccgaccccgagggctgcccactgagccggtttaaggatagcctgggaaacccaacccacatcctgagaatcggcgagagctataaggagaagcagcggaccatccaggccaagaaggaggtggagcagcggagagccggcggctacagccggaagtacgccagcaaagccaagaatctggcagacgatatggtgagaaacaccgctagagatctgctgtactacgccgtgacccaggatgccatgctgatcttcgccaacctgagccggggcttcggccggcagggcaagcggaccttcatggccgagagacagtacacacggatggaggactggctgaccgccaagctggcctacgagggcctgagcaagacctacctgtccaagacactggcccagtacacctccaagacatgcagcaactgtgggtttaccatcaccagcgccgactacgacagggtgctggagaagctgaagaagacagcaacaggctggatgaccacaattaacggcaaggagctgaaggtggagggccagattacctactacaacagatacaagagacagaacgtagtcaaggacctgtccgtcgagctggatagactgagcgaagaatctgtgaacaacgacatctcctcctggacaaagggcagaagcggagaagctctgagcctcctgaagaaaagattctcccatagacccgtgcaggagaagttcgtgtgcctgaactgcggcttcgagacacacgcagccgagcaagccgccctgaacatcgccagatcctggctgttcctgcggagccaggagtacaagaaataccagacaaacaagacaaccggcaacaccgataagagagccttcgtcgagacctggcagtccttttaccggaagaagcttaaggaggtgtggaaacctgccgtgcggtctggcggatctggcggaggctcctatgatcaagagccaggagagcctgaccctggaggacgtggccgtggagttcacctgggaggagtggcagctgctgggccccgcccagaaggacctgtacagggacgtgatgctggagaactacagcaacctggtgagcgtgggctaccaggccagcaagcccgacgccctgttcaagctggagcagggcgagccctggaccgtggagaacgacagccacatctgccccgagatcaagaaggtgggatctggctccggcagcggccccaagaaaaagagaaaagtctaagctgccttctgcggggcttgccttctggccatgcccttcttctctcccttgcacctgtacctcttggtctttgaataaagcctgagtaggaaggctagcaaaaaaaaaaaaaaaaaaaaaaaaaaaaaaaaaaaaaaaaaaaaaaaaaaaaaaaaaaaaaaaaaaaaaaaaaaaaaaaa

SEQ ID NO: 16583 - RNA, 9485 nt, synthetic construct
  source 1..9485: mol_type = other RNA
aggaaataagagagaaaagaagagtaagaagaaatataagagccaccatggcccctaagaagaagcgtaaagtgagccggatggaacgcctcgtctacgaggtgcggcagaagtgcagaaacatcgaggacatctgcatctcctgcggatctctgaacgtgaccctggagcacccactgttcatcggcggcatgtgccagaactgtaaaaactgttttctggagtgtgcctatcaatacgacgatgacggctaccagagctactgcaccatctgttgcggcggaagagaggtgctgatgtgtggaaataacaactgctgccggtgcttctgcgtggaatgcgtggacctgctggtgggccccggcgccgcccaggccgctattaaggaagatccttggaactgctacatgtgcggccacaagggcacatacggcctgctgagacggagagaggactggcctagcagactgcagatgttcttcgccaataaccacgaccaggagttcgacccccctaaggtgtaccctcccgtccccgccgagaagagaaagcccatccgggtcctgagcctgttcgatggcatcgccaccggtctgctggtgctgaaggacctgggcatccaggtggataggtacattgcctccgaggtgtgcgaggactccatcaccgtgggaatggtgcgtcatcagggcaagatcatgtacgtgggcgacgtgcggagcgtgacacagaagcatatccaggagtggggccctttcgacctggtgatcggcggcagcccttgcaatgacctgagcatcgtgaacccagcccggaagggcctgtacgagggaaccggcagactgttcttcgagttttacagactgctgcacgacgcccggcctaaggaaggcgacgaccggcccttcttttggctgttcgagaatgtggtggccatgggagtcagcgacaagcgggatattagccggttcctggagagcaaccccgtgatgatcgatgccaaggaagtgagcgccgcccaccgggccagatacttctggggcaatctgcctggcatgaacagacccctggccagcaccgtgaacgacaagctggagctgcaggagtgcctggagcacggccggatcgccaagttcagcaaggtgagaaccatcaccacccgaagcaacagcatcaaacaaggcaaggaccagcactttcctgtgttcatgaacgagaaggaggacatcctgtggtgtaccgagatggagagagtgttcgggttcccagtccactacacagatgtcagcaacatgtctagactggccagacagagactgctgggaagaagctggtccgtccctgtgatcagacacctgttcgcccctctgaaggagtacttcgcctgcgtgagcagcggcaacagcaacgccaacagccggggccccagcttctctagcggcctggtgccactgtccctgagagggagccacatgggccccatggagatctacaaaaccgtgagcgcctggaagcggcagcctgtgcgcgtgctgagcctgtttcggaatatcgataaagtcctgaaaagcctgggattcctggagagcggctctggctccggcggtggcaccctgaagtacgtggaggatgtgacaaacgtggtcagacgggatgtggagaagtggggccccttcgatctggtgtacggcagcacccaacccctgggcagctcttgtgaccggtgccctggctggtacatgtttcagttccaccggatcctgcagtacgccctgccgagacaggagtcccagcggccattcttttggattttcatggacaacttgctgctgaccgaggatgaccaggaaactaccactcggttcctgcagaccgaagccgtgaccctgcaggacgtgagaggccgggactaccagaacgccatgcgggtgtggtccaacatccctggactgaaaagcaagcacgcacctctgacccctaaagaagaggagtacctgcaggcccaggtgcggagcagaagcaagctggacgcccctaaggtggatctgctggtgaagaattgcctcctgcccctgagagagtacttcaagtatttcagccagaatagtctgcccctgggaggcagcggcggcggcgccctggtgacatttgaggacgtcgccgtgcggttcacccaggaggaatgggctctgctggatccttctcagaaaatcctgtaccgggacgtgatgagagagacataccggaatctgacctccgtgggcatcaactgggaatgttgggaccttgaagcctgcttcagaagcctgggaagaaacctgagagtgcaggtggtgaagagaaagtgcgagctgaccaacagcggcccctgcgccgagggcggcccaagcagcggcgcccctcctcccagcggcggcagcccagccggctccccaacctctaccgaggagggcacctctgagtccgccacccccgagagcggccctggcacctccaccgagcccagcgagggcagcgcacccggcagccctgccggcagccccacctccacagaggagggaaccagcaccgagcccagcgaaggcagcgccccaggcaccagcaccgagcctagtgagcaggagattaaacggatcaacaagatcagaagaagacttgtgaaagacagcaacaccaagaaggccggcaagacaggccccatgaaaaccctgctggttagagtgatgacacccgatctgagagagcggctggaaaacctgagaaagaagcctgaaaatatcccccagcccatcagcaatacatctagagccaacctgaataagctgctgaccgattacaccgaaatgaagaaggcgatcctgcatgtgtactgggaagagttccagaaggaccctgtgggcctgatgagccgggtggcccagcctgccagcaagaagatcgatcagaacaagctgaaacctgagatggacgagaagggcaacctgaccaccgccggctttgcctgctctcagtgtggccagcccctgttcgtgtacaagctggagcaggtgtctgagaagggcaaggcttacaccaactacttcggacggtgcaatgtggccgagcacgaaaagctgatcctgctggcccagctgaagcccgagaaggatagcgacgaagccgtgacatatagcctgggaaagtttgggcagagggccctggatttctacagcattcatgtgaccaaggagtccacccaccccgtgaagcccctggcccagatcgccggaaacagatacgcctccggacctgtgggaaaggccctgagcgacgcatgtatgggcacaatcgcctccttcctgtctaagtaccaggacatcatcatcgaacaccagaaggtggtgaagggcaaccagaagagactggagagcctgcgggagctggccggcaaggaaaacctggaataccctagcgtgaccctgccacctcagcctcacaccaaggagggcgttgatgcctacaacgaagtgatcgcccgggtgcgaatgtgggtgaacctgaacctgtggcagaagctgaagctaagcagagatgatgccaagcctctgctgagactgaagggattcccttcctttcctctggtcgagagacaggccaacgaagtggactggtgggacatggtgtgtaacgtgaagaagctgatcaacgagaaaaaggaggatggcaaggtgttttggcagaatctggctggctacaagagacaggaagccctgagaccatacctgagcagcgaggaagatcggaagaagggaaagaaattcgctcggtaccagctgggcgacctgctgctgcacctggaaaagaagcacggcgaggactggggaaaggtgtacgacgaggcctgggagcggattgacaagaaagtggaaggcctgagcaagcacatcaagctggaagaggaacggagaagcgaggacgcccagagcaaggccgccctgaccgactggctgcgggctaaggccagcttcgtgatcgagggcctgaaggaggccgacaaggacgagttctgcagatgcgagctgaagctgcagaagtggtacggggacctgcggggaaagcccttcgccatcgaagccgagaacagcatcctggacatcagcggcttcagcaagcagtacaactgtgccttcatctggcagaaggacggcgtgaagaagctgaacctgtacctgatcatcaactacttcaagggcggcaagctgcggttcaagaagatcaaacctgaagccttcgaagccaacagattctacaccgtgatcaacaaaaagagcggcgagatcgtgcccatggaggtgaacttcaacttcgacgaccccaacctgatcatcctgcctctggcctttggcaagagacagggcagagaattcatctggaacgacctgctgtccctggaaaccggcagcctgaagctggccaacggaagagtgatcgagaagacactgtacaacagaagaacccggcaggatgagcctgccctgttcgtggccctgaccttcgagcggcgggaggtcctggactcctccaatatcaaaccaatgaacctgatcggcgtggcaagaggcgaaaacatccccgccgtgatcgccctgaccgaccccgagggctgcccactgagccggtttaaggatagcctgggaaacccaacccacatcctgagaatcggcgagagctataaggagaagcagcggaccatccaggccaagaaggaggtggagcagcggagagccggcggctacagccggaagtacgccagcaaagccaagaatctggcagacgatatggtgagaaacaccgctagagatctgctgtactacgccgtgacccaggatgccatgctgatcttcgccaacctgagccggggcttcggccggcagggcaagcggaccttcatggccgagagacagtacacacggatggaggactggctgaccgccaagctggcctacgagggcctgagcaagacctacctgtccaagacactggcccagtacacctccaagacatgcagcaactgtgggtttaccatcaccagcgccgactacgacagggtgctggagaagctgaagaagacagcaacaggctggatgaccacaattaacggcaaggagctgaaggtggagggccagattacctactacaacagatacaagagacagaacgtagtcaaggacctgtccgtcgagctggatagactgagcgaagaatctgtgaacaacgacatctcctcctggacaaagggcagaagcggagaagctctgagcctcctgaagaaaagattctcccatagacccgtgcaggagaagttcgtgtgcctgaactgcggcttcgagacacacgcagccgagcaagccgccctgaacatcgccagatcctggctgttcctgcggagccaggagtacaagaaataccagacaaacaagacaaccggcaacaccgataagagagccttcgtcgagacctggcagtccttttaccggaagaagcttaaggaggtgtggaaacctgccgtgcggtctggcggatctggcggaggctccatgttccaggtgaccttcagcgacgtggccatcgacttcagccacgaggagtggggctggctggacagcgcccagagggacctgtacaaggacgtgatggtgcagaactacgagaacctggtgagcctgggcctgagcatccccaagcccaacgtgatcgccctgctggaggagggcaaggacccctggatggtggagaggaagctgagcaccggcatgttccccgactgggacagcaggtggggcggcccaagcagcggcgcccctcctcccagcggcggcagcccagccggctccccaacctctaccgaggagggcacctctgagtccgccacccccgagagcggccctggcacctccaccgagcccagcgagggcagcgcacccggcagccctgccggcagccccacctccacagaggagggaaccagcaccgagcccagcgaaggcagcgccccaggcaccagcaccgagcctagtgagcaggagattaaacggatcaacaagatcagaagaagacttgtgaaagacagcaacaccaagaaggccggcaagacaggccccatgaaaaccctgctggttagagtgatgacacccgatctgagagagcggctggaaaacctgagaaagaagcctgaaaatatcccccagcccatcagcaatacatctagagccaacctgaataagctgctgaccgattacaccgaaatgaagaaggcgatcctgcatgtgtactgggaagagttccagaaggaccctgtgggcctgatgagccgggtggcccagcctgccagcaagaagatcgatcagaacaagctgaaacctgagatggacgagaagggcaacctgaccaccgccggctttgcctgctctcagtgtggccagcccctgttcgtgtacaagctggagcaggtgtctgagaagggcaaggcttacaccaactacttcggacggtgcaatgtggccgagcacgaaaagctgatcctgctggcccagctgaagcccgagaaggatagcgacgaagccgtgacatatagcctgggaaagtttgggcagagggccctggatttctacagcattcatgtgaccaaggagtccacccaccccgtgaagcccctggcccagatcgccggaaacagatacgcctccggacctgtgggaaaggccctgagcgacgcatgtatgggcacaatcgcctccttcctgtctaagtaccaggacatcatcatcgaacaccagaaggtggtgaagggcaaccagaagagactggagagcctgcgggagctggccggcaaggaaaacctggaataccctagcgtgaccctgccacctcagcctcacaccaaggagggcgttgatgcctacaacgaagtgatcgcccgggtgcgaatgtgggtgaacctgaacctgtggcagaagctgaagctaagcagagatgatgccaagcctctgctgagactgaagggattcccttcctttcctctggtcgagagacaggccaacgaagtggactggtgggacatggtgtgtaacgtgaagaagctgatcaacgagaaaaaggaggatggcaaggtgttttggcagaatctggctggctacaagagacaggaagccctgagaccatacctgagcagcgaggaagatcggaagaagggaaagaaattcgctcggtaccagctgggcgacctgctgctgcacctggaaaagaagcacggcgaggactggggaaaggtgtacgacgaggcctgggagcggattgacaagaaagtggaaggcctgagcaagcacatcaagctggaagaggaacggagaagcgaggacgcccagagcaaggccgccctgaccgactggctgcgggctaaggccagcttcgtgatcgagggcctgaaggaggccgacaaggacgagttctgcagatgcgagctgaagctgcagaagtggtacggggacctgcggggaaagcccttcgccatcgaagccgagaacagcatcctggacatcagcggcttcagcaagcagtacaactgtgccttcatctggcagaaggacggcgtgaagaagctgaacctgtacctgatcatcaactacttcaagggcggcaagctgcggttcaagaagatcaaacctgaagccttcgaagccaacagattctacaccgtgatcaacaaaaagagcggcgagatcgtgcccatggaggtgaacttcaacttcgacgaccccaacctgatcatcctgcctctggcctttggcaagagacagggcagagaattcatctggaacgacctgctgtccctggaaaccggcagcctgaagctggccaacggaagagtgatcgagaagacactgtacaacagaagaacccggcaggatgagcctgccctgttcgtggccctgaccttcgagcggcgggaggtcctggactcctccaatatcaaaccaatgaacctgatcggcgtggcaagaggcgaaaacatccccgccgtgatcgccctgaccgaccccgagggctgcccactgagccggtttaaggatagcctgggaaacccaacccacatcctgagaatcggcgagagctataaggagaagcagcggaccatccaggccaagaaggaggtggagcagcggagagccggcggctacagccggaagtacgccagcaaagccaagaatctggcagacgatatggtgagaaacaccgctagagatctgctgtactacgccgtgacccaggatgccatgctgatcttcgccaacctgagccggggcttcggccggcagggcaagcggaccttcatggccgagagacagtacacacggatggaggactggctgaccgccaagctggcctacgagggcctgagcaagacctacctgtccaagacactggcccagtacacctccaagacatgcagcaactgtgggtttaccatcaccagcgccgactacgacagggtgctggagaagctgaagaagacagcaacaggctggatgaccacaattaacggcaaggagctgaaggtggagggccagattacctactacaacagatacaagagacagaacgtagtcaaggacctgtccgtcgagctggatagactgagcgaagaatctgtgaacaacgacatctcctcctggacaaagggcagaagcggagaagctctgagcctcctgaagaaaagattctcccatagacccgtgcaggagaagttcgtgtgcctgaactgcggcttcgagacacacgcagccgagcaagccgccctgaacatcgccagatcctggctgttcctgcggagccaggagtacaagaaataccagacaaacaagacaaccggcaacaccgataagagagccttcgtcgagacctggcagtccttttaccggaagaagcttaaggaggtgtggaaacctgccgtgcggtctggcggatctggcggaggctcctatgttccaggtgaccttcagcgacgtggccatcgacttcagccacgaggagtggggctggctggacagcgcccagagggacctgtacaaggacgtgatggtgcagaactacgagaacctggtgagcctgggcctgagcatccccaagcccaacgtgatcgccctgctggaggagggcaaggacccctggatggtggagaggaagctgagcaccggcatgttccccgactgggacagcaggtggggatctggctccggcagcggccccaagaaaaagagaaaagtctaagctgccttctgcggggcttgccttctggccatgcccttcttctctcccttgcacctgtacctcttggtctttgaataaagcctgagtaggaaggctagcaaaaaaaaaaaaaaaaaaaaaaaaaaaaaaaaaaaaaaaaaaaaaaaaaaaaaaaaaaaaaaaaaaaaaaaaaaaaaaaa

SEQ ID NO: 16584 - RNA, 9485 nt, synthetic construct
  source 1..9485: mol_type = other RNA
aggaaataagagagaaaagaagagtaagaagaaatataagagccaccatggcccctaagaagaagcgtaaagtgagccggatggaacgcctcgtctacgaggtgcggcagaagtgcagaaacatcgaggacatctgcatctcctgcggatctctgaacgtgaccctggagcacccactgttcatcggcggcatgtgccagaactgtaaaaactgttttctggagtgtgcctatcaatacgacgatgacggctaccagagctactgcaccatctgttgcggcggaagagaggtgctgatgtgtggaaataacaactgctgccggtgcttctgcgtggaatgcgtggacctgctggtgggccccggcgccgcccaggccgctattaaggaagatccttggaactgctacatgtgcggccacaagggcacatacggcctgctgagacggagagaggactggcctagcagactgcagatgttcttcgccaataaccacgaccaggagttcgacccccctaaggtgtaccctcccgtccccgccgagaagagaaagcccatccgggtcctgagcctgttcgatggcatcgccaccggtctgctggtgctgaaggacctgggcatccaggtggataggtacattgcctccgaggtgtgcgaggactccatcaccgtgggaatggtgcgtcatcagggcaagatcatgtacgtgggcgacgtgcggagcgtgacacagaagcatatccaggagtggggccctttcgacctggtgatcggcggcagcccttgcaatgacctgagcatcgtgaacccagcccggaagggcctgtacgagggaaccggcagactgttcttcgagttttacagactgctgcacgacgcccggcctaaggaaggcgacgaccggcccttcttttggctgttcgagaatgtggtggccatgggagtcagcgacaagcgggatattagccggttcctggagagcaaccccgtgatgatcgatgccaaggaagtgagcgccgcccaccgggccagatacttctggggcaatctgcctggcatgaacagacccctggccagcaccgtgaacgacaagctggagctgcaggagtgcctggagcacggccggatcgccaagttcagcaaggtgagaaccatcaccacccgaagcaacagcatcaaacaaggcaaggaccagcactttcctgtgttcatgaacgagaaggaggacatcctgtggtgtaccgagatggagagagtgttcgggttcccagtccactacacagatgtcagcaacatgtctagactggccagacagagactgctgggaagaagctggtccgtccctgtgatcagacacctgttcgcccctctgaaggagtacttcgcctgcgtgagcagcggcaacagcaacgccaacagccggggccccagcttctctagcggcctggtgccactgtccctgagagggagccacatgggccccatggagatctacaaaaccgtgagcgcctggaagcggcagcctgtgcgcgtgctgagcctgtttcggaatatcgataaagtcctgaaaagcctgggattcctggagagcggctctggctccggcggtggcaccctgaagtacgtggaggatgtgacaaacgtggtcagacgggatgtggagaagtggggccccttcgatctggtgtacggcagcacccaacccctgggcagctcttgtgaccggtgccctggctggtacatgtttcagttccaccggatcctgcagtacgccctgccgagacaggagtcccagcggccattcttttggattttcatggacaacttgctgctgaccgaggatgaccaggaaactaccactcggttcctgcagaccgaagccgtgaccctgcaggacgtgagaggccgggactaccagaacgccatgcgggtgtggtccaacatccctggactgaaaagcaagcacgcacctctgacccctaaagaagaggagtacctgcaggcccaggtgcggagcagaagcaagctggacgcccctaaggtggatctgctggtgaagaattgcctcctgcccctgagagagtacttcaagtatttcagccagaatagtctgcccctgggaggcagcggcggcggcgccctggtgacatttgaggacgtcgccgtgcggttcacccaggaggaatgggctctgctggatccttctcagaaaatcctgtaccgggacgtgatgagagagacataccggaatctgacctccgtgggcatcaactgggaatgttgggaccttgaagcctgcttcagaagcctgggaagaaacctgagagtgcaggtggtgaagagaaagtgcgagctgaccaacagcggcccctgcgccgagggcggcccaagcagcggcgcccctcctcccagcggcggcagcccagccggctccccaacctctaccgaggagggcacctctgagtccgccacccccgagagcggccctggcacctccaccgagcccagcgagggcagcgcacccggcagccctgccggcagccccacctccacagaggagggaaccagcaccgagcccagcgaaggcagcgccccaggcaccagcaccgagcctagtgagcaggagattaaacggatcaacaagatcagaagaagacttgtgaaagacagcaacaccaagaaggccggcaagacaggccccatgaaaaccctgctggttagagtgatgacacccgatctgagagagcggctggaaaacctgagaaagaagcctgaaaatatcccccagcccatcagcaatacatctagagccaacctgaataagctgctgaccgattacaccgaaatgaagaaggcgatcctgcatgtgtactgggaagagttccagaaggaccctgtgggcctgatgagccgggtggcccagcctgccagcaagaagatcgatcagaacaagctgaaacctgagatggacgagaagggcaacctgaccaccgccggctttgcctgctctcagtgtggccagcccctgttcgtgtacaagctggagcaggtgtctgagaagggcaaggcttacaccaactacttcggacggtgcaatgtggccgagcacgaaaagctgatcctgctggcccagctgaagcccgagaaggatagcgacgaagccgtgacatatagcctgggaaagtttgggcagagggccctggatttctacagcattcatgtgaccaaggagtccacccaccccgtgaagcccctggcccagatcgccggaaacagatacgcctccggacctgtgggaaaggccctgagcgacgcatgtatgggcacaatcgcctccttcctgtctaagtaccaggacatcatcatcgaacaccagaaggtggtgaagggcaaccagaagagactggagagcctgcgggagctggccggcaaggaaaacctggaataccctagcgtgaccctgccacctcagcctcacaccaaggagggcgttgatgcctacaacgaagtgatcgcccgggtgcgaatgtgggtgaacctgaacctgtggcagaagctgaagctaagcagagatgatgccaagcctctgctgagactgaagggattcccttcctttcctctggtcgagagacaggccaacgaagtggactggtgggacatggtgtgtaacgtgaagaagctgatcaacgagaaaaaggaggatggcaaggtgttttggcagaatctggctggctacaagagacaggaagccctgagaccatacctgagcagcgaggaagatcggaagaagggaaagaaattcgctcggtaccagctgggcgacctgctgctgcacctggaaaagaagcacggcgaggactggggaaaggtgtacgacgaggcctgggagcggattgacaagaaagtggaaggcctgagcaagcacatcaagctggaagaggaacggagaagcgaggacgcccagagcaaggccgccctgaccgactggctgcgggctaaggccagcttcgtgatcgagggcctgaaggaggccgacaaggacgagttctgcagatgcgagctgaagctgcagaagtggtacggggacctgcggggaaagcccttcgccatcgaagccgagaacagcatcctggacatcagcggcttcagcaagcagtacaactgtgccttcatctggcagaaggacggcgtgaagaagctgaacctgtacctgatcatcaactacttcaagggcggcaagctgcggttcaagaagatcaaacctgaagccttcgaagccaacagattctacaccgtgatcaacaaaaagagcggcgagatcgtgcccatggaggtgaacttcaacttcgacgaccccaacctgatcatcctgcctctggcctttggcaagagacagggcagagaattcatctggaacgacctgctgtccctggaaaccggcagcctgaagctggccaacggaagagtgatcgagaagacactgtacaacagaagaacccggcaggatgagcctgccctgttcgtggccctgaccttcgagcggcgggaggtcctggactcctccaatatcaaaccaatgaacctgatcggcgtggcaagaggcgaaaacatccccgccgtgatcgccctgaccgaccccgagggctgcccactgagccggtttaaggatagcctgggaaacccaacccacatcctgagaatcggcgagagctataaggagaagcagcggaccatccaggccaagaaggaggtggagcagcggagagccggcggctacagccggaagtacgccagcaaagccaagaatctggcagacgatatggtgagaaacaccgctagagatctgctgtactacgccgtgacccaggatgccatgctgatcttcgccaacctgagccggggcttcggccggcagggcaagcggaccttcatggccgagagacagtacacacggatggaggactggctgaccgccaagctggcctacgagggcctgagcaagacctacctgtccaagacactggcccagtacacctccaagacatgcagcaactgtgggtttaccatcaccagcgccgactacgacagggtgctggagaagctgaagaagacagcaacaggctggatgaccacaattaacggcaaggagctgaaggtggagggccagattacctactacaacagatacaagagacagaacgtagtcaaggacctgtccgtcgagctggatagactgagcgaagaatctgtgaacaacgacatctcctcctggacaaagggcagaagcggagaagctctgagcctcctgaagaaaagattctcccatagacccgtgcaggagaagttcgtgtgcctgaactgcggcttcgagacacacgcagccgagcaagccgccctgaacatcgccagatcctggctgttcctgcggagccaggagtacaagaaataccagacaaacaagacaaccggcaacaccgataagagagccttcgtcgagacctggcagtccttttaccggaagaagcttaaggaggtgtggaaacctgccgtgcggtctggcggatctggcggaggctccccccaggagcccgtgaccttcgccgacgtggccgtgctgttcacccccgaggagtggctgttcctggacagcagccagaagagcctgtacagggacgtgatgctggagaactacaggaacgtggccagcgtgggcgaccagctgtgcaagaccaggatgagcagccacctggagcagagggaggagctgtgcgtgaccgagaggggcatcttccccggcgcccacctgggcccccacctgcagggcggcccaagcagcggcgcccctcctcccagcggcggcagcccagccggctccccaacctctaccgaggagggcacctctgagtccgccacccccgagagcggccctggcacctccaccgagcccagcgagggcagcgcacccggcagccctgccggcagccccacctccacagaggagggaaccagcaccgagcccagcgaaggcagcgccccaggcaccagcaccgagcctagtgagcaggagattaaacggatcaacaagatcagaagaagacttgtgaaagacagcaacaccaagaaggccggcaagacaggccccatgaaaaccctgctggttagagtgatgacacccgatctgagagagcggctggaaaacctgagaaagaagcctgaaaatatcccccagcccatcagcaatacatctagagccaacctgaataagctgctgaccgattacaccgaaatgaagaaggcgatcctgcatgtgtactgggaagagttccagaaggaccctgtgggcctgatgagccgggtggcccagcctgccagcaagaagatcgatcagaacaagctgaaacctgagatggacgagaagggcaacctgaccaccgccggctttgcctgctctcagtgtggccagcccctgttcgtgtacaagctggagcaggtgtctgagaagggcaaggcttacaccaactacttcggacggtgcaatgtggccgagcacgaaaagctgatcctgctggcccagctgaagcccgagaaggatagcgacgaagccgtgacatatagcctgggaaagtttgggcagagggccctggatttctacagcattcatgtgaccaaggagtccacccaccccgtgaagcccctggcccagatcgccggaaacagatacgcctccggacctgtgggaaaggccctgagcgacgcatgtatgggcacaatcgcctccttcctgtctaagtaccaggacatcatcatcgaacaccagaaggtggtgaagggcaaccagaagagactggagagcctgcgggagctggccggcaaggaaaacctggaataccctagcgtgaccctgccacctcagcctcacaccaaggagggcgttgatgcctacaacgaagtgatcgcccgggtgcgaatgtgggtgaacctgaacctgtggcagaagctgaagctaagcagagatgatgccaagcctctgctgagactgaagggattcccttcctttcctctggtcgagagacaggccaacgaagtggactggtgggacatggtgtgtaacgtgaagaagctgatcaacgagaaaaaggaggatggcaaggtgttttggcagaatctggctggctacaagagacaggaagccctgagaccatacctgagcagcgaggaagatcggaagaagggaaagaaattcgctcggtaccagctgggcgacctgctgctgcacctggaaaagaagcacggcgaggactggggaaaggtgtacgacgaggcctgggagcggattgacaagaaagtggaaggcctgagcaagcacatcaagctggaagaggaacggagaagcgaggacgcccagagcaaggccgccctgaccgactggctgcgggctaaggccagcttcgtgatcgagggcctgaaggaggccgacaaggacgagttctgcagatgcgagctgaagctgcagaagtggtacggggacctgcggggaaagcccttcgccatcgaagccgagaacagcatcctggacatcagcggcttcagcaagcagtacaactgtgccttcatctggcagaaggacggcgtgaagaagctgaacctgtacctgatcatcaactacttcaagggcggcaagctgcggttcaagaagatcaaacctgaagccttcgaagccaacagattctacaccgtgatcaacaaaaagagcggcgagatcgtgcccatggaggtgaacttcaacttcgacgaccccaacctgatcatcctgcctctggcctttggcaagagacagggcagagaattcatctggaacgacctgctgtccctggaaaccggcagcctgaagctggccaacggaagagtgatcgagaagacactgtacaacagaagaacccggcaggatgagcctgccctgttcgtggccctgaccttcgagcggcgggaggtcctggactcctccaatatcaaaccaatgaacctgatcggcgtggcaagaggcgaaaacatccccgccgtgatcgccctgaccgaccccgagggctgcccactgagccggtttaaggatagcctgggaaacccaacccacatcctgagaatcggcgagagctataaggagaagcagcggaccatccaggccaagaaggaggtggagcagcggagagccggcggctacagccggaagtacgccagcaaagccaagaatctggcagacgatatggtgagaaacaccgctagagatctgctgtactacgccgtgacccaggatgccatgctgatcttcgccaacctgagccggggcttcggccggcagggcaagcggaccttcatggccgagagacagtacacacggatggaggactggctgaccgccaagctggcctacgagggcctgagcaagacctacctgtccaagacactggcccagtacacctccaagacatgcagcaactgtgggtttaccatcaccagcgccgactacgacagggtgctggagaagctgaagaagacagcaacaggctggatgaccacaattaacggcaaggagctgaaggtggagggccagattacctactacaacagatacaagagacagaacgtagtcaaggacctgtccgtcgagctggatagactgagcgaagaatctgtgaacaacgacatctcctcctggacaaagggcagaagcggagaagctctgagcctcctgaagaaaagattctcccatagacccgtgcaggagaagttcgtgtgcctgaactgcggcttcgagacacacgcagccgagcaagccgccctgaacatcgccagatcctggctgttcctgcggagccaggagtacaagaaataccagacaaacaagacaaccggcaacaccgataagagagccttcgtcgagacctggcagtccttttaccggaagaagcttaaggaggtgtggaaacctgccgtgcggtctggcggatctggcggaggctcctccccaggagcccgtgaccttcgccgacgtggccgtgctgttcacccccgaggagtggctgttcctggacagcagccagaagagcctgtacagggacgtgatgctggagaactacaggaacgtggccagcgtgggcgaccagctgtgcaagaccaggatgagcagccacctggagcagagggaggagctgtgcgtgaccgagaggggcatcttccccggcgcccacctgggcccccacctgcagggatctggctccggcagcggccccaagaaaaagagaaaagtctaagctgccttctgcggggcttgccttctggccatgcccttcttctctcccttgcacctgtacctcttggtctttgaataaagcctgagtaggaaggctagcaaaaaaaaaaaaaaaaaaaaaaaaaaaaaaaaaaaaaaaaaaaaaaaaaaaaaaaaaaaaaaaaaaaaaaaaaaaaaaaa

SEQ ID NO: 16585 - RNA, 9485 nt, synthetic construct
  source 1..9485: mol_type = other RNA
aggaaataagagagaaaagaagagtaagaagaaatataagagccaccatggcccctaagaagaagcgtaaagtgagccggatggaacgcctcgtctacgaggtgcggcagaagtgcagaaacatcgaggacatctgcatctcctgcggatctctgaacgtgaccctggagcacccactgttcatcggcggcatgtgccagaactgtaaaaactgttttctggagtgtgcctatcaatacgacgatgacggctaccagagctactgcaccatctgttgcggcggaagagaggtgctgatgtgtggaaataacaactgctgccggtgcttctgcgtggaatgcgtggacctgctggtgggccccggcgccgcccaggccgctattaaggaagatccttggaactgctacatgtgcggccacaagggcacatacggcctgctgagacggagagaggactggcctagcagactgcagatgttcttcgccaataaccacgaccaggagttcgacccccctaaggtgtaccctcccgtccccgccgagaagagaaagcccatccgggtcctgagcctgttcgatggcatcgccaccggtctgctggtgctgaaggacctgggcatccaggtggataggtacattgcctccgaggtgtgcgaggactccatcaccgtgggaatggtgcgtcatcagggcaagatcatgtacgtgggcgacgtgcggagcgtgacacagaagcatatccaggagtggggccctttcgacctggtgatcggcggcagcccttgcaatgacctgagcatcgtgaacccagcccggaagggcctgtacgagggaaccggcagactgttcttcgagttttacagactgctgcacgacgcccggcctaaggaaggcgacgaccggcccttcttttggctgttcgagaatgtggtggccatgggagtcagcgacaagcgggatattagccggttcctggagagcaaccccgtgatgatcgatgccaaggaagtgagcgccgcccaccgggccagatacttctggggcaatctgcctggcatgaacagacccctggccagcaccgtgaacgacaagctggagctgcaggagtgcctggagcacggccggatcgccaagttcagcaaggtgagaaccatcaccacccgaagcaacagcatcaaacaaggcaaggaccagcactttcctgtgttcatgaacgagaaggaggacatcctgtggtgtaccgagatggagagagtgttcgggttcccagtccactacacagatgtcagcaacatgtctagactggccagacagagactgctgggaagaagctggtccgtccctgtgatcagacacctgttcgcccctctgaaggagtacttcgcctgcgtgagcagcggcaacagcaacgccaacagccggggccccagcttctctagcggcctggtgccactgtccctgagagggagccacatgggccccatggagatctacaaaaccgtgagcgcctggaagcggcagcctgtgcgcgtgctgagcctgtttcggaatatcgataaagtcctgaaaagcctgggattcctggagagcggctctggctccggcggtggcaccctgaagtacgtggaggatgtgacaaacgtggtcagacgggatgtggagaagtggggccccttcgatctggtgtacggcagcacccaacccctgggcagctcttgtgaccggtgccctggctggtacatgtttcagttccaccggatcctgcagtacgccctgccgagacaggagtcccagcggccattcttttggattttcatggacaacttgctgctgaccgaggatgaccaggaaactaccactcggttcctgcagaccgaagccgtgaccctgcaggacgtgagaggccgggactaccagaacgccatgcgggtgtggtccaacatccctggactgaaaagcaagcacgcacctctgacccctaaagaagaggagtacctgcaggcccaggtgcggagcagaagcaagctggacgcccctaaggtggatctgctggtgaagaattgcctcctgcccctgagagagtacttcaagtatttcagccagaatagtctgcccctgggaggcagcggcggcggcgccctggtgacatttgaggacgtcgccgtgcggttcacccaggaggaatgggctctgctggatccttctcagaaaatcctgtaccgggacgtgatgagagagacataccggaatctgacctccgtgggcatcaactgggaatgttgggaccttgaagcctgcttcagaagcctgggaagaaacctgagagtgcaggtggtgaagagaaagtgcgagctgaccaacagcggcccctgcgccgagggcggcccaagcagcggcgcccctcctcccagcggcggcagcccagccggctccccaacctctaccgaggagggcacctctgagtccgccacccccgagagcggccctggcacctccaccgagcccagcgagggcagcgcacccggcagccctgccggcagccccacctccacagaggagggaaccagcaccgagcccagcgaaggcagcgccccaggcaccagcaccgagcctagtgagcaggagattaaacggatcaacaagatcagaagaagacttgtgaaagacagcaacaccaagaaggccggcaagacaggccccatgaaaaccctgctggttagagtgatgacacccgatctgagagagcggctggaaaacctgagaaagaagcctgaaaatatcccccagcccatcagcaatacatctagagccaacctgaataagctgctgaccgattacaccgaaatgaagaaggcgatcctgcatgtgtactgggaagagttccagaaggaccctgtgggcctgatgagccgggtggcccagcctgccagcaagaagatcgatcagaacaagctgaaacctgagatggacgagaagggcaacctgaccaccgccggctttgcctgctctcagtgtggccagcccctgttcgtgtacaagctggagcaggtgtctgagaagggcaaggcttacaccaactacttcggacggtgcaatgtggccgagcacgaaaagctgatcctgctggcccagctgaagcccgagaaggatagcgacgaagccgtgacatatagcctgggaaagtttgggcagagggccctggatttctacagcattcatgtgaccaaggagtccacccaccccgtgaagcccctggcccagatcgccggaaacagatacgcctccggacctgtgggaaaggccctgagcgacgcatgtatgggcacaatcgcctccttcctgtctaagtaccaggacatcatcatcgaacaccagaaggtggtgaagggcaaccagaagagactggagagcctgcgggagctggccggcaaggaaaacctggaataccctagcgtgaccctgccacctcagcctcacaccaaggagggcgttgatgcctacaacgaagtgatcgcccgggtgcgaatgtgggtgaacctgaacctgtggcagaagctgaagctaagcagagatgatgccaagcctctgctgagactgaagggattcccttcctttcctctggtcgagagacaggccaacgaagtggactggtgggacatggtgtgtaacgtgaagaagctgatcaacgagaaaaaggaggatggcaaggtgttttggcagaatctggctggctacaagagacaggaagccctgagaccatacctgagcagcgaggaagatcggaagaagggaaagaaattcgctcggtaccagctgggcgacctgctgctgcacctggaaaagaagcacggcgaggactggggaaaggtgtacgacgaggcctgggagcggattgacaagaaagtggaaggcctgagcaagcacatcaagctggaagaggaacggagaagcgaggacgcccagagcaaggccgccctgaccgactggctgcgggctaaggccagcttcgtgatcgagggcctgaaggaggccgacaaggacgagttctgcagatgcgagctgaagctgcagaagtggtacggggacctgcggggaaagcccttcgccatcgaagccgagaacagcatcctggacatcagcggcttcagcaagcagtacaactgtgccttcatctggcagaaggacggcgtgaagaagctgaacctgtacctgatcatcaactacttcaagggcggcaagctgcggttcaagaagatcaaacctgaagccttcgaagccaacagattctacaccgtgatcaacaaaaagagcggcgagatcgtgcccatggaggtgaacttcaacttcgacgaccccaacctgatcatcctgcctctggcctttggcaagagacagggcagagaattcatctggaacgacctgctgtccctggaaaccggcagcctgaagctggccaacggaagagtgatcgagaagacactgtacaacagaagaacccggcaggatgagcctgccctgttcgtggccctgaccttcgagcggcgggaggtcctggactcctccaatatcaaaccaatgaacctgatcggcgtggcaagaggcgaaaacatccccgccgtgatcgccctgaccgaccccgagggctgcccactgagccggtttaaggatagcctgggaaacccaacccacatcctgagaatcggcgagagctataaggagaagcagcggaccatccaggccaagaaggaggtggagcagcggagagccggcggctacagccggaagtacgccagcaaagccaagaatctggcagacgatatggtgagaaacaccgctagagatctgctgtactacgccgtgacccaggatgccatgctgatcttcgccaacctgagccggggcttcggccggcagggcaagcggaccttcatggccgagagacagtacacacggatggaggactggctgaccgccaagctggcctacgagggcctgagcaagacctacctgtccaagacactggcccagtacacctccaagacatgcagcaactgtgggtttaccatcaccagcgccgactacgacagggtgctggagaagctgaagaagacagcaacaggctggatgaccacaattaacggcaaggagctgaaggtggagggccagattacctactacaacagatacaagagacagaacgtagtcaaggacctgtccgtcgagctggatagactgagcgaagaatctgtgaacaacgacatctcctcctggacaaagggcagaagcggagaagctctgagcctcctgaagaaaagattctcccatagacccgtgcaggagaagttcgtgtgcctgaactgcggcttcgagacacacgcagccgagcaagccgccctgaacatcgccagatcctggctgttcctgcggagccaggagtacaagaaataccagacaaacaagacaaccggcaacaccgataagagagccttcgtcgagacctggcagtccttttaccggaagaagcttaaggaggtgtggaaacctgccgtgcggtctggcggatctggcggaggctccatgatcaacgcccaggagctgctgaccctggaggacgtgaccgtggagttcacctgggaggagtggcagctgctggaccccttccagaaggacctgtacagggacgtgaccctggagatctacagcaacctggtgagcatgggctaccaggtgagcaagcccgacgccctgagcaagctggagcagggcgaggagccctggaccatggaggacgagaggcacagcaggatctgccccggcaccggcggcccaagcagcggcgcccctcctcccagcggcggcagcccagccggctccccaacctctaccgaggagggcacctctgagtccgccacccccgagagcggccctggcacctccaccgagcccagcgagggcagcgcacccggcagccctgccggcagccccacctccacagaggagggaaccagcaccgagcccagcgaaggcagcgccccaggcaccagcaccgagcctagtgagcaggagattaaacggatcaacaagatcagaagaagacttgtgaaagacagcaacaccaagaaggccggcaagacaggccccatgaaaaccctgctggttagagtgatgacacccgatctgagagagcggctggaaaacctgagaaagaagcctgaaaatatcccccagcccatcagcaatacatctagagccaacctgaataagctgctgaccgattacaccgaaatgaagaaggcgatcctgcatgtgtactgggaagagttccagaaggaccctgtgggcctgatgagccgggtggcccagcctgccagcaagaagatcgatcagaacaagctgaaacctgagatggacgagaagggcaacctgaccaccgccggctttgcctgctctcagtgtggccagcccctgttcgtgtacaagctggagcaggtgtctgagaagggcaaggcttacaccaactacttcggacggtgcaatgtggccgagcacgaaaagctgatcctgctggcccagctgaagcccgagaaggatagcgacgaagccgtgacatatagcctgggaaagtttgggcagagggccctggatttctacagcattcatgtgaccaaggagtccacccaccccgtgaagcccctggcccagatcgccggaaacagatacgcctccggacctgtgggaaaggccctgagcgacgcatgtatgggcacaatcgcctccttcctgtctaagtaccaggacatcatcatcgaacaccagaaggtggtgaagggcaaccagaagagactggagagcctgcgggagctggccggcaaggaaaacctggaataccctagcgtgaccctgccacctcagcctcacaccaaggagggcgttgatgcctacaacgaagtgatcgcccgggtgcgaatgtgggtgaacctgaacctgtggcagaagctgaagctaagcagagatgatgccaagcctctgctgagactgaagggattcccttcctttcctctggtcgagagacaggccaacgaagtggactggtgggacatggtgtgtaacgtgaagaagctgatcaacgagaaaaaggaggatggcaaggtgttttggcagaatctggctggctacaagagacaggaagccctgagaccatacctgagcagcgaggaagatcggaagaagggaaagaaattcgctcggtaccagctgggcgacctgctgctgcacctggaaaagaagcacggcgaggactggggaaaggtgtacgacgaggcctgggagcggattgacaagaaagtggaaggcctgagcaagcacatcaagctggaagaggaacggagaagcgaggacgcccagagcaaggccgccctgaccgactggctgcgggctaaggccagcttcgtgatcgagggcctgaaggaggccgacaaggacgagttctgcagatgcgagctgaagctgcagaagtggtacggggacctgcggggaaagcccttcgccatcgaagccgagaacagcatcctggacatcagcggcttcagcaagcagtacaactgtgccttcatctggcagaaggacggcgtgaagaagctgaacctgtacctgatcatcaactacttcaagggcggcaagctgcggttcaagaagatcaaacctgaagccttcgaagccaacagattctacaccgtgatcaacaaaaagagcggcgagatcgtgcccatggaggtgaacttcaacttcgacgaccccaacctgatcatcctgcctctggcctttggcaagagacagggcagagaattcatctggaacgacctgctgtccctggaaaccggcagcctgaagctggccaacggaagagtgatcgagaagacactgtacaacagaagaacccggcaggatgagcctgccctgttcgtggccctgaccttcgagcggcgggaggtcctggactcctccaatatcaaaccaatgaacctgatcggcgtggcaagaggcgaaaacatccccgccgtgatcgccctgaccgaccccgagggctgcccactgagccggtttaaggatagcctgggaaacccaacccacatcctgagaatcggcgagagctataaggagaagcagcggaccatccaggccaagaaggaggtggagcagcggagagccggcggctacagccggaagtacgccagcaaagccaagaatctggcagacgatatggtgagaaacaccgctagagatctgctgtactacgccgtgacccaggatgccatgctgatcttcgccaacctgagccggggcttcggccggcagggcaagcggaccttcatggccgagagacagtacacacggatggaggactggctgaccgccaagctggcctacgagggcctgagcaagacctacctgtccaagacactggcccagtacacctccaagacatgcagcaactgtgggtttaccatcaccagcgccgactacgacagggtgctggagaagctgaagaagacagcaacaggctggatgaccacaattaacggcaaggagctgaaggtggagggccagattacctactacaacagatacaagagacagaacgtagtcaaggacctgtccgtcgagctggatagactgagcgaagaatctgtgaacaacgacatctcctcctggacaaagggcagaagcggagaagctctgagcctcctgaagaaaagattctcccatagacccgtgcaggagaagttcgtgtgcctgaactgcggcttcgagacacacgcagccgagcaagccgccctgaacatcgccagatcctggctgttcctgcggagccaggagtacaagaaataccagacaaacaagacaaccggcaacaccgataagagagccttcgtcgagacctggcagtccttttaccggaagaagcttaaggaggtgtggaaacctgccgtgcggtctggcggatctggcggaggctcctatgatcaacgcccaggagctgctgaccctggaggacgtgaccgtggagttcacctgggaggagtggcagctgctggaccccttccagaaggacctgtacagggacgtgaccctggagatctacagcaacctggtgagcatgggctaccaggtgagcaagcccgacgccctgagcaagctggagcagggcgaggagccctggaccatggaggacgagaggcacagcaggatctgccccggcaccggatctggctccggcagcggccccaagaaaaagagaaaagtctaagctgccttctgcggggcttgccttctggccatgcccttcttctctcccttgcacctgtacctcttggtctttgaataaagcctgagtaggaaggctagcaaaaaaaaaaaaaaaaaaaaaaaaaaaaaaaaaaaaaaaaaaaaaaaaaaaaaaaaaaaaaaaaaaaaaaaaaaaaaaaa

SEQ ID NO: 16586 - RNA, 9485 nt, synthetic construct
  source 1..9485: mol_type = other RNA
aggaaataagagagaaaagaagagtaagaagaaatataagagccaccatggcccctaagaagaagcgtaaagtgagccggatggaacgcctcgtctacgaggtgcggcagaagtgcagaaacatcgaggacatctgcatctcctgcggatctctgaacgtgaccctggagcacccactgttcatcggcggcatgtgccagaactgtaaaaactgttttctggagtgtgcctatcaatacgacgatgacggctaccagagctactgcaccatctgttgcggcggaagagaggtgctgatgtgtggaaataacaactgctgccggtgcttctgcgtggaatgcgtggacctgctggtgggccccggcgccgcccaggccgctattaaggaagatccttggaactgctacatgtgcggccacaagggcacatacggcctgctgagacggagagaggactggcctagcagactgcagatgttcttcgccaataaccacgaccaggagttcgacccccctaaggtgtaccctcccgtccccgccgagaagagaaagcccatccgggtcctgagcctgttcgatggcatcgccaccggtctgctggtgctgaaggacctgggcatccaggtggataggtacattgcctccgaggtgtgcgaggactccatcaccgtgggaatggtgcgtcatcagggcaagatcatgtacgtgggcgacgtgcggagcgtgacacagaagcatatccaggagtggggccctttcgacctggtgatcggcggcagcccttgcaatgacctgagcatcgtgaacccagcccggaagggcctgtacgagggaaccggcagactgttcttcgagttttacagactgctgcacgacgcccggcctaaggaaggcgacgaccggcccttcttttggctgttcgagaatgtggtggccatgggagtcagcgacaagcgggatattagccggttcctggagagcaaccccgtgatgatcgatgccaaggaagtgagcgccgcccaccgggccagatacttctggggcaatctgcctggcatgaacagacccctggccagcaccgtgaacgacaagctggagctgcaggagtgcctggagcacggccggatcgccaagttcagcaaggtgagaaccatcaccacccgaagcaacagcatcaaacaaggcaaggaccagcactttcctgtgttcatgaacgagaaggaggacatcctgtggtgtaccgagatggagagagtgttcgggttcccagtccactacacagatgtcagcaacatgtctagactggccagacagagactgctgggaagaagctggtccgtccctgtgatcagacacctgttcgcccctctgaaggagtacttcgcctgcgtgagcagcggcaacagcaacgccaacagccggggccccagcttctctagcggcctggtgccactgtccctgagagggagccacatgggccccatggagatctacaaaaccgtgagcgcctggaagcggcagcctgtgcgcgtgctgagcctgtttcggaatatcgataaagtcctgaaaagcctgggattcctggagagcggctctggctccggcggtggcaccctgaagtacgtggaggatgtgacaaacgtggtcagacgggatgtggagaagtggggccccttcgatctggtgtacggcagcacccaacccctgggcagctcttgtgaccggtgccctggctggtacatgtttcagttccaccggatcctgcagtacgccctgccgagacaggagtcccagcggccattcttttggattttcatggacaacttgctgctgaccgaggatgaccaggaaactaccactcggttcctgcagaccgaagccgtgaccctgcaggacgtgagaggccgggactaccagaacgccatgcgggtgtggtccaacatccctggactgaaaagcaagcacgcacctctgacccctaaagaagaggagtacctgcaggcccaggtgcggagcagaagcaagctggacgcccctaaggtggatctgctggtgaagaattgcctcctgcccctgagagagtacttcaagtatttcagccagaatagtctgcccctgggaggcagcggcggcggcgccctggtgacatttgaggacgtcgccgtgcggttcacccaggaggaatgggctctgctggatccttctcagaaaatcctgtaccgggacgtgatgagagagacataccggaatctgacctccgtgggcatcaactgggaatgttgggaccttgaagcctgcttcagaagcctgggaagaaacctgagagtgcaggtggtgaagagaaagtgcgagctgaccaacagcggcccctgcgccgagggcggcccaagcagcggcgcccctcctcccagcggcggcagcccagccggctccccaacctctaccgaggagggcacctctgagtccgccacccccgagagcggccctggcacctccaccgagcccagcgagggcagcgcacccggcagccctgccggcagccccacctccacagaggagggaaccagcaccgagcccagcgaaggcagcgccccaggcaccagcaccgagcctagtgagcaggagattaaacggatcaacaagatcagaagaagacttgtgaaagacagcaacaccaagaaggccggcaagacaggccccatgaaaaccctgctggttagagtgatgacacccgatctgagagagcggctggaaaacctgagaaagaagcctgaaaatatcccccagcccatcagcaatacatctagagccaacctgaataagctgctgaccgattacaccgaaatgaagaaggcgatcctgcatgtgtactgggaagagttccagaaggaccctgtgggcctgatgagccgggtggcccagcctgccagcaagaagatcgatcagaacaagctgaaacctgagatggacgagaagggcaacctgaccaccgccggctttgcctgctctcagtgtggccagcccctgttcgtgtacaagctggagcaggtgtctgagaagggcaaggcttacaccaactacttcggacggtgcaatgtggccgagcacgaaaagctgatcctgctggcccagctgaagcccgagaaggatagcgacgaagccgtgacatatagcctgggaaagtttgggcagagggccctggatttctacagcattcatgtgaccaaggagtccacccaccccgtgaagcccctggcccagatcgccggaaacagatacgcctccggacctgtgggaaaggccctgagcgacgcatgtatgggcacaatcgcctccttcctgtctaagtaccaggacatcatcatcgaacaccagaaggtggtgaagggcaaccagaagagactggagagcctgcgggagctggccggcaaggaaaacctggaataccctagcgtgaccctgccacctcagcctcacaccaaggagggcgttgatgcctacaacgaagtgatcgcccgggtgcgaatgtgggtgaacctgaacctgtggcagaagctgaagctaagcagagatgatgccaagcctctgctgagactgaagggattcccttcctttcctctggtcgagagacaggccaacgaagtggactggtgggacatggtgtgtaacgtgaagaagctgatcaacgagaaaaaggaggatggcaaggtgttttggcagaatctggctggctacaagagacaggaagccctgagaccatacctgagcagcgaggaagatcggaagaagggaaagaaattcgctcggtaccagctgggcgacctgctgctgcacctggaaaagaagcacggcgaggactggggaaaggtgtacgacgaggcctgggagcggattgacaagaaagtggaaggcctgagcaagcacatcaagctggaagaggaacggagaagcgaggacgcccagagcaaggccgccctgaccgactggctgcgggctaaggccagcttcgtgatcgagggcctgaaggaggccgacaaggacgagttctgcagatgcgagctgaagctgcagaagtggtacggggacctgcggggaaagcccttcgccatcgaagccgagaacagcatcctggacatcagcggcttcagcaagcagtacaactgtgccttcatctggcagaaggacggcgtgaagaagctgaacctgtacctgatcatcaactacttcaagggcggcaagctgcggttcaagaagatcaaacctgaagccttcgaagccaacagattctacaccgtgatcaacaaaaagagcggcgagatcgtgcccatggaggtgaacttcaacttcgacgaccccaacctgatcatcctgcctctggcctttggcaagagacagggcagagaattcatctggaacgacctgctgtccctggaaaccggcagcctgaagctggccaacggaagagtgatcgagaagacactgtacaacagaagaacccggcaggatgagcctgccctgttcgtggccctgaccttcgagcggcgggaggtcctggactcctccaatatcaaaccaatgaacctgatcggcgtggcaagaggcgaaaacatccccgccgtgatcgccctgaccgaccccgagggctgcccactgagccggtttaaggatagcctgggaaacccaacccacatcctgagaatcggcgagagctataaggagaagcagcggaccatccaggccaagaaggaggtggagcagcggagagccggcggctacagccggaagtacgccagcaaagccaagaatctggcagacgatatggtgagaaacaccgctagagatctgctgtactacgccgtgacccaggatgccatgctgatcttcgccaacctgagccggggcttcggccggcagggcaagcggaccttcatggccgagagacagtacacacggatggaggactggctgaccgccaagctggcctacgagggcctgagcaagacctacctgtccaagacactggcccagtacacctccaagacatgcagcaactgtgggtttaccatcaccagcgccgactacgacagggtgctggagaagctgaagaagacagcaacaggctggatgaccacaattaacggcaaggagctgaaggtggagggccagattacctactacaacagatacaagagacagaacgtagtcaaggacctgtccgtcgagctggatagactgagcgaagaatctgtgaacaacgacatctcctcctggacaaagggcagaagcggagaagctctgagcctcctgaagaaaagattctcccatagacccgtgcaggagaagttcgtgtgcctgaactgcggcttcgagacacacgcagccgagcaagccgccctgaacatcgccagatcctggctgttcctgcggagccaggagtacaagaaataccagacaaacaagacaaccggcaacaccgataagagagccttcgtcgagacctggcagtccttttaccggaagaagcttaaggaggtgtggaaacctgccgtgcggtctggcggatctggcggaggctccccccagggcctggtgaccttcagggacgtggccgtggacttcaccagggaggagtggaggctgctgagccccaggcagaaggagctgtacaaggaggtgatgctggagaacgccggcaacctgctgagcctgggcctgcccgtgcccagggaggacgtgatcagctacttcgagcagaaggacgtgccctggatgctggagcagaaggccctgaggagcttctgccccggcggccccgtgaagggcggcccaagcagcggcgcccctcctcccagcggcggcagcccagccggctccccaacctctaccgaggagggcacctctgagtccgccacccccgagagcggccctggcacctccaccgagcccagcgagggcagcgcacccggcagccctgccggcagccccacctccacagaggagggaaccagcaccgagcccagcgaaggcagcgccccaggcaccagcaccgagcctagtgagcaggagattaaacggatcaacaagatcagaagaagacttgtgaaagacagcaacaccaagaaggccggcaagacaggccccatgaaaaccctgctggttagagtgatgacacccgatctgagagagcggctggaaaacctgagaaagaagcctgaaaatatcccccagcccatcagcaatacatctagagccaacctgaataagctgctgaccgattacaccgaaatgaagaaggcgatcctgcatgtgtactgggaagagttccagaaggaccctgtgggcctgatgagccgggtggcccagcctgccagcaagaagatcgatcagaacaagctgaaacctgagatggacgagaagggcaacctgaccaccgccggctttgcctgctctcagtgtggccagcccctgttcgtgtacaagctggagcaggtgtctgagaagggcaaggcttacaccaactacttcggacggtgcaatgtggccgagcacgaaaagctgatcctgctggcccagctgaagcccgagaaggatagcgacgaagccgtgacatatagcctgggaaagtttgggcagagggccctggatttctacagcattcatgtgaccaaggagtccacccaccccgtgaagcccctggcccagatcgccggaaacagatacgcctccggacctgtgggaaaggccctgagcgacgcatgtatgggcacaatcgcctccttcctgtctaagtaccaggacatcatcatcgaacaccagaaggtggtgaagggcaaccagaagagactggagagcctgcgggagctggccggcaaggaaaacctggaataccctagcgtgaccctgccacctcagcctcacaccaaggagggcgttgatgcctacaacgaagtgatcgcccgggtgcgaatgtgggtgaacctgaacctgtggcagaagctgaagctaagcagagatgatgccaagcctctgctgagactgaagggattcccttcctttcctctggtcgagagacaggccaacgaagtggactggtgggacatggtgtgtaacgtgaagaagctgatcaacgagaaaaaggaggatggcaaggtgttttggcagaatctggctggctacaagagacaggaagccctgagaccatacctgagcagcgaggaagatcggaagaagggaaagaaattcgctcggtaccagctgggcgacctgctgctgcacctggaaaagaagcacggcgaggactggggaaaggtgtacgacgaggcctgggagcggattgacaagaaagtggaaggcctgagcaagcacatcaagctggaagaggaacggagaagcgaggacgcccagagcaaggccgccctgaccgactggctgcgggctaaggccagcttcgtgatcgagggcctgaaggaggccgacaaggacgagttctgcagatgcgagctgaagctgcagaagtggtacggggacctgcggggaaagcccttcgccatcgaagccgagaacagcatcctggacatcagcggcttcagcaagcagtacaactgtgccttcatctggcagaaggacggcgtgaagaagctgaacctgtacctgatcatcaactacttcaagggcggcaagctgcggttcaagaagatcaaacctgaagccttcgaagccaacagattctacaccgtgatcaacaaaaagagcggcgagatcgtgcccatggaggtgaacttcaacttcgacgaccccaacctgatcatcctgcctctggcctttggcaagagacagggcagagaattcatctggaacgacctgctgtccctggaaaccggcagcctgaagctggccaacggaagagtgatcgagaagacactgtacaacagaagaacccggcaggatgagcctgccctgttcgtggccctgaccttcgagcggcgggaggtcctggactcctccaatatcaaaccaatgaacctgatcggcgtggcaagaggcgaaaacatccccgccgtgatcgccctgaccgaccccgagggctgcccactgagccggtttaaggatagcctgggaaacccaacccacatcctgagaatcggcgagagctataaggagaagcagcggaccatccaggccaagaaggaggtggagcagcggagagccggcggctacagccggaagtacgccagcaaagccaagaatctggcagacgatatggtgagaaacaccgctagagatctgctgtactacgccgtgacccaggatgccatgctgatcttcgccaacctgagccggggcttcggccggcagggcaagcggaccttcatggccgagagacagtacacacggatggaggactggctgaccgccaagctggcctacgagggcctgagcaagacctacctgtccaagacactggcccagtacacctccaagacatgcagcaactgtgggtttaccatcaccagcgccgactacgacagggtgctggagaagctgaagaagacagcaacaggctggatgaccacaattaacggcaaggagctgaaggtggagggccagattacctactacaacagatacaagagacagaacgtagtcaaggacctgtccgtcgagctggatagactgagcgaagaatctgtgaacaacgacatctcctcctggacaaagggcagaagcggagaagctctgagcctcctgaagaaaagattctcccatagacccgtgcaggagaagttcgtgtgcctgaactgcggcttcgagacacacgcagccgagcaagccgccctgaacatcgccagatcctggctgttcctgcggagccaggagtacaagaaataccagacaaacaagacaaccggcaacaccgataagagagccttcgtcgagacctggcagtccttttaccggaagaagcttaaggaggtgtggaaacctgccgtgcggtctggcggatctggcggaggctcctccccagggcctggtgaccttcagggacgtggccgtggacttcaccagggaggagtggaggctgctgagccccaggcagaaggagctgtacaaggaggtgatgctggagaacgccggcaacctgctgagcctgggcctgcccgtgcccagggaggacgtgatcagctacttcgagcagaaggacgtgccctggatgctggagcagaaggccctgaggagcttctgccccggcggccccgtgaagggatctggctccggcagcggccccaagaaaaagagaaaagtctaagctgccttctgcggggcttgccttctggccatgcccttcttctctcccttgcacctgtacctcttggtctttgaataaagcctgagtaggaaggctagcaaaaaaaaaaaaaaaaaaaaaaaaaaaaaaaaaaaaaaaaaaaaaaaaaaaaaaaaaaaaaaaaaaaaaaaaaaaaaaaa

SEQ ID NO: 16587 - RNA, 9485 nt, synthetic construct
  source 1..9485: mol_type = other RNA
aggaaataagagagaaaagaagagtaagaagaaatataagagccaccatggcccctaagaagaagcgtaaagtgagccggatggaacgcctcgtctacgaggtgcggcagaagtgcagaaacatcgaggacatctgcatctcctgcggatctctgaacgtgaccctggagcacccactgttcatcggcggcatgtgccagaactgtaaaaactgttttctggagtgtgcctatcaatacgacgatgacggctaccagagctactgcaccatctgttgcggcggaagagaggtgctgatgtgtggaaataacaactgctgccggtgcttctgcgtggaatgcgtggacctgctggtgggccccggcgccgcccaggccgctattaaggaagatccttggaactgctacatgtgcggccacaagggcacatacggcctgctgagacggagagaggactggcctagcagactgcagatgttcttcgccaataaccacgaccaggagttcgacccccctaaggtgtaccctcccgtccccgccgagaagagaaagcccatccgggtcctgagcctgttcgatggcatcgccaccggtctgctggtgctgaaggacctgggcatccaggtggataggtacattgcctccgaggtgtgcgaggactccatcaccgtgggaatggtgcgtcatcagggcaagatcatgtacgtgggcgacgtgcggagcgtgacacagaagcatatccaggagtggggccctttcgacctggtgatcggcggcagcccttgcaatgacctgagcatcgtgaacccagcccggaagggcctgtacgagggaaccggcagactgttcttcgagttttacagactgctgcacgacgcccggcctaaggaaggcgacgaccggcccttcttttggctgttcgagaatgtggtggccatgggagtcagcgacaagcgggatattagccggttcctggagagcaaccccgtgatgatcgatgccaaggaagtgagcgccgcccaccgggccagatacttctggggcaatctgcctggcatgaacagacccctggccagcaccgtgaacgacaagctggagctgcaggagtgcctggagcacggccggatcgccaagttcagcaaggtgagaaccatcaccacccgaagcaacagcatcaaacaaggcaaggaccagcactttcctgtgttcatgaacgagaaggaggacatcctgtggtgtaccgagatggagagagtgttcgggttcccagtccactacacagatgtcagcaacatgtctagactggccagacagagactgctgggaagaagctggtccgtccctgtgatcagacacctgttcgcccctctgaaggagtacttcgcctgcgtgagcagcggcaacagcaacgccaacagccggggccccagcttctctagcggcctggtgccactgtccctgagagggagccacatgggccccatggagatctacaaaaccgtgagcgcctggaagcggcagcctgtgcgcgtgctgagcctgtttcggaatatcgataaagtcctgaaaagcctgggattcctggagagcggctctggctccggcggtggcaccctgaagtacgtggaggatgtgacaaacgtggtcagacgggatgtggagaagtggggccccttcgatctggtgtacggcagcacccaacccctgggcagctcttgtgaccggtgccctggctggtacatgtttcagttccaccggatcctgcagtacgccctgccgagacaggagtcccagcggccattcttttggattttcatggacaacttgctgctgaccgaggatgaccaggaaactaccactcggttcctgcagaccgaagccgtgaccctgcaggacgtgagaggccgggactaccagaacgccatgcgggtgtggtccaacatccctggactgaaaagcaagcacgcacctctgacccctaaagaagaggagtacctgcaggcccaggtgcggagcagaagcaagctggacgcccctaaggtggatctgctggtgaagaattgcctcctgcccctgagagagtacttcaagtatttcagccagaatagtctgcccctgggaggcagcggcggcggcgccctggtgacatttgaggacgtcgccgtgcggttcacccaggaggaatgggctctgctggatccttctcagaaaatcctgtaccgggacgtgatgagagagacataccggaatctgacctccgtgggcatcaactgggaatgttgggaccttgaagcctgcttcagaagcctgggaagaaacctgagagtgcaggtggtgaagagaaagtgcgagctgaccaacagcggcccctgcgccgagggcggcccaagcagcggcgcccctcctcccagcggcggcagcccagccggctccccaacctctaccgaggagggcacctctgagtccgccacccccgagagcggccctggcacctccaccgagcccagcgagggcagcgcacccggcagccctgccggcagccccacctccacagaggagggaaccagcaccgagcccagcgaaggcagcgccccaggcaccagcaccgagcctagtgagcaggagattaaacggatcaacaagatcagaagaagacttgtgaaagacagcaacaccaagaaggccggcaagacaggccccatgaaaaccctgctggttagagtgatgacacccgatctgagagagcggctggaaaacctgagaaagaagcctgaaaatatcccccagcccatcagcaatacatctagagccaacctgaataagctgctgaccgattacaccgaaatgaagaaggcgatcctgcatgtgtactgggaagagttccagaaggaccctgtgggcctgatgagccgggtggcccagcctgccagcaagaagatcgatcagaacaagctgaaacctgagatggacgagaagggcaacctgaccaccgccggctttgcctgctctcagtgtggccagcccctgttcgtgtacaagctggagcaggtgtctgagaagggcaaggcttacaccaactacttcggacggtgcaatgtggccgagcacgaaaagctgatcctgctggcccagctgaagcccgagaaggatagcgacgaagccgtgacatatagcctgggaaagtttgggcagagggccctggatttctacagcattcatgtgaccaaggagtccacccaccccgtgaagcccctggcccagatcgccggaaacagatacgcctccggacctgtgggaaaggccctgagcgacgcatgtatgggcacaatcgcctccttcctgtctaagtaccaggacatcatcatcgaacaccagaaggtggtgaagggcaaccagaagagactggagagcctgcgggagctggccggcaaggaaaacctggaataccctagcgtgaccctgccacctcagcctcacaccaaggagggcgttgatgcctacaacgaagtgatcgcccgggtgcgaatgtgggtgaacctgaacctgtggcagaagctgaagctaagcagagatgatgccaagcctctgctgagactgaagggattcccttcctttcctctggtcgagagacaggccaacgaagtggactggtgggacatggtgtgtaacgtgaagaagctgatcaacgagaaaaaggaggatggcaaggtgttttggcagaatctggctggctacaagagacaggaagccctgagaccatacctgagcagcgaggaagatcggaagaagggaaagaaattcgctcggtaccagctgggcgacctgctgctgcacctggaaaagaagcacggcgaggactggggaaaggtgtacgacgaggcctgggagcggattgacaagaaagtggaaggcctgagcaagcacatcaagctggaagaggaacggagaagcgaggacgcccagagcaaggccgccctgaccgactggctgcgggctaaggccagcttcgtgatcgagggcctgaaggaggccgacaaggacgagttctgcagatgcgagctgaagctgcagaagtggtacggggacctgcggggaaagcccttcgccatcgaagccgagaacagcatcctggacatcagcggcttcagcaagcagtacaactgtgccttcatctggcagaaggacggcgtgaagaagctgaacctgtacctgatcatcaactacttcaagggcggcaagctgcggttcaagaagatcaaacctgaagccttcgaagccaacagattctacaccgtgatcaacaaaaagagcggcgagatcgtgcccatggaggtgaacttcaacttcgacgaccccaacctgatcatcctgcctctggcctttggcaagagacagggcagagaattcatctggaacgacctgctgtccctggaaaccggcagcctgaagctggccaacggaagagtgatcgagaagacactgtacaacagaagaacccggcaggatgagcctgccctgttcgtggccctgaccttcgagcggcgggaggtcctggactcctccaatatcaaaccaatgaacctgatcggcgtggcaagaggcgaaaacatccccgccgtgatcgccctgaccgaccccgagggctgcccactgagccggtttaaggatagcctgggaaacccaacccacatcctgagaatcggcgagagctataaggagaagcagcggaccatccaggccaagaaggaggtggagcagcggagagccggcggctacagccggaagtacgccagcaaagccaagaatctggcagacgatatggtgagaaacaccgctagagatctgctgtactacgccgtgacccaggatgccatgctgatcttcgccaacctgagccggggcttcggccggcagggcaagcggaccttcatggccgagagacagtacacacggatggaggactggctgaccgccaagctggcctacgagggcctgagcaagacctacctgtccaagacactggcccagtacacctccaagacatgcagcaactgtgggtttaccatcaccagcgccgactacgacagggtgctggagaagctgaagaagacagcaacaggctggatgaccacaattaacggcaaggagctgaaggtggagggccagattacctactacaacagatacaagagacagaacgtagtcaaggacctgtccgtcgagctggatagactgagcgaagaatctgtgaacaacgacatctcctcctggacaaagggcagaagcggagaagctctgagcctcctgaagaaaagattctcccatagacccgtgcaggagaagttcgtgtgcctgaactgcggcttcgagacacacgcagccgagcaagccgccctgaacatcgccagatcctggctgttcctgcggagccaggagtacaagaaataccagacaaacaagacaaccggcaacaccgataagagagccttcgtcgagacctggcagtccttttaccggaagaagcttaaggaggtgtggaaacctgccgtgcggtctggcggatctggcggaggctccatgttccagaccgcctggaggcaggagcccgtgaccttcgaggacgtggccgtgtacttcacccagaacgagtgggccagcctggacagcgtgcagagggccctgtacagggaggtgatgctggagaactacgccaacgtggccagcctggccttccccttcaccacccccgtgctggtgagccagctggagcagggcgagctgccctggggcctggacccctgggagcccatgggcagggagggcggcccaagcagcggcgcccctcctcccagcggcggcagcccagccggctccccaacctctaccgaggagggcacctctgagtccgccacccccgagagcggccctggcacctccaccgagcccagcgagggcagcgcacccggcagccctgccggcagccccacctccacagaggagggaaccagcaccgagcccagcgaaggcagcgccccaggcaccagcaccgagcctagtgagcaggagattaaacggatcaacaagatcagaagaagacttgtgaaagacagcaacaccaagaaggccggcaagacaggccccatgaaaaccctgctggttagagtgatgacacccgatctgagagagcggctggaaaacctgagaaagaagcctgaaaatatcccccagcccatcagcaatacatctagagccaacctgaataagctgctgaccgattacaccgaaatgaagaaggcgatcctgcatgtgtactgggaagagttccagaaggaccctgtgggcctgatgagccgggtggcccagcctgccagcaagaagatcgatcagaacaagctgaaacctgagatggacgagaagggcaacctgaccaccgccggctttgcctgctctcagtgtggccagcccctgttcgtgtacaagctggagcaggtgtctgagaagggcaaggcttacaccaactacttcggacggtgcaatgtggccgagcacgaaaagctgatcctgctggcccagctgaagcccgagaaggatagcgacgaagccgtgacatatagcctgggaaagtttgggcagagggccctggatttctacagcattcatgtgaccaaggagtccacccaccccgtgaagcccctggcccagatcgccggaaacagatacgcctccggacctgtgggaaaggccctgagcgacgcatgtatgggcacaatcgcctccttcctgtctaagtaccaggacatcatcatcgaacaccagaaggtggtgaagggcaaccagaagagactggagagcctgcgggagctggccggcaaggaaaacctggaataccctagcgtgaccctgccacctcagcctcacaccaaggagggcgttgatgcctacaacgaagtgatcgcccgggtgcgaatgtgggtgaacctgaacctgtggcagaagctgaagctaagcagagatgatgccaagcctctgctgagactgaagggattcccttcctttcctctggtcgagagacaggccaacgaagtggactggtgggacatggtgtgtaacgtgaagaagctgatcaacgagaaaaaggaggatggcaaggtgttttggcagaatctggctggctacaagagacaggaagccctgagaccatacctgagcagcgaggaagatcggaagaagggaaagaaattcgctcggtaccagctgggcgacctgctgctgcacctggaaaagaagcacggcgaggactggggaaaggtgtacgacgaggcctgggagcggattgacaagaaagtggaaggcctgagcaagcacatcaagctggaagaggaacggagaagcgaggacgcccagagcaaggccgccctgaccgactggctgcgggctaaggccagcttcgtgatcgagggcctgaaggaggccgacaaggacgagttctgcagatgcgagctgaagctgcagaagtggtacggggacctgcggggaaagcccttcgccatcgaagccgagaacagcatcctggacatcagcggcttcagcaagcagtacaactgtgccttcatctggcagaaggacggcgtgaagaagctgaacctgtacctgatcatcaactacttcaagggcggcaagctgcggttcaagaagatcaaacctgaagccttcgaagccaacagattctacaccgtgatcaacaaaaagagcggcgagatcgtgcccatggaggtgaacttcaacttcgacgaccccaacctgatcatcctgcctctggcctttggcaagagacagggcagagaattcatctggaacgacctgctgtccctggaaaccggcagcctgaagctggccaacggaagagtgatcgagaagacactgtacaacagaagaacccggcaggatgagcctgccctgttcgtggccctgaccttcgagcggcgggaggtcctggactcctccaatatcaaaccaatgaacctgatcggcgtggcaagaggcgaaaacatccccgccgtgatcgccctgaccgaccccgagggctgcccactgagccggtttaaggatagcctgggaaacccaacccacatcctgagaatcggcgagagctataaggagaagcagcggaccatccaggccaagaaggaggtggagcagcggagagccggcggctacagccggaagtacgccagcaaagccaagaatctggcagacgatatggtgagaaacaccgctagagatctgctgtactacgccgtgacccaggatgccatgctgatcttcgccaacctgagccggggcttcggccggcagggcaagcggaccttcatggccgagagacagtacacacggatggaggactggctgaccgccaagctggcctacgagggcctgagcaagacctacctgtccaagacactggcccagtacacctccaagacatgcagcaactgtgggtttaccatcaccagcgccgactacgacagggtgctggagaagctgaagaagacagcaacaggctggatgaccacaattaacggcaaggagctgaaggtggagggccagattacctactacaacagatacaagagacagaacgtagtcaaggacctgtccgtcgagctggatagactgagcgaagaatctgtgaacaacgacatctcctcctggacaaagggcagaagcggagaagctctgagcctcctgaagaaaagattctcccatagacccgtgcaggagaagttcgtgtgcctgaactgcggcttcgagacacacgcagccgagcaagccgccctgaacatcgccagatcctggctgttcctgcggagccaggagtacaagaaataccagacaaacaagacaaccggcaacaccgataagagagccttcgtcgagacctggcagtccttttaccggaagaagcttaaggaggtgtggaaacctgccgtgcggtctggcggatctggcggaggctcctatgttccagaccgcctggaggcaggagcccgtgaccttcgaggacgtggccgtgtacttcacccagaacgagtgggccagcctggacagcgtgcagagggccctgtacagggaggtgatgctggagaactacgccaacgtggccagcctggccttccccttcaccacccccgtgctggtgagccagctggagcagggcgagctgccctggggcctggacccctgggagcccatgggcagggagggatctggctccggcagcggccccaagaaaaagagaaaagtctaagctgccttctgcggggcttgccttctggccatgcccttcttctctcccttgcacctgtacctcttggtctttgaataaagcctgagtaggaaggctagcaaaaaaaaaaaaaaaaaaaaaaaaaaaaaaaaaaaaaaaaaaaaaaaaaaaaaaaaaaaaaaaaaaaaaaaaaaaaaaaa

SEQ ID NO: 16588 - RNA, 9485 nt, synthetic construct
  source 1..9485: mol_type = other RNA
aggaaataagagagaaaagaagagtaagaagaaatataagagccaccatggcccctaagaagaagcgtaaagtgagccggatggaacgcctcgtctacgaggtgcggcagaagtgcagaaacatcgaggacatctgcatctcctgcggatctctgaacgtgaccctggagcacccactgttcatcggcggcatgtgccagaactgtaaaaactgttttctggagtgtgcctatcaatacgacgatgacggctaccagagctactgcaccatctgttgcggcggaagagaggtgctgatgtgtggaaataacaactgctgccggtgcttctgcgtggaatgcgtggacctgctggtgggccccggcgccgcccaggccgctattaaggaagatccttggaactgctacatgtgcggccacaagggcacatacggcctgctgagacggagagaggactggcctagcagactgcagatgttcttcgccaataaccacgaccaggagttcgacccccctaaggtgtaccctcccgtccccgccgagaagagaaagcccatccgggtcctgagcctgttcgatggcatcgccaccggtctgctggtgctgaaggacctgggcatccaggtggataggtacattgcctccgaggtgtgcgaggactccatcaccgtgggaatggtgcgtcatcagggcaagatcatgtacgtgggcgacgtgcggagcgtgacacagaagcatatccaggagtggggccctttcgacctggtgatcggcggcagcccttgcaatgacctgagcatcgtgaacccagcccggaagggcctgtacgagggaaccggcagactgttcttcgagttttacagactgctgcacgacgcccggcctaaggaaggcgacgaccggcccttcttttggctgttcgagaatgtggtggccatgggagtcagcgacaagcgggatattagccggttcctggagagcaaccccgtgatgatcgatgccaaggaagtgagcgccgcccaccgggccagatacttctggggcaatctgcctggcatgaacagacccctggccagcaccgtgaacgacaagctggagctgcaggagtgcctggagcacggccggatcgccaagttcagcaaggtgagaaccatcaccacccgaagcaacagcatcaaacaaggcaaggaccagcactttcctgtgttcatgaacgagaaggaggacatcctgtggtgtaccgagatggagagagtgttcgggttcccagtccactacacagatgtcagcaacatgtctagactggccagacagagactgctgggaagaagctggtccgtccctgtgatcagacacctgttcgcccctctgaaggagtacttcgcctgcgtgagcagcggcaacagcaacgccaacagccggggccccagcttctctagcggcctggtgccactgtccctgagagggagccacatgggccccatggagatctacaaaaccgtgagcgcctggaagcggcagcctgtgcgcgtgctgagcctgtttcggaatatcgataaagtcctgaaaagcctgggattcctggagagcggctctggctccggcggtggcaccctgaagtacgtggaggatgtgacaaacgtggtcagacgggatgtggagaagtggggccccttcgatctggtgtacggcagcacccaacccctgggcagctcttgtgaccggtgccctggctggtacatgtttcagttccaccggatcctgcagtacgccctgccgagacaggagtcccagcggccattcttttggattttcatggacaacttgctgctgaccgaggatgaccaggaaactaccactcggttcctgcagaccgaagccgtgaccctgcaggacgtgagaggccgggactaccagaacgccatgcgggtgtggtccaacatccctggactgaaaagcaagcacgcacctctgacccctaaagaagaggagtacctgcaggcccaggtgcggagcagaagcaagctggacgcccctaaggtggatctgctggtgaagaattgcctcctgcccctgagagagtacttcaagtatttcagccagaatagtctgcccctgggaggcagcggcggcggcgccctggtgacatttgaggacgtcgccgtgcggttcacccaggaggaatgggctctgctggatccttctcagaaaatcctgtaccgggacgtgatgagagagacataccggaatctgacctccgtgggcatcaactgggaatgttgggaccttgaagcctgcttcagaagcctgggaagaaacctgagagtgcaggtggtgaagagaaagtgcgagctgaccaacagcggcccctgcgccgagggcggcccaagcagcggcgcccctcctcccagcggcggcagcccagccggctccccaacctctaccgaggagggcacctctgagtccgccacccccgagagcggccctggcacctccaccgagcccagcgagggcagcgcacccggcagccctgccggcagccccacctccacagaggagggaaccagcaccgagcccagcgaaggcagcgccccaggcaccagcaccgagcctagtgagcaggagattaaacggatcaacaagatcagaagaagacttgtgaaagacagcaacaccaagaaggccggcaagacaggccccatgaaaaccctgctggttagagtgatgacacccgatctgagagagcggctggaaaacctgagaaagaagcctgaaaatatcccccagcccatcagcaatacatctagagccaacctgaataagctgctgaccgattacaccgaaatgaagaaggcgatcctgcatgtgtactgggaagagttccagaaggaccctgtgggcctgatgagccgggtggcccagcctgccagcaagaagatcgatcagaacaagctgaaacctgagatggacgagaagggcaacctgaccaccgccggctttgcctgctctcagtgtggccagcccctgttcgtgtacaagctggagcaggtgtctgagaagggcaaggcttacaccaactacttcggacggtgcaatgtggccgagcacgaaaagctgatcctgctggcccagctgaagcccgagaaggatagcgacgaagccgtgacatatagcctgggaaagtttgggcagagggccctggatttctacagcattcatgtgaccaaggagtccacccaccccgtgaagcccctggcccagatcgccggaaacagatacgcctccggacctgtgggaaaggccctgagcgacgcatgtatgggcacaatcgcctccttcctgtctaagtaccaggacatcatcatcgaacaccagaaggtggtgaagggcaaccagaagagactggagagcctgcgggagctggccggcaaggaaaacctggaataccctagcgtgaccctgccacctcagcctcacaccaaggagggcgttgatgcctacaacgaagtgatcgcccgggtgcgaatgtgggtgaacctgaacctgtggcagaagctgaagctaagcagagatgatgccaagcctctgctgagactgaagggattcccttcctttcctctggtcgagagacaggccaacgaagtggactggtgggacatggtgtgtaacgtgaagaagctgatcaacgagaaaaaggaggatggcaaggtgttttggcagaatctggctggctacaagagacaggaagccctgagaccatacctgagcagcgaggaagatcggaagaagggaaagaaattcgctcggtaccagctgggcgacctgctgctgcacctggaaaagaagcacggcgaggactggggaaaggtgtacgacgaggcctgggagcggattgacaagaaagtggaaggcctgagcaagcacatcaagctggaagaggaacggagaagcgaggacgcccagagcaaggccgccctgaccgactggctgcgggctaaggccagcttcgtgatcgagggcctgaaggaggccgacaaggacgagttctgcagatgcgagctgaagctgcagaagtggtacggggacctgcggggaaagcccttcgccatcgaagccgagaacagcatcctggacatcagcggcttcagcaagcagtacaactgtgccttcatctggcagaaggacggcgtgaagaagctgaacctgtacctgatcatcaactacttcaagggcggcaagctgcggttcaagaagatcaaacctgaagccttcgaagccaacagattctacaccgtgatcaacaaaaagagcggcgagatcgtgcccatggaggtgaacttcaacttcgacgaccccaacctgatcatcctgcctctggcctttggcaagagacagggcagagaattcatctggaacgacctgctgtccctggaaaccggcagcctgaagctggccaacggaagagtgatcgagaagacactgtacaacagaagaacccggcaggatgagcctgccctgttcgtggccctgaccttcgagcggcgggaggtcctggactcctccaatatcaaaccaatgaacctgatcggcgtggcaagaggcgaaaacatccccgccgtgatcgccctgaccgaccccgagggctgcccactgagccggtttaaggatagcctgggaaacccaacccacatcctgagaatcggcgagagctataaggagaagcagcggaccatccaggccaagaaggaggtggagcagcggagagccggcggctacagccggaagtacgccagcaaagccaagaatctggcagacgatatggtgagaaacaccgctagagatctgctgtactacgccgtgacccaggatgccatgctgatcttcgccaacctgagccggggcttcggccggcagggcaagcggaccttcatggccgagagacagtacacacggatggaggactggctgaccgccaagctggcctacgagggcctgagcaagacctacctgtccaagacactggcccagtacacctccaagacatgcagcaactgtgggtttaccatcaccagcgccgactacgacagggtgctggagaagctgaagaagacagcaacaggctggatgaccacaattaacggcaaggagctgaaggtggagggccagattacctactacaacagatacaagagacagaacgtagtcaaggacctgtccgtcgagctggatagactgagcgaagaatctgtgaacaacgacatctcctcctggacaaagggcagaagcggagaagctctgagcctcctgaagaaaagattctcccatagacccgtgcaggagaagttcgtgtgcctgaactgcggcttcgagacacacgcagccgagcaagccgccctgaacatcgccagatcctggctgttcctgcggagccaggagtacaagaaataccagacaaacaagacaaccggcaacaccgataagagagccttcgtcgagacctggcagtccttttaccggaagaagcttaaggaggtgtggaaacctgccgtgcggtctggcggatctggcggaggctccatgttccaggtgaccttcagcgacgtggccatcgacttcagccacgaggagtggggctggctggacagcgcccagagggacctgtacaaggacgtgatggtgcagaactacgagaacctggtgagcctgggcctgagcatccccaagcccaacgtgatcgccctgctggaggagggcaaggacccctggatggtggagaggaagctgagcaccgactgggacagcaggtgggagaacaaggagggcggcccaagcagcggcgcccctcctcccagcggcggcagcccagccggctccccaacctctaccgaggagggcacctctgagtccgccacccccgagagcggccctggcacctccaccgagcccagcgagggcagcgcacccggcagccctgccggcagccccacctccacagaggagggaaccagcaccgagcccagcgaaggcagcgccccaggcaccagcaccgagcctagtgagcaggagattaaacggatcaacaagatcagaagaagacttgtgaaagacagcaacaccaagaaggccggcaagacaggccccatgaaaaccctgctggttagagtgatgacacccgatctgagagagcggctggaaaacctgagaaagaagcctgaaaatatcccccagcccatcagcaatacatctagagccaacctgaataagctgctgaccgattacaccgaaatgaagaaggcgatcctgcatgtgtactgggaagagttccagaaggaccctgtgggcctgatgagccgggtggcccagcctgccagcaagaagatcgatcagaacaagctgaaacctgagatggacgagaagggcaacctgaccaccgccggctttgcctgctctcagtgtggccagcccctgttcgtgtacaagctggagcaggtgtctgagaagggcaaggcttacaccaactacttcggacggtgcaatgtggccgagcacgaaaagctgatcctgctggcccagctgaagcccgagaaggatagcgacgaagccgtgacatatagcctgggaaagtttgggcagagggccctggatttctacagcattcatgtgaccaaggagtccacccaccccgtgaagcccctggcccagatcgccggaaacagatacgcctccggacctgtgggaaaggccctgagcgacgcatgtatgggcacaatcgcctccttcctgtctaagtaccaggacatcatcatcgaacaccagaaggtggtgaagggcaaccagaagagactggagagcctgcgggagctggccggcaaggaaaacctggaataccctagcgtgaccctgccacctcagcctcacaccaaggagggcgttgatgcctacaacgaagtgatcgcccgggtgcgaatgtgggtgaacctgaacctgtggcagaagctgaagctaagcagagatgatgccaagcctctgctgagactgaagggattcccttcctttcctctggtcgagagacaggccaacgaagtggactggtgggacatggtgtgtaacgtgaagaagctgatcaacgagaaaaaggaggatggcaaggtgttttggcagaatctggctggctacaagagacaggaagccctgagaccatacctgagcagcgaggaagatcggaagaagggaaagaaattcgctcggtaccagctgggcgacctgctgctgcacctggaaaagaagcacggcgaggactggggaaaggtgtacgacgaggcctgggagcggattgacaagaaagtggaaggcctgagcaagcacatcaagctggaagaggaacggagaagcgaggacgcccagagcaaggccgccctgaccgactggctgcgggctaaggccagcttcgtgatcgagggcctgaaggaggccgacaaggacgagttctgcagatgcgagctgaagctgcagaagtggtacggggacctgcggggaaagcccttcgccatcgaagccgagaacagcatcctggacatcagcggcttcagcaagcagtacaactgtgccttcatctggcagaaggacggcgtgaagaagctgaacctgtacctgatcatcaactacttcaagggcggcaagctgcggttcaagaagatcaaacctgaagccttcgaagccaacagattctacaccgtgatcaacaaaaagagcggcgagatcgtgcccatggaggtgaacttcaacttcgacgaccccaacctgatcatcctgcctctggcctttggcaagagacagggcagagaattcatctggaacgacctgctgtccctggaaaccggcagcctgaagctggccaacggaagagtgatcgagaagacactgtacaacagaagaacccggcaggatgagcctgccctgttcgtggccctgaccttcgagcggcgggaggtcctggactcctccaatatcaaaccaatgaacctgatcggcgtggcaagaggcgaaaacatccccgccgtgatcgccctgaccgaccccgagggctgcccactgagccggtttaaggatagcctgggaaacccaacccacatcctgagaatcggcgagagctataaggagaagcagcggaccatccaggccaagaaggaggtggagcagcggagagccggcggctacagccggaagtacgccagcaaagccaagaatctggcagacgatatggtgagaaacaccgctagagatctgctgtactacgccgtgacccaggatgccatgctgatcttcgccaacctgagccggggcttcggccggcagggcaagcggaccttcatggccgagagacagtacacacggatggaggactggctgaccgccaagctggcctacgagggcctgagcaagacctacctgtccaagacactggcccagtacacctccaagacatgcagcaactgtgggtttaccatcaccagcgccgactacgacagggtgctggagaagctgaagaagacagcaacaggctggatgaccacaattaacggcaaggagctgaaggtggagggccagattacctactacaacagatacaagagacagaacgtagtcaaggacctgtccgtcgagctggatagactgagcgaagaatctgtgaacaacgacatctcctcctggacaaagggcagaagcggagaagctctgagcctcctgaagaaaagattctcccatagacccgtgcaggagaagttcgtgtgcctgaactgcggcttcgagacacacgcagccgagcaagccgccctgaacatcgccagatcctggctgttcctgcggagccaggagtacaagaaataccagacaaacaagacaaccggcaacaccgataagagagccttcgtcgagacctggcagtccttttaccggaagaagcttaaggaggtgtggaaacctgccgtgcggtctggcggatctggcggaggctcctatgttccaggtgaccttcagcgacgtggccatcgacttcagccacgaggagtggggctggctggacagcgcccagagggacctgtacaaggacgtgatggtgcagaactacgagaacctggtgagcctgggcctgagcatccccaagcccaacgtgatcgccctgctggaggagggcaaggacccctggatggtggagaggaagctgagcaccgactgggacagcaggtgggagaacaaggagggatctggctccggcagcggccccaagaaaaagagaaaagtctaagctgccttctgcggggcttgccttctggccatgcccttcttctctcccttgcacctgtacctcttggtctttgaataaagcctgagtaggaaggctagcaaaaaaaaaaaaaaaaaaaaaaaaaaaaaaaaaaaaaaaaaaaaaaaaaaaaaaaaaaaaaaaaaaaaaaaaaaaaaaaa

SEQ ID NO: 16589 - RNA, 9485 nt, synthetic construct
  source 1..9485: mol_type = other RNA
aggaaataagagagaaaagaagagtaagaagaaatataagagccaccatggcccctaagaagaagcgtaaagtgagccggatggaacgcctcgtctacgaggtgcggcagaagtgcagaaacatcgaggacatctgcatctcctgcggatctctgaacgtgaccctggagcacccactgttcatcggcggcatgtgccagaactgtaaaaactgttttctggagtgtgcctatcaatacgacgatgacggctaccagagctactgcaccatctgttgcggcggaagagaggtgctgatgtgtggaaataacaactgctgccggtgcttctgcgtggaatgcgtggacctgctggtgggccccggcgccgcccaggccgctattaaggaagatccttggaactgctacatgtgcggccacaagggcacatacggcctgctgagacggagagaggactggcctagcagactgcagatgttcttcgccaataaccacgaccaggagttcgacccccctaaggtgtaccctcccgtccccgccgagaagagaaagcccatccgggtcctgagcctgttcgatggcatcgccaccggtctgctggtgctgaaggacctgggcatccaggtggataggtacattgcctccgaggtgtgcgaggactccatcaccgtgggaatggtgcgtcatcagggcaagatcatgtacgtgggcgacgtgcggagcgtgacacagaagcatatccaggagtggggccctttcgacctggtgatcggcggcagcccttgcaatgacctgagcatcgtgaacccagcccggaagggcctgtacgagggaaccggcagactgttcttcgagttttacagactgctgcacgacgcccggcctaaggaaggcgacgaccggcccttcttttggctgttcgagaatgtggtggccatgggagtcagcgacaagcgggatattagccggttcctggagagcaaccccgtgatgatcgatgccaaggaagtgagcgccgcccaccgggccagatacttctggggcaatctgcctggcatgaacagacccctggccagcaccgtgaacgacaagctggagctgcaggagtgcctggagcacggccggatcgccaagttcagcaaggtgagaaccatcaccacccgaagcaacagcatcaaacaaggcaaggaccagcactttcctgtgttcatgaacgagaaggaggacatcctgtggtgtaccgagatggagagagtgttcgggttcccagtccactacacagatgtcagcaacatgtctagactggccagacagagactgctgggaagaagctggtccgtccctgtgatcagacacctgttcgcccctctgaaggagtacttcgcctgcgtgagcagcggcaacagcaacgccaacagccggggccccagcttctctagcggcctggtgccactgtccctgagagggagccacatgggccccatggagatctacaaaaccgtgagcgcctggaagcggcagcctgtgcgcgtgctgagcctgtttcggaatatcgataaagtcctgaaaagcctgggattcctggagagcggctctggctccggcggtggcaccctgaagtacgtggaggatgtgacaaacgtggtcagacgggatgtggagaagtggggccccttcgatctggtgtacggcagcacccaacccctgggcagctcttgtgaccggtgccctggctggtacatgtttcagttccaccggatcctgcagtacgccctgccgagacaggagtcccagcggccattcttttggattttcatggacaacttgctgctgaccgaggatgaccaggaaactaccactcggttcctgcagaccgaagccgtgaccctgcaggacgtgagaggccgggactaccagaacgccatgcgggtgtggtccaacatccctggactgaaaagcaagcacgcacctctgacccctaaagaagaggagtacctgcaggcccaggtgcggagcagaagcaagctggacgcccctaaggtggatctgctggtgaagaattgcctcctgcccctgagagagtacttcaagtatttcagccagaatagtctgcccctgggaggcagcggcggcggcgccctggtgacatttgaggacgtcgccgtgcggttcacccaggaggaatgggctctgctggatccttctcagaaaatcctgtaccgggacgtgatgagagagacataccggaatctgacctccgtgggcatcaactgggaatgttgggaccttgaagcctgcttcagaagcctgggaagaaacctgagagtgcaggtggtgaagagaaagtgcgagctgaccaacagcggcccctgcgccgagggcggcccaagcagcggcgcccctcctcccagcggcggcagcccagccggctccccaacctctaccgaggagggcacctctgagtccgccacccccgagagcggccctggcacctccaccgagcccagcgagggcagcgcacccggcagccctgccggcagccccacctccacagaggagggaaccagcaccgagcccagcgaaggcagcgccccaggcaccagcaccgagcctagtgagcaggagattaaacggatcaacaagatcagaagaagacttgtgaaagacagcaacaccaagaaggccggcaagacaggccccatgaaaaccctgctggttagagtgatgacacccgatctgagagagcggctggaaaacctgagaaagaagcctgaaaatatcccccagcccatcagcaatacatctagagccaacctgaataagctgctgaccgattacaccgaaatgaagaaggcgatcctgcatgtgtactgggaagagttccagaaggaccctgtgggcctgatgagccgggtggcccagcctgccagcaagaagatcgatcagaacaagctgaaacctgagatggacgagaagggcaacctgaccaccgccggctttgcctgctctcagtgtggccagcccctgttcgtgtacaagctggagcaggtgtctgagaagggcaaggcttacaccaactacttcggacggtgcaatgtggccgagcacgaaaagctgatcctgctggcccagctgaagcccgagaaggatagcgacgaagccgtgacatatagcctgggaaagtttgggcagagggccctggatttctacagcattcatgtgaccaaggagtccacccaccccgtgaagcccctggcccagatcgccggaaacagatacgcctccggacctgtgggaaaggccctgagcgacgcatgtatgggcacaatcgcctccttcctgtctaagtaccaggacatcatcatcgaacaccagaaggtggtgaagggcaaccagaagagactggagagcctgcgggagctggccggcaaggaaaacctggaataccctagcgtgaccctgccacctcagcctcacaccaaggagggcgttgatgcctacaacgaagtgatcgcccgggtgcgaatgtgggtgaacctgaacctgtggcagaagctgaagctaagcagagatgatgccaagcctctgctgagactgaagggattcccttcctttcctctggtcgagagacaggccaacgaagtggactggtgggacatggtgtgtaacgtgaagaagctgatcaacgagaaaaaggaggatggcaaggtgttttggcagaatctggctggctacaagagacaggaagccctgagaccatacctgagcagcgaggaagatcggaagaagggaaagaaattcgctcggtaccagctgggcgacctgctgctgcacctggaaaagaagcacggcgaggactggggaaaggtgtacgacgaggcctgggagcggattgacaagaaagtggaaggcctgagcaagcacatcaagctggaagaggaacggagaagcgaggacgcccagagcaaggccgccctgaccgactggctgcgggctaaggccagcttcgtgatcgagggcctgaaggaggccgacaaggacgagttctgcagatgcgagctgaagctgcagaagtggtacggggacctgcggggaaagcccttcgccatcgaagccgagaacagcatcctggacatcagcggcttcagcaagcagtacaactgtgccttcatctggcagaaggacggcgtgaagaagctgaacctgtacctgatcatcaactacttcaagggcggcaagctgcggttcaagaagatcaaacctgaagccttcgaagccaacagattctacaccgtgatcaacaaaaagagcggcgagatcgtgcccatggaggtgaacttcaacttcgacgaccccaacctgatcatcctgcctctggcctttggcaagagacagggcagagaattcatctggaacgacctgctgtccctggaaaccggcagcctgaagctggccaacggaagagtgatcgagaagacactgtacaacagaagaacccggcaggatgagcctgccctgttcgtggccctgaccttcgagcggcgggaggtcctggactcctccaatatcaaaccaatgaacctgatcggcgtggcaagaggcgaaaacatccccgccgtgatcgccctgaccgaccccgagggctgcccactgagccggtttaaggatagcctgggaaacccaacccacatcctgagaatcggcgagagctataaggagaagcagcggaccatccaggccaagaaggaggtggagcagcggagagccggcggctacagccggaagtacgccagcaaagccaagaatctggcagacgatatggtgagaaacaccgctagagatctgctgtactacgccgtgacccaggatgccatgctgatcttcgccaacctgagccggggcttcggccggcagggcaagcggaccttcatggccgagagacagtacacacggatggaggactggctgaccgccaagctggcctacgagggcctgagcaagacctacctgtccaagacactggcccagtacacctccaagacatgcagcaactgtgggtttaccatcaccagcgccgactacgacagggtgctggagaagctgaagaagacagcaacaggctggatgaccacaattaacggcaaggagctgaaggtggagggccagattacctactacaacagatacaagagacagaacgtagtcaaggacctgtccgtcgagctggatagactgagcgaagaatctgtgaacaacgacatctcctcctggacaaagggcagaagcggagaagctctgagcctcctgaagaaaagattctcccatagacccgtgcaggagaagttcgtgtgcctgaactgcggcttcgagacacacgcagccgagcaagccgccctgaacatcgccagatcctggctgttcctgcggagccaggagtacaagaaataccagacaaacaagacaaccggcaacaccgataagagagccttcgtcgagacctggcagtccttttaccggaagaagcttaaggaggtgtggaaacctgccgtgcggtctggcggatctggcggaggctccatgatcaccgcccagggccccgtgagcttcagggacgtgaccgtgggcttcacccaggaggagtggcagcacctggaccccgcccagaggaccctgtacagggacgtgatgatcgagaactacagccacctggtgagcgtgggctactgcatccccaagcccgaggtgatcctgaagctggagaagggcgaggagccctggatcagcgaggagaagttccccagccagagccacctggagctgggcggcccaagcagcggcgcccctcctcccagcggcggcagcccagccggctccccaacctctaccgaggagggcacctctgagtccgccacccccgagagcggccctggcacctccaccgagcccagcgagggcagcgcacccggcagccctgccggcagccccacctccacagaggagggaaccagcaccgagcccagcgaaggcagcgccccaggcaccagcaccgagcctagtgagcaggagattaaacggatcaacaagatcagaagaagacttgtgaaagacagcaacaccaagaaggccggcaagacaggccccatgaaaaccctgctggttagagtgatgacacccgatctgagagagcggctggaaaacctgagaaagaagcctgaaaatatcccccagcccatcagcaatacatctagagccaacctgaataagctgctgaccgattacaccgaaatgaagaaggcgatcctgcatgtgtactgggaagagttccagaaggaccctgtgggcctgatgagccgggtggcccagcctgccagcaagaagatcgatcagaacaagctgaaacctgagatggacgagaagggcaacctgaccaccgccggctttgcctgctctcagtgtggccagcccctgttcgtgtacaagctggagcaggtgtctgagaagggcaaggcttacaccaactacttcggacggtgcaatgtggccgagcacgaaaagctgatcctgctggcccagctgaagcccgagaaggatagcgacgaagccgtgacatatagcctgggaaagtttgggcagagggccctggatttctacagcattcatgtgaccaaggagtccacccaccccgtgaagcccctggcccagatcgccggaaacagatacgcctccggacctgtgggaaaggccctgagcgacgcatgtatgggcacaatcgcctccttcctgtctaagtaccaggacatcatcatcgaacaccagaaggtggtgaagggcaaccagaagagactggagagcctgcgggagctggccggcaaggaaaacctggaataccctagcgtgaccctgccacctcagcctcacaccaaggagggcgttgatgcctacaacgaagtgatcgcccgggtgcgaatgtgggtgaacctgaacctgtggcagaagctgaagctaagcagagatgatgccaagcctctgctgagactgaagggattcccttcctttcctctggtcgagagacaggccaacgaagtggactggtgggacatggtgtgtaacgtgaagaagctgatcaacgagaaaaaggaggatggcaaggtgttttggcagaatctggctggctacaagagacaggaagccctgagaccatacctgagcagcgaggaagatcggaagaagggaaagaaattcgctcggtaccagctgggcgacctgctgctgcacctggaaaagaagcacggcgaggactggggaaaggtgtacgacgaggcctgggagcggattgacaagaaagtggaaggcctgagcaagcacatcaagctggaagaggaacggagaagcgaggacgcccagagcaaggccgccctgaccgactggctgcgggctaaggccagcttcgtgatcgagggcctgaaggaggccgacaaggacgagttctgcagatgcgagctgaagctgcagaagtggtacggggacctgcggggaaagcccttcgccatcgaagccgagaacagcatcctggacatcagcggcttcagcaagcagtacaactgtgccttcatctggcagaaggacggcgtgaagaagctgaacctgtacctgatcatcaactacttcaagggcggcaagctgcggttcaagaagatcaaacctgaagccttcgaagccaacagattctacaccgtgatcaacaaaaagagcggcgagatcgtgcccatggaggtgaacttcaacttcgacgaccccaacctgatcatcctgcctctggcctttggcaagagacagggcagagaattcatctggaacgacctgctgtccctggaaaccggcagcctgaagctggccaacggaagagtgatcgagaagacactgtacaacagaagaacccggcaggatgagcctgccctgttcgtggccctgaccttcgagcggcgggaggtcctggactcctccaatatcaaaccaatgaacctgatcggcgtggcaagaggcgaaaacatccccgccgtgatcgccctgaccgaccccgagggctgcccactgagccggtttaaggatagcctgggaaacccaacccacatcctgagaatcggcgagagctataaggagaagcagcggaccatccaggccaagaaggaggtggagcagcggagagccggcggctacagccggaagtacgccagcaaagccaagaatctggcagacgatatggtgagaaacaccgctagagatctgctgtactacgccgtgacccaggatgccatgctgatcttcgccaacctgagccggggcttcggccggcagggcaagcggaccttcatggccgagagacagtacacacggatggaggactggctgaccgccaagctggcctacgagggcctgagcaagacctacctgtccaagacactggcccagtacacctccaagacatgcagcaactgtgggtttaccatcaccagcgccgactacgacagggtgctggagaagctgaagaagacagcaacaggctggatgaccacaattaacggcaaggagctgaaggtggagggccagattacctactacaacagatacaagagacagaacgtagtcaaggacctgtccgtcgagctggatagactgagcgaagaatctgtgaacaacgacatctcctcctggacaaagggcagaagcggagaagctctgagcctcctgaagaaaagattctcccatagacccgtgcaggagaagttcgtgtgcctgaactgcggcttcgagacacacgcagccgagcaagccgccctgaacatcgccagatcctggctgttcctgcggagccaggagtacaagaaataccagacaaacaagacaaccggcaacaccgataagagagccttcgtcgagacctggcagtccttttaccggaagaagcttaaggaggtgtggaaacctgccgtgcggtctggcggatctggcggaggctcctatgatcaccgcccagggccccgtgagcttcagggacgtgaccgtgggcttcacccaggaggagtggcagcacctggaccccgcccagaggaccctgtacagggacgtgatgatcgagaactacagccacctggtgagcgtgggctactgcatccccaagcccgaggtgatcctgaagctggagaagggcgaggagccctggatcagcgaggagaagttccccagccagagccacctggagctgggatctggctccggcagcggccccaagaaaaagagaaaagtctaagctgccttctgcggggcttgccttctggccatgcccttcttctctcccttgcacctgtacctcttggtctttgaataaagcctgagtaggaaggctagcaaaaaaaaaaaaaaaaaaaaaaaaaaaaaaaaaaaaaaaaaaaaaaaaaaaaaaaaaaaaaaaaaaaaaaaaaaaaaaaa

SEQ ID NO: 16590 - RNA, 9485 nt, synthetic construct
  source 1..9485: mol_type = other RNA
aggaaataagagagaaaagaagagtaagaagaaatataagagccaccatggcccctaagaagaagcgtaaagtgagccggatggaacgcctcgtctacgaggtgcggcagaagtgcagaaacatcgaggacatctgcatctcctgcggatctctgaacgtgaccctggagcacccactgttcatcggcggcatgtgccagaactgtaaaaactgttttctggagtgtgcctatcaatacgacgatgacggctaccagagctactgcaccatctgttgcggcggaagagaggtgctgatgtgtggaaataacaactgctgccggtgcttctgcgtggaatgcgtggacctgctggtgggccccggcgccgcccaggccgctattaaggaagatccttggaactgctacatgtgcggccacaagggcacatacggcctgctgagacggagagaggactggcctagcagactgcagatgttcttcgccaataaccacgaccaggagttcgacccccctaaggtgtaccctcccgtccccgccgagaagagaaagcccatccgggtcctgagcctgttcgatggcatcgccaccggtctgctggtgctgaaggacctgggcatccaggtggataggtacattgcctccgaggtgtgcgaggactccatcaccgtgggaatggtgcgtcatcagggcaagatcatgtacgtgggcgacgtgcggagcgtgacacagaagcatatccaggagtggggccctttcgacctggtgatcggcggcagcccttgcaatgacctgagcatcgtgaacccagcccggaagggcctgtacgagggaaccggcagactgttcttcgagttttacagactgctgcacgacgcccggcctaaggaaggcgacgaccggcccttcttttggctgttcgagaatgtggtggccatgggagtcagcgacaagcgggatattagccggttcctggagagcaaccccgtgatgatcgatgccaaggaagtgagcgccgcccaccgggccagatacttctggggcaatctgcctggcatgaacagacccctggccagcaccgtgaacgacaagctggagctgcaggagtgcctggagcacggccggatcgccaagttcagcaaggtgagaaccatcaccacccgaagcaacagcatcaaacaaggcaaggaccagcactttcctgtgttcatgaacgagaaggaggacatcctgtggtgtaccgagatggagagagtgttcgggttcccagtccactacacagatgtcagcaacatgtctagactggccagacagagactgctgggaagaagctggtccgtccctgtgatcagacacctgttcgcccctctgaaggagtacttcgcctgcgtgagcagcggcaacagcaacgccaacagccggggccccagcttctctagcggcctggtgccactgtccctgagagggagccacatgggccccatggagatctacaaaaccgtgagcgcctggaagcggcagcctgtgcgcgtgctgagcctgtttcggaatatcgataaagtcctgaaaagcctgggattcctggagagcggctctggctccggcggtggcaccctgaagtacgtggaggatgtgacaaacgtggtcagacgggatgtggagaagtggggccccttcgatctggtgtacggcagcacccaacccctgggcagctcttgtgaccggtgccctggctggtacatgtttcagttccaccggatcctgcagtacgccctgccgagacaggagtcccagcggccattcttttggattttcatggacaacttgctgctgaccgaggatgaccaggaaactaccactcggttcctgcagaccgaagccgtgaccctgcaggacgtgagaggccgggactaccagaacgccatgcgggtgtggtccaacatccctggactgaaaagcaagcacgcacctctgacccctaaagaagaggagtacctgcaggcccaggtgcggagcagaagcaagctggacgcccctaaggtggatctgctggtgaagaattgcctcctgcccctgagagagtacttcaagtatttcagccagaatagtctgcccctgggaggcagcggcggcggcgccctggtgacatttgaggacgtcgccgtgcggttcacccaggaggaatgggctctgctggatccttctcagaaaatcctgtaccgggacgtgatgagagagacataccggaatctgacctccgtgggcatcaactgggaatgttgggaccttgaagcctgcttcagaagcctgggaagaaacctgagagtgcaggtggtgaagagaaagtgcgagctgaccaacagcggcccctgcgccgagggcggcccaagcagcggcgcccctcctcccagcggcggcagcccagccggctccccaacctctaccgaggagggcacctctgagtccgccacccccgagagcggccctggcacctccaccgagcccagcgagggcagcgcacccggcagccctgccggcagccccacctccacagaggagggaaccagcaccgagcccagcgaaggcagcgccccaggcaccagcaccgagcctagtgagcaggagattaaacggatcaacaagatcagaagaagacttgtgaaagacagcaacaccaagaaggccggcaagacaggccccatgaaaaccctgctggttagagtgatgacacccgatctgagagagcggctggaaaacctgagaaagaagcctgaaaatatcccccagcccatcagcaatacatctagagccaacctgaataagctgctgaccgattacaccgaaatgaagaaggcgatcctgcatgtgtactgggaagagttccagaaggaccctgtgggcctgatgagccgggtggcccagcctgccagcaagaagatcgatcagaacaagctgaaacctgagatggacgagaagggcaacctgaccaccgccggctttgcctgctctcagtgtggccagcccctgttcgtgtacaagctggagcaggtgtctgagaagggcaaggcttacaccaactacttcggacggtgcaatgtggccgagcacgaaaagctgatcctgctggcccagctgaagcccgagaaggatagcgacgaagccgtgacatatagcctgggaaagtttgggcagagggccctggatttctacagcattcatgtgaccaaggagtccacccaccccgtgaagcccctggcccagatcgccggaaacagatacgcctccggacctgtgggaaaggccctgagcgacgcatgtatgggcacaatcgcctccttcctgtctaagtaccaggacatcatcatcgaacaccagaaggtggtgaagggcaaccagaagagactggagagcctgcgggagctggccggcaaggaaaacctggaataccctagcgtgaccctgccacctcagcctcacaccaaggagggcgttgatgcctacaacgaagtgatcgcccgggtgcgaatgtgggtgaacctgaacctgtggcagaagctgaagctaagcagagatgatgccaagcctctgctgagactgaagggattcccttcctttcctctggtcgagagacaggccaacgaagtggactggtgggacatggtgtgtaacgtgaagaagctgatcaacgagaaaaaggaggatggcaaggtgttttggcagaatctggctggctacaagagacaggaagccctgagaccatacctgagcagcgaggaagatcggaagaagggaaagaaattcgctcggtaccagctgggcgacctgctgctgcacctggaaaagaagcacggcgaggactggggaaaggtgtacgacgaggcctgggagcggattgacaagaaagtggaaggcctgagcaagcacatcaagctggaagaggaacggagaagcgaggacgcccagagcaaggccgccctgaccgactggctgcgggctaaggccagcttcgtgatcgagggcctgaaggaggccgacaaggacgagttctgcagatgcgagctgaagctgcagaagtggtacggggacctgcggggaaagcccttcgccatcgaagccgagaacagcatcctggacatcagcggcttcagcaagcagtacaactgtgccttcatctggcagaaggacggcgtgaagaagctgaacctgtacctgatcatcaactacttcaagggcggcaagctgcggttcaagaagatcaaacctgaagccttcgaagccaacagattctacaccgtgatcaacaaaaagagcggcgagatcgtgcccatggaggtgaacttcaacttcgacgaccccaacctgatcatcctgcctctggcctttggcaagagacagggcagagaattcatctggaacgacctgctgtccctggaaaccggcagcctgaagctggccaacggaagagtgatcgagaagacactgtacaacagaagaacccggcaggatgagcctgccctgttcgtggccctgaccttcgagcggcgggaggtcctggactcctccaatatcaaaccaatgaacctgatcggcgtggcaagaggcgaaaacatccccgccgtgatcgccctgaccgaccccgagggctgcccactgagccggtttaaggatagcctgggaaacccaacccacatcctgagaatcggcgagagctataaggagaagcagcggaccatccaggccaagaaggaggtggagcagcggagagccggcggctacagccggaagtacgccagcaaagccaagaatctggcagacgatatggtgagaaacaccgctagagatctgctgtactacgccgtgacccaggatgccatgctgatcttcgccaacctgagccggggcttcggccggcagggcaagcggaccttcatggccgagagacagtacacacggatggaggactggctgaccgccaagctggcctacgagggcctgagcaagacctacctgtccaagacactggcccagtacacctccaagacatgcagcaactgtgggtttaccatcaccagcgccgactacgacagggtgctggagaagctgaagaagacagcaacaggctggatgaccacaattaacggcaaggagctgaaggtggagggccagattacctactacaacagatacaagagacagaacgtagtcaaggacctgtccgtcgagctggatagactgagcgaagaatctgtgaacaacgacatctcctcctggacaaagggcagaagcggagaagctctgagcctcctgaagaaaagattctcccatagacccgtgcaggagaagttcgtgtgcctgaactgcggcttcgagacacacgcagccgagcaagccgccctgaacatcgccagatcctggctgttcctgcggagccaggagtacaagaaataccagacaaacaagacaaccggcaacaccgataagagagccttcgtcgagacctggcagtccttttaccggaagaagcttaaggaggtgtggaaacctgccgtgcggtctggcggatctggcggaggctccccccaggacctgatgaccttcgaggacgtggccgtggagttcacctggtgggagtggggccagctggaccccgcccagaaggacctgtacagggaggtgatgctggagaacttcaagaacctggccagcctgggcttccccgtgagcaagccctacatgatctgccagctggaggagggcgaggagccctgcatcctggagagggagatcagcaccggcgtgcacagcgactgggagaggaggggcggcccaagcagcggcgcccctcctcccagcggcggcagcccagccggctccccaacctctaccgaggagggcacctctgagtccgccacccccgagagcggccctggcacctccaccgagcccagcgagggcagcgcacccggcagccctgccggcagccccacctccacagaggagggaaccagcaccgagcccagcgaaggcagcgccccaggcaccagcaccgagcctagtgagcaggagattaaacggatcaacaagatcagaagaagacttgtgaaagacagcaacaccaagaaggccggcaagacaggccccatgaaaaccctgctggttagagtgatgacacccgatctgagagagcggctggaaaacctgagaaagaagcctgaaaatatcccccagcccatcagcaatacatctagagccaacctgaataagctgctgaccgattacaccgaaatgaagaaggcgatcctgcatgtgtactgggaagagttccagaaggaccctgtgggcctgatgagccgggtggcccagcctgccagcaagaagatcgatcagaacaagctgaaacctgagatggacgagaagggcaacctgaccaccgccggctttgcctgctctcagtgtggccagcccctgttcgtgtacaagctggagcaggtgtctgagaagggcaaggcttacaccaactacttcggacggtgcaatgtggccgagcacgaaaagctgatcctgctggcccagctgaagcccgagaaggatagcgacgaagccgtgacatatagcctgggaaagtttgggcagagggccctggatttctacagcattcatgtgaccaaggagtccacccaccccgtgaagcccctggcccagatcgccggaaacagatacgcctccggacctgtgggaaaggccctgagcgacgcatgtatgggcacaatcgcctccttcctgtctaagtaccaggacatcatcatcgaacaccagaaggtggtgaagggcaaccagaagagactggagagcctgcgggagctggccggcaaggaaaacctggaataccctagcgtgaccctgccacctcagcctcacaccaaggagggcgttgatgcctacaacgaagtgatcgcccgggtgcgaatgtgggtgaacctgaacctgtggcagaagctgaagctaagcagagatgatgccaagcctctgctgagactgaagggattcccttcctttcctctggtcgagagacaggccaacgaagtggactggtgggacatggtgtgtaacgtgaagaagctgatcaacgagaaaaaggaggatggcaaggtgttttggcagaatctggctggctacaagagacaggaagccctgagaccatacctgagcagcgaggaagatcggaagaagggaaagaaattcgctcggtaccagctgggcgacctgctgctgcacctggaaaagaagcacggcgaggactggggaaaggtgtacgacgaggcctgggagcggattgacaagaaagtggaaggcctgagcaagcacatcaagctggaagaggaacggagaagcgaggacgcccagagcaaggccgccctgaccgactggctgcgggctaaggccagcttcgtgatcgagggcctgaaggaggccgacaaggacgagttctgcagatgcgagctgaagctgcagaagtggtacggggacctgcggggaaagcccttcgccatcgaagccgagaacagcatcctggacatcagcggcttcagcaagcagtacaactgtgccttcatctggcagaaggacggcgtgaagaagctgaacctgtacctgatcatcaactacttcaagggcggcaagctgcggttcaagaagatcaaacctgaagccttcgaagccaacagattctacaccgtgatcaacaaaaagagcggcgagatcgtgcccatggaggtgaacttcaacttcgacgaccccaacctgatcatcctgcctctggcctttggcaagagacagggcagagaattcatctggaacgacctgctgtccctggaaaccggcagcctgaagctggccaacggaagagtgatcgagaagacactgtacaacagaagaacccggcaggatgagcctgccctgttcgtggccctgaccttcgagcggcgggaggtcctggactcctccaatatcaaaccaatgaacctgatcggcgtggcaagaggcgaaaacatccccgccgtgatcgccctgaccgaccccgagggctgcccactgagccggtttaaggatagcctgggaaacccaacccacatcctgagaatcggcgagagctataaggagaagcagcggaccatccaggccaagaaggaggtggagcagcggagagccggcggctacagccggaagtacgccagcaaagccaagaatctggcagacgatatggtgagaaacaccgctagagatctgctgtactacgccgtgacccaggatgccatgctgatcttcgccaacctgagccggggcttcggccggcagggcaagcggaccttcatggccgagagacagtacacacggatggaggactggctgaccgccaagctggcctacgagggcctgagcaagacctacctgtccaagacactggcccagtacacctccaagacatgcagcaactgtgggtttaccatcaccagcgccgactacgacagggtgctggagaagctgaagaagacagcaacaggctggatgaccacaattaacggcaaggagctgaaggtggagggccagattacctactacaacagatacaagagacagaacgtagtcaaggacctgtccgtcgagctggatagactgagcgaagaatctgtgaacaacgacatctcctcctggacaaagggcagaagcggagaagctctgagcctcctgaagaaaagattctcccatagacccgtgcaggagaagttcgtgtgcctgaactgcggcttcgagacacacgcagccgagcaagccgccctgaacatcgccagatcctggctgttcctgcggagccaggagtacaagaaataccagacaaacaagacaaccggcaacaccgataagagagccttcgtcgagacctggcagtccttttaccggaagaagcttaaggaggtgtggaaacctgccgtgcggtctggcggatctggcggaggctcctccccaggacctgatgaccttcgaggacgtggccgtggagttcacctggtgggagtggggccagctggaccccgcccagaaggacctgtacagggaggtgatgctggagaacttcaagaacctggccagcctgggcttccccgtgagcaagccctacatgatctgccagctggaggagggcgaggagccctgcatcctggagagggagatcagcaccggcgtgcacagcgactgggagaggaggggatctggctccggcagcggccccaagaaaaagagaaaagtctaagctgccttctgcggggcttgccttctggccatgcccttcttctctcccttgcacctgtacctcttggtctttgaataaagcctgagtaggaaggctagcaaaaaaaaaaaaaaaaaaaaaaaaaaaaaaaaaaaaaaaaaaaaaaaaaaaaaaaaaaaaaaaaaaaaaaaaaaaaaaaa

SEQ ID NO: 16591 - RNA, 9485 nt, synthetic construct
  source 1..9485: mol_type = other RNA
aggaaataagagagaaaagaagagtaagaagaaatataagagccaccatggcccctaagaagaagcgtaaagtgagccggatggaacgcctcgtctacgaggtgcggcagaagtgcagaaacatcgaggacatctgcatctcctgcggatctctgaacgtgaccctggagcacccactgttcatcggcggcatgtgccagaactgtaaaaactgttttctggagtgtgcctatcaatacgacgatgacggctaccagagctactgcaccatctgttgcggcggaagagaggtgctgatgtgtggaaataacaactgctgccggtgcttctgcgtggaatgcgtggacctgctggtgggccccggcgccgcccaggccgctattaaggaagatccttggaactgctacatgtgcggccacaagggcacatacggcctgctgagacggagagaggactggcctagcagactgcagatgttcttcgccaataaccacgaccaggagttcgacccccctaaggtgtaccctcccgtccccgccgagaagagaaagcccatccgggtcctgagcctgttcgatggcatcgccaccggtctgctggtgctgaaggacctgggcatccaggtggataggtacattgcctccgaggtgtgcgaggactccatcaccgtgggaatggtgcgtcatcagggcaagatcatgtacgtgggcgacgtgcggagcgtgacacagaagcatatccaggagtggggccctttcgacctggtgatcggcggcagcccttgcaatgacctgagcatcgtgaacccagcccggaagggcctgtacgagggaaccggcagactgttcttcgagttttacagactgctgcacgacgcccggcctaaggaaggcgacgaccggcccttcttttggctgttcgagaatgtggtggccatgggagtcagcgacaagcgggatattagccggttcctggagagcaaccccgtgatgatcgatgccaaggaagtgagcgccgcccaccgggccagatacttctggggcaatctgcctggcatgaacagacccctggccagcaccgtgaacgacaagctggagctgcaggagtgcctggagcacggccggatcgccaagttcagcaaggtgagaaccatcaccacccgaagcaacagcatcaaacaaggcaaggaccagcactttcctgtgttcatgaacgagaaggaggacatcctgtggtgtaccgagatggagagagtgttcgggttcccagtccactacacagatgtcagcaacatgtctagactggccagacagagactgctgggaagaagctggtccgtccctgtgatcagacacctgttcgcccctctgaaggagtacttcgcctgcgtgagcagcggcaacagcaacgccaacagccggggccccagcttctctagcggcctggtgccactgtccctgagagggagccacatgggccccatggagatctacaaaaccgtgagcgcctggaagcggcagcctgtgcgcgtgctgagcctgtttcggaatatcgataaagtcctgaaaagcctgggattcctggagagcggctctggctccggcggtggcaccctgaagtacgtggaggatgtgacaaacgtggtcagacgggatgtggagaagtggggccccttcgatctggtgtacggcagcacccaacccctgggcagctcttgtgaccggtgccctggctggtacatgtttcagttccaccggatcctgcagtacgccctgccgagacaggagtcccagcggccattcttttggattttcatggacaacttgctgctgaccgaggatgaccaggaaactaccactcggttcctgcagaccgaagccgtgaccctgcaggacgtgagaggccgggactaccagaacgccatgcgggtgtggtccaacatccctggactgaaaagcaagcacgcacctctgacccctaaagaagaggagtacctgcaggcccaggtgcggagcagaagcaagctggacgcccctaaggtggatctgctggtgaagaattgcctcctgcccctgagagagtacttcaagtatttcagccagaatagtctgcccctgggaggcagcggcggcggcgccctggtgacatttgaggacgtcgccgtgcggttcacccaggaggaatgggctctgctggatccttctcagaaaatcctgtaccgggacgtgatgagagagacataccggaatctgacctccgtgggcatcaactgggaatgttgggaccttgaagcctgcttcagaagcctgggaagaaacctgagagtgcaggtggtgaagagaaagtgcgagctgaccaacagcggcccctgcgccgagggcggcccaagcagcggcgcccctcctcccagcggcggcagcccagccggctccccaacctctaccgaggagggcacctctgagtccgccacccccgagagcggccctggcacctccaccgagcccagcgagggcagcgcacccggcagccctgccggcagccccacctccacagaggagggaaccagcaccgagcccagcgaaggcagcgccccaggcaccagcaccgagcctagtgagcaggagattaaacggatcaacaagatcagaagaagacttgtgaaagacagcaacaccaagaaggccggcaagacaggccccatgaaaaccctgctggttagagtgatgacacccgatctgagagagcggctggaaaacctgagaaagaagcctgaaaatatcccccagcccatcagcaatacatctagagccaacctgaataagctgctgaccgattacaccgaaatgaagaaggcgatcctgcatgtgtactgggaagagttccagaaggaccctgtgggcctgatgagccgggtggcccagcctgccagcaagaagatcgatcagaacaagctgaaacctgagatggacgagaagggcaacctgaccaccgccggctttgcctgctctcagtgtggccagcccctgttcgtgtacaagctggagcaggtgtctgagaagggcaaggcttacaccaactacttcggacggtgcaatgtggccgagcacgaaaagctgatcctgctggcccagctgaagcccgagaaggatagcgacgaagccgtgacatatagcctgggaaagtttgggcagagggccctggatttctacagcattcatgtgaccaaggagtccacccaccccgtgaagcccctggcccagatcgccggaaacagatacgcctccggacctgtgggaaaggccctgagcgacgcatgtatgggcacaatcgcctccttcctgtctaagtaccaggacatcatcatcgaacaccagaaggtggtgaagggcaaccagaagagactggagagcctgcgggagctggccggcaaggaaaacctggaataccctagcgtgaccctgccacctcagcctcacaccaaggagggcgttgatgcctacaacgaagtgatcgcccgggtgcgaatgtgggtgaacctgaacctgtggcagaagctgaagctaagcagagatgatgccaagcctctgctgagactgaagggattcccttcctttcctctggtcgagagacaggccaacgaagtggactggtgggacatggtgtgtaacgtgaagaagctgatcaacgagaaaaaggaggatggcaaggtgttttggcagaatctggctggctacaagagacaggaagccctgagaccatacctgagcagcgaggaagatcggaagaagggaaagaaattcgctcggtaccagctgggcgacctgctgctgcacctggaaaagaagcacggcgaggactggggaaaggtgtacgacgaggcctgggagcggattgacaagaaagtggaaggcctgagcaagcacatcaagctggaagaggaacggagaagcgaggacgcccagagcaaggccgccctgaccgactggctgcgggctaaggccagcttcgtgatcgagggcctgaaggaggccgacaaggacgagttctgcagatgcgagctgaagctgcagaagtggtacggggacctgcggggaaagcccttcgccatcgaagccgagaacagcatcctggacatcagcggcttcagcaagcagtacaactgtgccttcatctggcagaaggacggcgtgaagaagctgaacctgtacctgatcatcaactacttcaagggcggcaagctgcggttcaagaagatcaaacctgaagccttcgaagccaacagattctacaccgtgatcaacaaaaagagcggcgagatcgtgcccatggaggtgaacttcaacttcgacgaccccaacctgatcatcctgcctctggcctttggcaagagacagggcagagaattcatctggaacgacctgctgtccctggaaaccggcagcctgaagctggccaacggaagagtgatcgagaagacactgtacaacagaagaacccggcaggatgagcctgccctgttcgtggccctgaccttcgagcggcgggaggtcctggactcctccaatatcaaaccaatgaacctgatcggcgtggcaagaggcgaaaacatccccgccgtgatcgccctgaccgaccccgagggctgcccactgagccggtttaaggatagcctgggaaacccaacccacatcctgagaatcggcgagagctataaggagaagcagcggaccatccaggccaagaaggaggtggagcagcggagagccggcggctacagccggaagtacgccagcaaagccaagaatctggcagacgatatggtgagaaacaccgctagagatctgctgtactacgccgtgacccaggatgccatgctgatcttcgccaacctgagccggggcttcggccggcagggcaagcggaccttcatggccgagagacagtacacacggatggaggactggctgaccgccaagctggcctacgagggcctgagcaagacctacctgtccaagacactggcccagtacacctccaagacatgcagcaactgtgggtttaccatcaccagcgccgactacgacagggtgctggagaagctgaagaagacagcaacaggctggatgaccacaattaacggcaaggagctgaaggtggagggccagattacctactacaacagatacaagagacagaacgtagtcaaggacctgtccgtcgagctggatagactgagcgaagaatctgtgaacaacgacatctcctcctggacaaagggcagaagcggagaagctctgagcctcctgaagaaaagattctcccatagacccgtgcaggagaagttcgtgtgcctgaactgcggcttcgagacacacgcagccgagcaagccgccctgaacatcgccagatcctggctgttcctgcggagccaggagtacaagaaataccagacaaacaagacaaccggcaacaccgataagagagccttcgtcgagacctggcagtccttttaccggaagaagcttaaggaggtgtggaaacctgccgtgcggtctggcggatctggcggaggctccatggtgaccttcgaggacgtggccgtgcacttcaccaagaccgagtggaccggcctgagccccgcccagagggccctgtacaggagcgtgatgctggagaacttcggcaacctgaccgccctgggctaccccgtgcccaagcccgccctgatcagcctgctggagggcggcgacatggcctggggcctggaggcccaggacgaccccctggccgagaggaccaagaacatctgcaagggcgtgggcggcccaagcagcggcgcccctcctcccagcggcggcagcccagccggctccccaacctctaccgaggagggcacctctgagtccgccacccccgagagcggccctggcacctccaccgagcccagcgagggcagcgcacccggcagccctgccggcagccccacctccacagaggagggaaccagcaccgagcccagcgaaggcagcgccccaggcaccagcaccgagcctagtgagcaggagattaaacggatcaacaagatcagaagaagacttgtgaaagacagcaacaccaagaaggccggcaagacaggccccatgaaaaccctgctggttagagtgatgacacccgatctgagagagcggctggaaaacctgagaaagaagcctgaaaatatcccccagcccatcagcaatacatctagagccaacctgaataagctgctgaccgattacaccgaaatgaagaaggcgatcctgcatgtgtactgggaagagttccagaaggaccctgtgggcctgatgagccgggtggcccagcctgccagcaagaagatcgatcagaacaagctgaaacctgagatggacgagaagggcaacctgaccaccgccggctttgcctgctctcagtgtggccagcccctgttcgtgtacaagctggagcaggtgtctgagaagggcaaggcttacaccaactacttcggacggtgcaatgtggccgagcacgaaaagctgatcctgctggcccagctgaagcccgagaaggatagcgacgaagccgtgacatatagcctgggaaagtttgggcagagggccctggatttctacagcattcatgtgaccaaggagtccacccaccccgtgaagcccctggcccagatcgccggaaacagatacgcctccggacctgtgggaaaggccctgagcgacgcatgtatgggcacaatcgcctccttcctgtctaagtaccaggacatcatcatcgaacaccagaaggtggtgaagggcaaccagaagagactggagagcctgcgggagctggccggcaaggaaaacctggaataccctagcgtgaccctgccacctcagcctcacaccaaggagggcgttgatgcctacaacgaagtgatcgcccgggtgcgaatgtgggtgaacctgaacctgtggcagaagctgaagctaagcagagatgatgccaagcctctgctgagactgaagggattcccttcctttcctctggtcgagagacaggccaacgaagtggactggtgggacatggtgtgtaacgtgaagaagctgatcaacgagaaaaaggaggatggcaaggtgttttggcagaatctggctggctacaagagacaggaagccctgagaccatacctgagcagcgaggaagatcggaagaagggaaagaaattcgctcggtaccagctgggcgacctgctgctgcacctggaaaagaagcacggcgaggactggggaaaggtgtacgacgaggcctgggagcggattgacaagaaagtggaaggcctgagcaagcacatcaagctggaagaggaacggagaagcgaggacgcccagagcaaggccgccctgaccgactggctgcgggctaaggccagcttcgtgatcgagggcctgaaggaggccgacaaggacgagttctgcagatgcgagctgaagctgcagaagtggtacggggacctgcggggaaagcccttcgccatcgaagccgagaacagcatcctggacatcagcggcttcagcaagcagtacaactgtgccttcatctggcagaaggacggcgtgaagaagctgaacctgtacctgatcatcaactacttcaagggcggcaagctgcggttcaagaagatcaaacctgaagccttcgaagccaacagattctacaccgtgatcaacaaaaagagcggcgagatcgtgcccatggaggtgaacttcaacttcgacgaccccaacctgatcatcctgcctctggcctttggcaagagacagggcagagaattcatctggaacgacctgctgtccctggaaaccggcagcctgaagctggccaacggaagagtgatcgagaagacactgtacaacagaagaacccggcaggatgagcctgccctgttcgtggccctgaccttcgagcggcgggaggtcctggactcctccaatatcaaaccaatgaacctgatcggcgtggcaagaggcgaaaacatccccgccgtgatcgccctgaccgaccccgagggctgcccactgagccggtttaaggatagcctgggaaacccaacccacatcctgagaatcggcgagagctataaggagaagcagcggaccatccaggccaagaaggaggtggagcagcggagagccggcggctacagccggaagtacgccagcaaagccaagaatctggcagacgatatggtgagaaacaccgctagagatctgctgtactacgccgtgacccaggatgccatgctgatcttcgccaacctgagccggggcttcggccggcagggcaagcggaccttcatggccgagagacagtacacacggatggaggactggctgaccgccaagctggcctacgagggcctgagcaagacctacctgtccaagacactggcccagtacacctccaagacatgcagcaactgtgggtttaccatcaccagcgccgactacgacagggtgctggagaagctgaagaagacagcaacaggctggatgaccacaattaacggcaaggagctgaaggtggagggccagattacctactacaacagatacaagagacagaacgtagtcaaggacctgtccgtcgagctggatagactgagcgaagaatctgtgaacaacgacatctcctcctggacaaagggcagaagcggagaagctctgagcctcctgaagaaaagattctcccatagacccgtgcaggagaagttcgtgtgcctgaactgcggcttcgagacacacgcagccgagcaagccgccctgaacatcgccagatcctggctgttcctgcggagccaggagtacaagaaataccagacaaacaagacaaccggcaacaccgataagagagccttcgtcgagacctggcagtccttttaccggaagaagcttaaggaggtgtggaaacctgccgtgcggtctggcggatctggcggaggctcctatggtgaccttcgaggacgtggccgtgcacttcaccaagaccgagtggaccggcctgagccccgcccagagggccctgtacaggagcgtgatgctggagaacttcggcaacctgaccgccctgggctaccccgtgcccaagcccgccctgatcagcctgctggagggcggcgacatggcctggggcctggaggcccaggacgaccccctggccgagaggaccaagaacatctgcaagggcgtgggatctggctccggcagcggccccaagaaaaagagaaaagtctaagctgccttctgcggggcttgccttctggccatgcccttcttctctcccttgcacctgtacctcttggtctttgaataaagcctgagtaggaaggctagcaaaaaaaaaaaaaaaaaaaaaaaaaaaaaaaaaaaaaaaaaaaaaaaaaaaaaaaaaaaaaaaaaaaaaaaaaaaaaaaa

SEQ ID NO: 16592 - RNA, 9485 nt, synthetic construct
  source 1..9485: mol_type = other RNA
aggaaataagagagaaaagaagagtaagaagaaatataagagccaccatggcccctaagaagaagcgtaaagtgagccggatggaacgcctcgtctacgaggtgcggcagaagtgcagaaacatcgaggacatctgcatctcctgcggatctctgaacgtgaccctggagcacccactgttcatcggcggcatgtgccagaactgtaaaaactgttttctggagtgtgcctatcaatacgacgatgacggctaccagagctactgcaccatctgttgcggcggaagagaggtgctgatgtgtggaaataacaactgctgccggtgcttctgcgtggaatgcgtggacctgctggtgggccccggcgccgcccaggccgctattaaggaagatccttggaactgctacatgtgcggccacaagggcacatacggcctgctgagacggagagaggactggcctagcagactgcagatgttcttcgccaataaccacgaccaggagttcgacccccctaaggtgtaccctcccgtccccgccgagaagagaaagcccatccgggtcctgagcctgttcgatggcatcgccaccggtctgctggtgctgaaggacctgggcatccaggtggataggtacattgcctccgaggtgtgcgaggactccatcaccgtgggaatggtgcgtcatcagggcaagatcatgtacgtgggcgacgtgcggagcgtgacacagaagcatatccaggagtggggccctttcgacctggtgatcggcggcagcccttgcaatgacctgagcatcgtgaacccagcccggaagggcctgtacgagggaaccggcagactgttcttcgagttttacagactgctgcacgacgcccggcctaaggaaggcgacgaccggcccttcttttggctgttcgagaatgtggtggccatgggagtcagcgacaagcgggatattagccggttcctggagagcaaccccgtgatgatcgatgccaaggaagtgagcgccgcccaccgggccagatacttctggggcaatctgcctggcatgaacagacccctggccagcaccgtgaacgacaagctggagctgcaggagtgcctggagcacggccggatcgccaagttcagcaaggtgagaaccatcaccacccgaagcaacagcatcaaacaaggcaaggaccagcactttcctgtgttcatgaacgagaaggaggacatcctgtggtgtaccgagatggagagagtgttcgggttcccagtccactacacagatgtcagcaacatgtctagactggccagacagagactgctgggaagaagctggtccgtccctgtgatcagacacctgttcgcccctctgaaggagtacttcgcctgcgtgagcagcggcaacagcaacgccaacagccggggccccagcttctctagcggcctggtgccactgtccctgagagggagccacatgggccccatggagatctacaaaaccgtgagcgcctggaagcggcagcctgtgcgcgtgctgagcctgtttcggaatatcgataaagtcctgaaaagcctgggattcctggagagcggctctggctccggcggtggcaccctgaagtacgtggaggatgtgacaaacgtggtcagacgggatgtggagaagtggggccccttcgatctggtgtacggcagcacccaacccctgggcagctcttgtgaccggtgccctggctggtacatgtttcagttccaccggatcctgcagtacgccctgccgagacaggagtcccagcggccattcttttggattttcatggacaacttgctgctgaccgaggatgaccaggaaactaccactcggttcctgcagaccgaagccgtgaccctgcaggacgtgagaggccgggactaccagaacgccatgcgggtgtggtccaacatccctggactgaaaagcaagcacgcacctctgacccctaaagaagaggagtacctgcaggcccaggtgcggagcagaagcaagctggacgcccctaaggtggatctgctggtgaagaattgcctcctgcccctgagagagtacttcaagtatttcagccagaatagtctgcccctgggaggcagcggcggcggcgccctggtgacatttgaggacgtcgccgtgcggttcacccaggaggaatgggctctgctggatccttctcagaaaatcctgtaccgggacgtgatgagagagacataccggaatctgacctccgtgggcatcaactgggaatgttgggaccttgaagcctgcttcagaagcctgggaagaaacctgagagtgcaggtggtgaagagaaagtgcgagctgaccaacagcggcccctgcgccgagggcggcccaagcagcggcgcccctcctcccagcggcggcagcccagccggctccccaacctctaccgaggagggcacctctgagtccgccacccccgagagcggccctggcacctccaccgagcccagcgagggcagcgcacccggcagccctgccggcagccccacctccacagaggagggaaccagcaccgagcccagcgaaggcagcgccccaggcaccagcaccgagcctagtgagcaggagattaaacggatcaacaagatcagaagaagacttgtgaaagacagcaacaccaagaaggccggcaagacaggccccatgaaaaccctgctggttagagtgatgacacccgatctgagagagcggctggaaaacctgagaaagaagcctgaaaatatcccccagcccatcagcaatacatctagagccaacctgaataagctgctgaccgattacaccgaaatgaagaaggcgatcctgcatgtgtactgggaagagttccagaaggaccctgtgggcctgatgagccgggtggcccagcctgccagcaagaagatcgatcagaacaagctgaaacctgagatggacgagaagggcaacctgaccaccgccggctttgcctgctctcagtgtggccagcccctgttcgtgtacaagctggagcaggtgtctgagaagggcaaggcttacaccaactacttcggacggtgcaatgtggccgagcacgaaaagctgatcctgctggcccagctgaagcccgagaaggatagcgacgaagccgtgacatatagcctgggaaagtttgggcagagggccctggatttctacagcattcatgtgaccaaggagtccacccaccccgtgaagcccctggcccagatcgccggaaacagatacgcctccggacctgtgggaaaggccctgagcgacgcatgtatgggcacaatcgcctccttcctgtctaagtaccaggacatcatcatcgaacaccagaaggtggtgaagggcaaccagaagagactggagagcctgcgggagctggccggcaaggaaaacctggaataccctagcgtgaccctgccacctcagcctcacaccaaggagggcgttgatgcctacaacgaagtgatcgcccgggtgcgaatgtgggtgaacctgaacctgtggcagaagctgaagctaagcagagatgatgccaagcctctgctgagactgaagggattcccttcctttcctctggtcgagagacaggccaacgaagtggactggtgggacatggtgtgtaacgtgaagaagctgatcaacgagaaaaaggaggatggcaaggtgttttggcagaatctggctggctacaagagacaggaagccctgagaccatacctgagcagcgaggaagatcggaagaagggaaagaaattcgctcggtaccagctgggcgacctgctgctgcacctggaaaagaagcacggcgaggactggggaaaggtgtacgacgaggcctgggagcggattgacaagaaagtggaaggcctgagcaagcacatcaagctggaagaggaacggagaagcgaggacgcccagagcaaggccgccctgaccgactggctgcgggctaaggccagcttcgtgatcgagggcctgaaggaggccgacaaggacgagttctgcagatgcgagctgaagctgcagaagtggtacggggacctgcggggaaagcccttcgccatcgaagccgagaacagcatcctggacatcagcggcttcagcaagcagtacaactgtgccttcatctggcagaaggacggcgtgaagaagctgaacctgtacctgatcatcaactacttcaagggcggcaagctgcggttcaagaagatcaaacctgaagccttcgaagccaacagattctacaccgtgatcaacaaaaagagcggcgagatcgtgcccatggaggtgaacttcaacttcgacgaccccaacctgatcatcctgcctctggcctttggcaagagacagggcagagaattcatctggaacgacctgctgtccctggaaaccggcagcctgaagctggccaacggaagagtgatcgagaagacactgtacaacagaagaacccggcaggatgagcctgccctgttcgtggccctgaccttcgagcggcgggaggtcctggactcctccaatatcaaaccaatgaacctgatcggcgtggcaagaggcgaaaacatccccgccgtgatcgccctgaccgaccccgagggctgcccactgagccggtttaaggatagcctgggaaacccaacccacatcctgagaatcggcgagagctataaggagaagcagcggaccatccaggccaagaaggaggtggagcagcggagagccggcggctacagccggaagtacgccagcaaagccaagaatctggcagacgatatggtgagaaacaccgctagagatctgctgtactacgccgtgacccaggatgccatgctgatcttcgccaacctgagccggggcttcggccggcagggcaagcggaccttcatggccgagagacagtacacacggatggaggactggctgaccgccaagctggcctacgagggcctgagcaagacctacctgtccaagacactggcccagtacacctccaagacatgcagcaactgtgggtttaccatcaccagcgccgactacgacagggtgctggagaagctgaagaagacagcaacaggctggatgaccacaattaacggcaaggagctgaaggtggagggccagattacctactacaacagatacaagagacagaacgtagtcaaggacctgtccgtcgagctggatagactgagcgaagaatctgtgaacaacgacatctcctcctggacaaagggcagaagcggagaagctctgagcctcctgaagaaaagattctcccatagacccgtgcaggagaagttcgtgtgcctgaactgcggcttcgagacacacgcagccgagcaagccgccctgaacatcgccagatcctggctgttcctgcggagccaggagtacaagaaataccagacaaacaagacaaccggcaacaccgataagagagccttcgtcgagacctggcagtccttttaccggaagaagcttaaggaggtgtggaaacctgccgtgcggtctggcggatctggcggaggctcccccgcccagggccccggcaaggccaggcccagcaggaagaggggcaggaggcccagggccctgaagttcgtggacgtggccgtgtacttcagccccgaggagtggggctgcctgaggcccgcccagagggccctgtacagggacgtgatgagggagacctacggccacctgggcgccctgggctgcgccggccccaagcccgccctgatcagctggctggagaggaacaccgacgactgggagggcggcccaagcagcggcgcccctcctcccagcggcggcagcccagccggctccccaacctctaccgaggagggcacctctgagtccgccacccccgagagcggccctggcacctccaccgagcccagcgagggcagcgcacccggcagccctgccggcagccccacctccacagaggagggaaccagcaccgagcccagcgaaggcagcgccccaggcaccagcaccgagcctagtgagcaggagattaaacggatcaacaagatcagaagaagacttgtgaaagacagcaacaccaagaaggccggcaagacaggccccatgaaaaccctgctggttagagtgatgacacccgatctgagagagcggctggaaaacctgagaaagaagcctgaaaatatcccccagcccatcagcaatacatctagagccaacctgaataagctgctgaccgattacaccgaaatgaagaaggcgatcctgcatgtgtactgggaagagttccagaaggaccctgtgggcctgatgagccgggtggcccagcctgccagcaagaagatcgatcagaacaagctgaaacctgagatggacgagaagggcaacctgaccaccgccggctttgcctgctctcagtgtggccagcccctgttcgtgtacaagctggagcaggtgtctgagaagggcaaggcttacaccaactacttcggacggtgcaatgtggccgagcacgaaaagctgatcctgctggcccagctgaagcccgagaaggatagcgacgaagccgtgacatatagcctgggaaagtttgggcagagggccctggatttctacagcattcatgtgaccaaggagtccacccaccccgtgaagcccctggcccagatcgccggaaacagatacgcctccggacctgtgggaaaggccctgagcgacgcatgtatgggcacaatcgcctccttcctgtctaagtaccaggacatcatcatcgaacaccagaaggtggtgaagggcaaccagaagagactggagagcctgcgggagctggccggcaaggaaaacctggaataccctagcgtgaccctgccacctcagcctcacaccaaggagggcgttgatgcctacaacgaagtgatcgcccgggtgcgaatgtgggtgaacctgaacctgtggcagaagctgaagctaagcagagatgatgccaagcctctgctgagactgaagggattcccttcctttcctctggtcgagagacaggccaacgaagtggactggtgggacatggtgtgtaacgtgaagaagctgatcaacgagaaaaaggaggatggcaaggtgttttggcagaatctggctggctacaagagacaggaagccctgagaccatacctgagcagcgaggaagatcggaagaagggaaagaaattcgctcggtaccagctgggcgacctgctgctgcacctggaaaagaagcacggcgaggactggggaaaggtgtacgacgaggcctgggagcggattgacaagaaagtggaaggcctgagcaagcacatcaagctggaagaggaacggagaagcgaggacgcccagagcaaggccgccctgaccgactggctgcgggctaaggccagcttcgtgatcgagggcctgaaggaggccgacaaggacgagttctgcagatgcgagctgaagctgcagaagtggtacggggacctgcggggaaagcccttcgccatcgaagccgagaacagcatcctggacatcagcggcttcagcaagcagtacaactgtgccttcatctggcagaaggacggcgtgaagaagctgaacctgtacctgatcatcaactacttcaagggcggcaagctgcggttcaagaagatcaaacctgaagccttcgaagccaacagattctacaccgtgatcaacaaaaagagcggcgagatcgtgcccatggaggtgaacttcaacttcgacgaccccaacctgatcatcctgcctctggcctttggcaagagacagggcagagaattcatctggaacgacctgctgtccctggaaaccggcagcctgaagctggccaacggaagagtgatcgagaagacactgtacaacagaagaacccggcaggatgagcctgccctgttcgtggccctgaccttcgagcggcgggaggtcctggactcctccaatatcaaaccaatgaacctgatcggcgtggcaagaggcgaaaacatccccgccgtgatcgccctgaccgaccccgagggctgcccactgagccggtttaaggatagcctgggaaacccaacccacatcctgagaatcggcgagagctataaggagaagcagcggaccatccaggccaagaaggaggtggagcagcggagagccggcggctacagccggaagtacgccagcaaagccaagaatctggcagacgatatggtgagaaacaccgctagagatctgctgtactacgccgtgacccaggatgccatgctgatcttcgccaacctgagccggggcttcggccggcagggcaagcggaccttcatggccgagagacagtacacacggatggaggactggctgaccgccaagctggcctacgagggcctgagcaagacctacctgtccaagacactggcccagtacacctccaagacatgcagcaactgtgggtttaccatcaccagcgccgactacgacagggtgctggagaagctgaagaagacagcaacaggctggatgaccacaattaacggcaaggagctgaaggtggagggccagattacctactacaacagatacaagagacagaacgtagtcaaggacctgtccgtcgagctggatagactgagcgaagaatctgtgaacaacgacatctcctcctggacaaagggcagaagcggagaagctctgagcctcctgaagaaaagattctcccatagacccgtgcaggagaagttcgtgtgcctgaactgcggcttcgagacacacgcagccgagcaagccgccctgaacatcgccagatcctggctgttcctgcggagccaggagtacaagaaataccagacaaacaagacaaccggcaacaccgataagagagccttcgtcgagacctggcagtccttttaccggaagaagcttaaggaggtgtggaaacctgccgtgcggtctggcggatctggcggaggctcctcccgcccagggccccggcaaggccaggcccagcaggaagaggggcaggaggcccagggccctgaagttcgtggacgtggccgtgtacttcagccccgaggagtggggctgcctgaggcccgcccagagggccctgtacagggacgtgatgagggagacctacggccacctgggcgccctgggctgcgccggccccaagcccgccctgatcagctggctggagaggaacaccgacgactgggagggatctggctccggcagcggccccaagaaaaagagaaaagtctaagctgccttctgcggggcttgccttctggccatgcccttcttctctcccttgcacctgtacctcttggtctttgaataaagcctgagtaggaaggctagcaaaaaaaaaaaaaaaaaaaaaaaaaaaaaaaaaaaaaaaaaaaaaaaaaaaaaaaaaaaaaaaaaaaaaaaaaaaaaaaa

SEQ ID NO: 16593 - RNA, 9485 nt, synthetic construct
  source 1..9485: mol_type = other RNA
aggaaataagagagaaaagaagagtaagaagaaatataagagccaccatggcccctaagaagaagcgtaaagtgagccggatggaacgcctcgtctacgaggtgcggcagaagtgcagaaacatcgaggacatctgcatctcctgcggatctctgaacgtgaccctggagcacccactgttcatcggcggcatgtgccagaactgtaaaaactgttttctggagtgtgcctatcaatacgacgatgacggctaccagagctactgcaccatctgttgcggcggaagagaggtgctgatgtgtggaaataacaactgctgccggtgcttctgcgtggaatgcgtggacctgctggtgggccccggcgccgcccaggccgctattaaggaagatccttggaactgctacatgtgcggccacaagggcacatacggcctgctgagacggagagaggactggcctagcagactgcagatgttcttcgccaataaccacgaccaggagttcgacccccctaaggtgtaccctcccgtccccgccgagaagagaaagcccatccgggtcctgagcctgttcgatggcatcgccaccggtctgctggtgctgaaggacctgggcatccaggtggataggtacattgcctccgaggtgtgcgaggactccatcaccgtgggaatggtgcgtcatcagggcaagatcatgtacgtgggcgacgtgcggagcgtgacacagaagcatatccaggagtggggccctttcgacctggtgatcggcggcagcccttgcaatgacctgagcatcgtgaacccagcccggaagggcctgtacgagggaaccggcagactgttcttcgagttttacagactgctgcacgacgcccggcctaaggaaggcgacgaccggcccttcttttggctgttcgagaatgtggtggccatgggagtcagcgacaagcgggatattagccggttcctggagagcaaccccgtgatgatcgatgccaaggaagtgagcgccgcccaccgggccagatacttctggggcaatctgcctggcatgaacagacccctggccagcaccgtgaacgacaagctggagctgcaggagtgcctggagcacggccggatcgccaagttcagcaaggtgagaaccatcaccacccgaagcaacagcatcaaacaaggcaaggaccagcactttcctgtgttcatgaacgagaaggaggacatcctgtggtgtaccgagatggagagagtgttcgggttcccagtccactacacagatgtcagcaacatgtctagactggccagacagagactgctgggaagaagctggtccgtccctgtgatcagacacctgttcgcccctctgaaggagtacttcgcctgcgtgagcagcggcaacagcaacgccaacagccggggccccagcttctctagcggcctggtgccactgtccctgagagggagccacatgggccccatggagatctacaaaaccgtgagcgcctggaagcggcagcctgtgcgcgtgctgagcctgtttcggaatatcgataaagtcctgaaaagcctgggattcctggagagcggctctggctccggcggtggcaccctgaagtacgtggaggatgtgacaaacgtggtcagacgggatgtggagaagtggggccccttcgatctggtgtacggcagcacccaacccctgggcagctcttgtgaccggtgccctggctggtacatgtttcagttccaccggatcctgcagtacgccctgccgagacaggagtcccagcggccattcttttggattttcatggacaacttgctgctgaccgaggatgaccaggaaactaccactcggttcctgcagaccgaagccgtgaccctgcaggacgtgagaggccgggactaccagaacgccatgcgggtgtggtccaacatccctggactgaaaagcaagcacgcacctctgacccctaaagaagaggagtacctgcaggcccaggtgcggagcagaagcaagctggacgcccctaaggtggatctgctggtgaagaattgcctcctgcccctgagagagtacttcaagtatttcagccagaatagtctgcccctgggaggcagcggcggcggcgccctggtgacatttgaggacgtcgccgtgcggttcacccaggaggaatgggctctgctggatccttctcagaaaatcctgtaccgggacgtgatgagagagacataccggaatctgacctccgtgggcatcaactgggaatgttgggaccttgaagcctgcttcagaagcctgggaagaaacctgagagtgcaggtggtgaagagaaagtgcgagctgaccaacagcggcccctgcgccgagggcggcccaagcagcggcgcccctcctcccagcggcggcagcccagccggctccccaacctctaccgaggagggcacctctgagtccgccacccccgagagcggccctggcacctccaccgagcccagcgagggcagcgcacccggcagccctgccggcagccccacctccacagaggagggaaccagcaccgagcccagcgaaggcagcgccccaggcaccagcaccgagcctagtgagcaggagattaaacggatcaacaagatcagaagaagacttgtgaaagacagcaacaccaagaaggccggcaagacaggccccatgaaaaccctgctggttagagtgatgacacccgatctgagagagcggctggaaaacctgagaaagaagcctgaaaatatcccccagcccatcagcaatacatctagagccaacctgaataagctgctgaccgattacaccgaaatgaagaaggcgatcctgcatgtgtactgggaagagttccagaaggaccctgtgggcctgatgagccgggtggcccagcctgccagcaagaagatcgatcagaacaagctgaaacctgagatggacgagaagggcaacctgaccaccgccggctttgcctgctctcagtgtggccagcccctgttcgtgtacaagctggagcaggtgtctgagaagggcaaggcttacaccaactacttcggacggtgcaatgtggccgagcacgaaaagctgatcctgctggcccagctgaagcccgagaaggatagcgacgaagccgtgacatatagcctgggaaagtttgggcagagggccctggatttctacagcattcatgtgaccaaggagtccacccaccccgtgaagcccctggcccagatcgccggaaacagatacgcctccggacctgtgggaaaggccctgagcgacgcatgtatgggcacaatcgcctccttcctgtctaagtaccaggacatcatcatcgaacaccagaaggtggtgaagggcaaccagaagagactggagagcctgcgggagctggccggcaaggaaaacctggaataccctagcgtgaccctgccacctcagcctcacaccaaggagggcgttgatgcctacaacgaagtgatcgcccgggtgcgaatgtgggtgaacctgaacctgtggcagaagctgaagctaagcagagatgatgccaagcctctgctgagactgaagggattcccttcctttcctctggtcgagagacaggccaacgaagtggactggtgggacatggtgtgtaacgtgaagaagctgatcaacgagaaaaaggaggatggcaaggtgttttggcagaatctggctggctacaagagacaggaagccctgagaccatacctgagcagcgaggaagatcggaagaagggaaagaaattcgctcggtaccagctgggcgacctgctgctgcacctggaaaagaagcacggcgaggactggggaaaggtgtacgacgaggcctgggagcggattgacaagaaagtggaaggcctgagcaagcacatcaagctggaagaggaacggagaagcgaggacgcccagagcaaggccgccctgaccgactggctgcgggctaaggccagcttcgtgatcgagggcctgaaggaggccgacaaggacgagttctgcagatgcgagctgaagctgcagaagtggtacggggacctgcggggaaagcccttcgccatcgaagccgagaacagcatcctggacatcagcggcttcagcaagcagtacaactgtgccttcatctggcagaaggacggcgtgaagaagctgaacctgtacctgatcatcaactacttcaagggcggcaagctgcggttcaagaagatcaaacctgaagccttcgaagccaacagattctacaccgtgatcaacaaaaagagcggcgagatcgtgcccatggaggtgaacttcaacttcgacgaccccaacctgatcatcctgcctctggcctttggcaagagacagggcagagaattcatctggaacgacctgctgtccctggaaaccggcagcctgaagctggccaacggaagagtgatcgagaagacactgtacaacagaagaacccggcaggatgagcctgccctgttcgtggccctgaccttcgagcggcgggaggtcctggactcctccaatatcaaaccaatgaacctgatcggcgtggcaagaggcgaaaacatccccgccgtgatcgccctgaccgaccccgagggctgcccactgagccggtttaaggatagcctgggaaacccaacccacatcctgagaatcggcgagagctataaggagaagcagcggaccatccaggccaagaaggaggtggagcagcggagagccggcggctacagccggaagtacgccagcaaagccaagaatctggcagacgatatggtgagaaacaccgctagagatctgctgtactacgccgtgacccaggatgccatgctgatcttcgccaacctgagccggggcttcggccggcagggcaagcggaccttcatggccgagagacagtacacacggatggaggactggctgaccgccaagctggcctacgagggcctgagcaagacctacctgtccaagacactggcccagtacacctccaagacatgcagcaactgtgggtttaccatcaccagcgccgactacgacagggtgctggagaagctgaagaagacagcaacaggctggatgaccacaattaacggcaaggagctgaaggtggagggccagattacctactacaacagatacaagagacagaacgtagtcaaggacctgtccgtcgagctggatagactgagcgaagaatctgtgaacaacgacatctcctcctggacaaagggcagaagcggagaagctctgagcctcctgaagaaaagattctcccatagacccgtgcaggagaagttcgtgtgcctgaactgcggcttcgagacacacgcagccgagcaagccgccctgaacatcgccagatcctggctgttcctgcggagccaggagtacaagaaataccagacaaacaagacaaccggcaacaccgataagagagccttcgtcgagacctggcagtccttttaccggaagaagcttaaggaggtgtggaaacctgccgtgcggtctggcggatctggcggaggctccttccaggtgctggtgagcttcgaggaggtggccgtgctgctgagccaggaggagtggggccacctgggccccgcccagaagaggctgtacagggacgtgatgctggagacctacggcaacctggtgagcctgggcctgcagggcagcaagcccgacgtgatcagcaagctggagcagggcgaggagccctggaccccccacagccccaggatcgagggcagctggatcaggaggaggaggcccggcggcccaagcagcggcgcccctcctcccagcggcggcagcccagccggctccccaacctctaccgaggagggcacctctgagtccgccacccccgagagcggccctggcacctccaccgagcccagcgagggcagcgcacccggcagccctgccggcagccccacctccacagaggagggaaccagcaccgagcccagcgaaggcagcgccccaggcaccagcaccgagcctagtgagcaggagattaaacggatcaacaagatcagaagaagacttgtgaaagacagcaacaccaagaaggccggcaagacaggccccatgaaaaccctgctggttagagtgatgacacccgatctgagagagcggctggaaaacctgagaaagaagcctgaaaatatcccccagcccatcagcaatacatctagagccaacctgaataagctgctgaccgattacaccgaaatgaagaaggcgatcctgcatgtgtactgggaagagttccagaaggaccctgtgggcctgatgagccgggtggcccagcctgccagcaagaagatcgatcagaacaagctgaaacctgagatggacgagaagggcaacctgaccaccgccggctttgcctgctctcagtgtggccagcccctgttcgtgtacaagctggagcaggtgtctgagaagggcaaggcttacaccaactacttcggacggtgcaatgtggccgagcacgaaaagctgatcctgctggcccagctgaagcccgagaaggatagcgacgaagccgtgacatatagcctgggaaagtttgggcagagggccctggatttctacagcattcatgtgaccaaggagtccacccaccccgtgaagcccctggcccagatcgccggaaacagatacgcctccggacctgtgggaaaggccctgagcgacgcatgtatgggcacaatcgcctccttcctgtctaagtaccaggacatcatcatcgaacaccagaaggtggtgaagggcaaccagaagagactggagagcctgcgggagctggccggcaaggaaaacctggaataccctagcgtgaccctgccacctcagcctcacaccaaggagggcgttgatgcctacaacgaagtgatcgcccgggtgcgaatgtgggtgaacctgaacctgtggcagaagctgaagctaagcagagatgatgccaagcctctgctgagactgaagggattcccttcctttcctctggtcgagagacaggccaacgaagtggactggtgggacatggtgtgtaacgtgaagaagctgatcaacgagaaaaaggaggatggcaaggtgttttggcagaatctggctggctacaagagacaggaagccctgagaccatacctgagcagcgaggaagatcggaagaagggaaagaaattcgctcggtaccagctgggcgacctgctgctgcacctggaaaagaagcacggcgaggactggggaaaggtgtacgacgaggcctgggagcggattgacaagaaagtggaaggcctgagcaagcacatcaagctggaagaggaacggagaagcgaggacgcccagagcaaggccgccctgaccgactggctgcgggctaaggccagcttcgtgatcgagggcctgaaggaggccgacaaggacgagttctgcagatgcgagctgaagctgcagaagtggtacggggacctgcggggaaagcccttcgccatcgaagccgagaacagcatcctggacatcagcggcttcagcaagcagtacaactgtgccttcatctggcagaaggacggcgtgaagaagctgaacctgtacctgatcatcaactacttcaagggcggcaagctgcggttcaagaagatcaaacctgaagccttcgaagccaacagattctacaccgtgatcaacaaaaagagcggcgagatcgtgcccatggaggtgaacttcaacttcgacgaccccaacctgatcatcctgcctctggcctttggcaagagacagggcagagaattcatctggaacgacctgctgtccctggaaaccggcagcctgaagctggccaacggaagagtgatcgagaagacactgtacaacagaagaacccggcaggatgagcctgccctgttcgtggccctgaccttcgagcggcgggaggtcctggactcctccaatatcaaaccaatgaacctgatcggcgtggcaagaggcgaaaacatccccgccgtgatcgccctgaccgaccccgagggctgcccactgagccggtttaaggatagcctgggaaacccaacccacatcctgagaatcggcgagagctataaggagaagcagcggaccatccaggccaagaaggaggtggagcagcggagagccggcggctacagccggaagtacgccagcaaagccaagaatctggcagacgatatggtgagaaacaccgctagagatctgctgtactacgccgtgacccaggatgccatgctgatcttcgccaacctgagccggggcttcggccggcagggcaagcggaccttcatggccgagagacagtacacacggatggaggactggctgaccgccaagctggcctacgagggcctgagcaagacctacctgtccaagacactggcccagtacacctccaagacatgcagcaactgtgggtttaccatcaccagcgccgactacgacagggtgctggagaagctgaagaagacagcaacaggctggatgaccacaattaacggcaaggagctgaaggtggagggccagattacctactacaacagatacaagagacagaacgtagtcaaggacctgtccgtcgagctggatagactgagcgaagaatctgtgaacaacgacatctcctcctggacaaagggcagaagcggagaagctctgagcctcctgaagaaaagattctcccatagacccgtgcaggagaagttcgtgtgcctgaactgcggcttcgagacacacgcagccgagcaagccgccctgaacatcgccagatcctggctgttcctgcggagccaggagtacaagaaataccagacaaacaagacaaccggcaacaccgataagagagccttcgtcgagacctggcagtccttttaccggaagaagcttaaggaggtgtggaaacctgccgtgcggtctggcggatctggcggaggctcctttccaggtgctggtgagcttcgaggaggtggccgtgctgctgagccaggaggagtggggccacctgggccccgcccagaagaggctgtacagggacgtgatgctggagacctacggcaacctggtgagcctgggcctgcagggcagcaagcccgacgtgatcagcaagctggagcagggcgaggagccctggaccccccacagccccaggatcgagggcagctggatcaggaggaggaggcccggatctggctccggcagcggccccaagaaaaagagaaaagtctaagctgccttctgcggggcttgccttctggccatgcccttcttctctcccttgcacctgtacctcttggtctttgaataaagcctgagtaggaaggctagcaaaaaaaaaaaaaaaaaaaaaaaaaaaaaaaaaaaaaaaaaaaaaaaaaaaaaaaaaaaaaaaaaaaaaaaaaaaaaaaa

SEQ ID NO: 16594 - RNA, 9485 nt, synthetic construct
  source 1..9485: mol_type = other RNA
aggaaataagagagaaaagaagagtaagaagaaatataagagccaccatggcccctaagaagaagcgtaaagtgagccggatggaacgcctcgtctacgaggtgcggcagaagtgcagaaacatcgaggacatctgcatctcctgcggatctctgaacgtgaccctggagcacccactgttcatcggcggcatgtgccagaactgtaaaaactgttttctggagtgtgcctatcaatacgacgatgacggctaccagagctactgcaccatctgttgcggcggaagagaggtgctgatgtgtggaaataacaactgctgccggtgcttctgcgtggaatgcgtggacctgctggtgggccccggcgccgcccaggccgctattaaggaagatccttggaactgctacatgtgcggccacaagggcacatacggcctgctgagacggagagaggactggcctagcagactgcagatgttcttcgccaataaccacgaccaggagttcgacccccctaaggtgtaccctcccgtccccgccgagaagagaaagcccatccgggtcctgagcctgttcgatggcatcgccaccggtctgctggtgctgaaggacctgggcatccaggtggataggtacattgcctccgaggtgtgcgaggactccatcaccgtgggaatggtgcgtcatcagggcaagatcatgtacgtgggcgacgtgcggagcgtgacacagaagcatatccaggagtggggccctttcgacctggtgatcggcggcagcccttgcaatgacctgagcatcgtgaacccagcccggaagggcctgtacgagggaaccggcagactgttcttcgagttttacagactgctgcacgacgcccggcctaaggaaggcgacgaccggcccttcttttggctgttcgagaatgtggtggccatgggagtcagcgacaagcgggatattagccggttcctggagagcaaccccgtgatgatcgatgccaaggaagtgagcgccgcccaccgggccagatacttctggggcaatctgcctggcatgaacagacccctggccagcaccgtgaacgacaagctggagctgcaggagtgcctggagcacggccggatcgccaagttcagcaaggtgagaaccatcaccacccgaagcaacagcatcaaacaaggcaaggaccagcactttcctgtgttcatgaacgagaaggaggacatcctgtggtgtaccgagatggagagagtgttcgggttcccagtccactacacagatgtcagcaacatgtctagactggccagacagagactgctgggaagaagctggtccgtccctgtgatcagacacctgttcgcccctctgaaggagtacttcgcctgcgtgagcagcggcaacagcaacgccaacagccggggccccagcttctctagcggcctggtgccactgtccctgagagggagccacatgggccccatggagatctacaaaaccgtgagcgcctggaagcggcagcctgtgcgcgtgctgagcctgtttcggaatatcgataaagtcctgaaaagcctgggattcctggagagcggctctggctccggcggtggcaccctgaagtacgtggaggatgtgacaaacgtggtcagacgggatgtggagaagtggggccccttcgatctggtgtacggcagcacccaacccctgggcagctcttgtgaccggtgccctggctggtacatgtttcagttccaccggatcctgcagtacgccctgccgagacaggagtcccagcggccattcttttggattttcatggacaacttgctgctgaccgaggatgaccaggaaactaccactcggttcctgcagaccgaagccgtgaccctgcaggacgtgagaggccgggactaccagaacgccatgcgggtgtggtccaacatccctggactgaaaagcaagcacgcacctctgacccctaaagaagaggagtacctgcaggcccaggtgcggagcagaagcaagctggacgcccctaaggtggatctgctggtgaagaattgcctcctgcccctgagagagtacttcaagtatttcagccagaatagtctgcccctgggaggcagcggcggcggcgccctggtgacatttgaggacgtcgccgtgcggttcacccaggaggaatgggctctgctggatccttctcagaaaatcctgtaccgggacgtgatgagagagacataccggaatctgacctccgtgggcatcaactgggaatgttgggaccttgaagcctgcttcagaagcctgggaagaaacctgagagtgcaggtggtgaagagaaagtgcgagctgaccaacagcggcccctgcgccgagggcggcccaagcagcggcgcccctcctcccagcggcggcagcccagccggctccccaacctctaccgaggagggcacctctgagtccgccacccccgagagcggccctggcacctccaccgagcccagcgagggcagcgcacccggcagccctgccggcagccccacctccacagaggagggaaccagcaccgagcccagcgaaggcagcgccccaggcaccagcaccgagcctagtgagcaggagattaaacggatcaacaagatcagaagaagacttgtgaaagacagcaacaccaagaaggccggcaagacaggccccatgaaaaccctgctggttagagtgatgacacccgatctgagagagcggctggaaaacctgagaaagaagcctgaaaatatcccccagcccatcagcaatacatctagagccaacctgaataagctgctgaccgattacaccgaaatgaagaaggcgatcctgcatgtgtactgggaagagttccagaaggaccctgtgggcctgatgagccgggtggcccagcctgccagcaagaagatcgatcagaacaagctgaaacctgagatggacgagaagggcaacctgaccaccgccggctttgcctgctctcagtgtggccagcccctgttcgtgtacaagctggagcaggtgtctgagaagggcaaggcttacaccaactacttcggacggtgcaatgtggccgagcacgaaaagctgatcctgctggcccagctgaagcccgagaaggatagcgacgaagccgtgacatatagcctgggaaagtttgggcagagggccctggatttctacagcattcatgtgaccaaggagtccacccaccccgtgaagcccctggcccagatcgccggaaacagatacgcctccggacctgtgggaaaggccctgagcgacgcatgtatgggcacaatcgcctccttcctgtctaagtaccaggacatcatcatcgaacaccagaaggtggtgaagggcaaccagaagagactggagagcctgcgggagctggccggcaaggaaaacctggaataccctagcgtgaccctgccacctcagcctcacaccaaggagggcgttgatgcctacaacgaagtgatcgcccgggtgcgaatgtgggtgaacctgaacctgtggcagaagctgaagctaagcagagatgatgccaagcctctgctgagactgaagggattcccttcctttcctctggtcgagagacaggccaacgaagtggactggtgggacatggtgtgtaacgtgaagaagctgatcaacgagaaaaaggaggatggcaaggtgttttggcagaatctggctggctacaagagacaggaagccctgagaccatacctgagcagcgaggaagatcggaagaagggaaagaaattcgctcggtaccagctgggcgacctgctgctgcacctggaaaagaagcacggcgaggactggggaaaggtgtacgacgaggcctgggagcggattgacaagaaagtggaaggcctgagcaagcacatcaagctggaagaggaacggagaagcgaggacgcccagagcaaggccgccctgaccgactggctgcgggctaaggccagcttcgtgatcgagggcctgaaggaggccgacaaggacgagttctgcagatgcgagctgaagctgcagaagtggtacggggacctgcggggaaagcccttcgccatcgaagccgagaacagcatcctggacatcagcggcttcagcaagcagtacaactgtgccttcatctggcagaaggacggcgtgaagaagctgaacctgtacctgatcatcaactacttcaagggcggcaagctgcggttcaagaagatcaaacctgaagccttcgaagccaacagattctacaccgtgatcaacaaaaagagcggcgagatcgtgcccatggaggtgaacttcaacttcgacgaccccaacctgatcatcctgcctctggcctttggcaagagacagggcagagaattcatctggaacgacctgctgtccctggaaaccggcagcctgaagctggccaacggaagagtgatcgagaagacactgtacaacagaagaacccggcaggatgagcctgccctgttcgtggccctgaccttcgagcggcgggaggtcctggactcctccaatatcaaaccaatgaacctgatcggcgtggcaagaggcgaaaacatccccgccgtgatcgccctgaccgaccccgagggctgcccactgagccggtttaaggatagcctgggaaacccaacccacatcctgagaatcggcgagagctataaggagaagcagcggaccatccaggccaagaaggaggtggagcagcggagagccggcggctacagccggaagtacgccagcaaagccaagaatctggcagacgatatggtgagaaacaccgctagagatctgctgtactacgccgtgacccaggatgccatgctgatcttcgccaacctgagccggggcttcggccggcagggcaagcggaccttcatggccgagagacagtacacacggatggaggactggctgaccgccaagctggcctacgagggcctgagcaagacctacctgtccaagacactggcccagtacacctccaagacatgcagcaactgtgggtttaccatcaccagcgccgactacgacagggtgctggagaagctgaagaagacagcaacaggctggatgaccacaattaacggcaaggagctgaaggtggagggccagattacctactacaacagatacaagagacagaacgtagtcaaggacctgtccgtcgagctggatagactgagcgaagaatctgtgaacaacgacatctcctcctggacaaagggcagaagcggagaagctctgagcctcctgaagaaaagattctcccatagacccgtgcaggagaagttcgtgtgcctgaactgcggcttcgagacacacgcagccgagcaagccgccctgaacatcgccagatcctggctgttcctgcggagccaggagtacaagaaataccagacaaacaagacaaccggcaacaccgataagagagccttcgtcgagacctggcagtccttttaccggaagaagcttaaggaggtgtggaaacctgccgtgcggtctggcggatctggcggaggctccatccaggagcccgtgaccttcaaggacgtggccgtggacttcacccaggaggagtggggccagctggacagcgtgcagaggaccctgtacagggacgtgatgctggagacctacggccacctgctgagcgtgggcaaccacatcgccaagcccgaggtgatcagcctgctggagcagggcgaggagccctggagcgtggagcaggcctacccccagagcacctgccccgagtggatgaggaacggcggcccaagcagcggcgcccctcctcccagcggcggcagcccagccggctccccaacctctaccgaggagggcacctctgagtccgccacccccgagagcggccctggcacctccaccgagcccagcgagggcagcgcacccggcagccctgccggcagccccacctccacagaggagggaaccagcaccgagcccagcgaaggcagcgccccaggcaccagcaccgagcctagtgagcaggagattaaacggatcaacaagatcagaagaagacttgtgaaagacagcaacaccaagaaggccggcaagacaggccccatgaaaaccctgctggttagagtgatgacacccgatctgagagagcggctggaaaacctgagaaagaagcctgaaaatatcccccagcccatcagcaatacatctagagccaacctgaataagctgctgaccgattacaccgaaatgaagaaggcgatcctgcatgtgtactgggaagagttccagaaggaccctgtgggcctgatgagccgggtggcccagcctgccagcaagaagatcgatcagaacaagctgaaacctgagatggacgagaagggcaacctgaccaccgccggctttgcctgctctcagtgtggccagcccctgttcgtgtacaagctggagcaggtgtctgagaagggcaaggcttacaccaactacttcggacggtgcaatgtggccgagcacgaaaagctgatcctgctggcccagctgaagcccgagaaggatagcgacgaagccgtgacatatagcctgggaaagtttgggcagagggccctggatttctacagcattcatgtgaccaaggagtccacccaccccgtgaagcccctggcccagatcgccggaaacagatacgcctccggacctgtgggaaaggccctgagcgacgcatgtatgggcacaatcgcctccttcctgtctaagtaccaggacatcatcatcgaacaccagaaggtggtgaagggcaaccagaagagactggagagcctgcgggagctggccggcaaggaaaacctggaataccctagcgtgaccctgccacctcagcctcacaccaaggagggcgttgatgcctacaacgaagtgatcgcccgggtgcgaatgtgggtgaacctgaacctgtggcagaagctgaagctaagcagagatgatgccaagcctctgctgagactgaagggattcccttcctttcctctggtcgagagacaggccaacgaagtggactggtgggacatggtgtgtaacgtgaagaagctgatcaacgagaaaaaggaggatggcaaggtgttttggcagaatctggctggctacaagagacaggaagccctgagaccatacctgagcagcgaggaagatcggaagaagggaaagaaattcgctcggtaccagctgggcgacctgctgctgcacctggaaaagaagcacggcgaggactggggaaaggtgtacgacgaggcctgggagcggattgacaagaaagtggaaggcctgagcaagcacatcaagctggaagaggaacggagaagcgaggacgcccagagcaaggccgccctgaccgactggctgcgggctaaggccagcttcgtgatcgagggcctgaaggaggccgacaaggacgagttctgcagatgcgagctgaagctgcagaagtggtacggggacctgcggggaaagcccttcgccatcgaagccgagaacagcatcctggacatcagcggcttcagcaagcagtacaactgtgccttcatctggcagaaggacggcgtgaagaagctgaacctgtacctgatcatcaactacttcaagggcggcaagctgcggttcaagaagatcaaacctgaagccttcgaagccaacagattctacaccgtgatcaacaaaaagagcggcgagatcgtgcccatggaggtgaacttcaacttcgacgaccccaacctgatcatcctgcctctggcctttggcaagagacagggcagagaattcatctggaacgacctgctgtccctggaaaccggcagcctgaagctggccaacggaagagtgatcgagaagacactgtacaacagaagaacccggcaggatgagcctgccctgttcgtggccctgaccttcgagcggcgggaggtcctggactcctccaatatcaaaccaatgaacctgatcggcgtggcaagaggcgaaaacatccccgccgtgatcgccctgaccgaccccgagggctgcccactgagccggtttaaggatagcctgggaaacccaacccacatcctgagaatcggcgagagctataaggagaagcagcggaccatccaggccaagaaggaggtggagcagcggagagccggcggctacagccggaagtacgccagcaaagccaagaatctggcagacgatatggtgagaaacaccgctagagatctgctgtactacgccgtgacccaggatgccatgctgatcttcgccaacctgagccggggcttcggccggcagggcaagcggaccttcatggccgagagacagtacacacggatggaggactggctgaccgccaagctggcctacgagggcctgagcaagacctacctgtccaagacactggcccagtacacctccaagacatgcagcaactgtgggtttaccatcaccagcgccgactacgacagggtgctggagaagctgaagaagacagcaacaggctggatgaccacaattaacggcaaggagctgaaggtggagggccagattacctactacaacagatacaagagacagaacgtagtcaaggacctgtccgtcgagctggatagactgagcgaagaatctgtgaacaacgacatctcctcctggacaaagggcagaagcggagaagctctgagcctcctgaagaaaagattctcccatagacccgtgcaggagaagttcgtgtgcctgaactgcggcttcgagacacacgcagccgagcaagccgccctgaacatcgccagatcctggctgttcctgcggagccaggagtacaagaaataccagacaaacaagacaaccggcaacaccgataagagagccttcgtcgagacctggcagtccttttaccggaagaagcttaaggaggtgtggaaacctgccgtgcggtctggcggatctggcggaggctcctatccaggagcccgtgaccttcaaggacgtggccgtggacttcacccaggaggagtggggccagctggacagcgtgcagaggaccctgtacagggacgtgatgctggagacctacggccacctgctgagcgtgggcaaccacatcgccaagcccgaggtgatcagcctgctggagcagggcgaggagccctggagcgtggagcaggcctacccccagagcacctgccccgagtggatgaggaacggatctggctccggcagcggccccaagaaaaagagaaaagtctaagctgccttctgcggggcttgccttctggccatgcccttcttctctcccttgcacctgtacctcttggtctttgaataaagcctgagtaggaaggctagcaaaaaaaaaaaaaaaaaaaaaaaaaaaaaaaaaaaaaaaaaaaaaaaaaaaaaaaaaaaaaaaaaaaaaaaaaaaaaaaa

SEQ ID NO: 16595 - RNA, 9485 nt, synthetic construct
  source 1..9485: mol_type = other RNA
aggaaataagagagaaaagaagagtaagaagaaatataagagccaccatggcccctaagaagaagcgtaaagtgagccggatggaacgcctcgtctacgaggtgcggcagaagtgcagaaacatcgaggacatctgcatctcctgcggatctctgaacgtgaccctggagcacccactgttcatcggcggcatgtgccagaactgtaaaaactgttttctggagtgtgcctatcaatacgacgatgacggctaccagagctactgcaccatctgttgcggcggaagagaggtgctgatgtgtggaaataacaactgctgccggtgcttctgcgtggaatgcgtggacctgctggtgggccccggcgccgcccaggccgctattaaggaagatccttggaactgctacatgtgcggccacaagggcacatacggcctgctgagacggagagaggactggcctagcagactgcagatgttcttcgccaataaccacgaccaggagttcgacccccctaaggtgtaccctcccgtccccgccgagaagagaaagcccatccgggtcctgagcctgttcgatggcatcgccaccggtctgctggtgctgaaggacctgggcatccaggtggataggtacattgcctccgaggtgtgcgaggactccatcaccgtgggaatggtgcgtcatcagggcaagatcatgtacgtgggcgacgtgcggagcgtgacacagaagcatatccaggagtggggccctttcgacctggtgatcggcggcagcccttgcaatgacctgagcatcgtgaacccagcccggaagggcctgtacgagggaaccggcagactgttcttcgagttttacagactgctgcacgacgcccggcctaaggaaggcgacgaccggcccttcttttggctgttcgagaatgtggtggccatgggagtcagcgacaagcgggatattagccggttcctggagagcaaccccgtgatgatcgatgccaaggaagtgagcgccgcccaccgggccagatacttctggggcaatctgcctggcatgaacagacccctggccagcaccgtgaacgacaagctggagctgcaggagtgcctggagcacggccggatcgccaagttcagcaaggtgagaaccatcaccacccgaagcaacagcatcaaacaaggcaaggaccagcactttcctgtgttcatgaacgagaaggaggacatcctgtggtgtaccgagatggagagagtgttcgggttcccagtccactacacagatgtcagcaacatgtctagactggccagacagagactgctgggaagaagctggtccgtccctgtgatcagacacctgttcgcccctctgaaggagtacttcgcctgcgtgagcagcggcaacagcaacgccaacagccggggccccagcttctctagcggcctggtgccactgtccctgagagggagccacatgggccccatggagatctacaaaaccgtgagcgcctggaagcggcagcctgtgcgcgtgctgagcctgtttcggaatatcgataaagtcctgaaaagcctgggattcctggagagcggctctggctccggcggtggcaccctgaagtacgtggaggatgtgacaaacgtggtcagacgggatgtggagaagtggggccccttcgatctggtgtacggcagcacccaacccctgggcagctcttgtgaccggtgccctggctggtacatgtttcagttccaccggatcctgcagtacgccctgccgagacaggagtcccagcggccattcttttggattttcatggacaacttgctgctgaccgaggatgaccaggaaactaccactcggttcctgcagaccgaagccgtgaccctgcaggacgtgagaggccgggactaccagaacgccatgcgggtgtggtccaacatccctggactgaaaagcaagcacgcacctctgacccctaaagaagaggagtacctgcaggcccaggtgcggagcagaagcaagctggacgcccctaaggtggatctgctggtgaagaattgcctcctgcccctgagagagtacttcaagtatttcagccagaatagtctgcccctgggaggcagcggcggcggcgccctggtgacatttgaggacgtcgccgtgcggttcacccaggaggaatgggctctgctggatccttctcagaaaatcctgtaccgggacgtgatgagagagacataccggaatctgacctccgtgggcatcaactgggaatgttgggaccttgaagcctgcttcagaagcctgggaagaaacctgagagtgcaggtggtgaagagaaagtgcgagctgaccaacagcggcccctgcgccgagggcggcccaagcagcggcgcccctcctcccagcggcggcagcccagccggctccccaacctctaccgaggagggcacctctgagtccgccacccccgagagcggccctggcacctccaccgagcccagcgagggcagcgcacccggcagccctgccggcagccccacctccacagaggagggaaccagcaccgagcccagcgaaggcagcgccccaggcaccagcaccgagcctagtgagcaggagattaaacggatcaacaagatcagaagaagacttgtgaaagacagcaacaccaagaaggccggcaagacaggccccatgaaaaccctgctggttagagtgatgacacccgatctgagagagcggctggaaaacctgagaaagaagcctgaaaatatcccccagcccatcagcaatacatctagagccaacctgaataagctgctgaccgattacaccgaaatgaagaaggcgatcctgcatgtgtactgggaagagttccagaaggaccctgtgggcctgatgagccgggtggcccagcctgccagcaagaagatcgatcagaacaagctgaaacctgagatggacgagaagggcaacctgaccaccgccggctttgcctgctctcagtgtggccagcccctgttcgtgtacaagctggagcaggtgtctgagaagggcaaggcttacaccaactacttcggacggtgcaatgtggccgagcacgaaaagctgatcctgctggcccagctgaagcccgagaaggatagcgacgaagccgtgacatatagcctgggaaagtttgggcagagggccctggatttctacagcattcatgtgaccaaggagtccacccaccccgtgaagcccctggcccagatcgccggaaacagatacgcctccggacctgtgggaaaggccctgagcgacgcatgtatgggcacaatcgcctccttcctgtctaagtaccaggacatcatcatcgaacaccagaaggtggtgaagggcaaccagaagagactggagagcctgcgggagctggccggcaaggaaaacctggaataccctagcgtgaccctgccacctcagcctcacaccaaggagggcgttgatgcctacaacgaagtgatcgcccgggtgcgaatgtgggtgaacctgaacctgtggcagaagctgaagctaagcagagatgatgccaagcctctgctgagactgaagggattcccttcctttcctctggtcgagagacaggccaacgaagtggactggtgggacatggtgtgtaacgtgaagaagctgatcaacgagaaaaaggaggatggcaaggtgttttggcagaatctggctggctacaagagacaggaagccctgagaccatacctgagcagcgaggaagatcggaagaagggaaagaaattcgctcggtaccagctgggcgacctgctgctgcacctggaaaagaagcacggcgaggactggggaaaggtgtacgacgaggcctgggagcggattgacaagaaagtggaaggcctgagcaagcacatcaagctggaagaggaacggagaagcgaggacgcccagagcaaggccgccctgaccgactggctgcgggctaaggccagcttcgtgatcgagggcctgaaggaggccgacaaggacgagttctgcagatgcgagctgaagctgcagaagtggtacggggacctgcggggaaagcccttcgccatcgaagccgagaacagcatcctggacatcagcggcttcagcaagcagtacaactgtgccttcatctggcagaaggacggcgtgaagaagctgaacctgtacctgatcatcaactacttcaagggcggcaagctgcggttcaagaagatcaaacctgaagccttcgaagccaacagattctacaccgtgatcaacaaaaagagcggcgagatcgtgcccatggaggtgaacttcaacttcgacgaccccaacctgatcatcctgcctctggcctttggcaagagacagggcagagaattcatctggaacgacctgctgtccctggaaaccggcagcctgaagctggccaacggaagagtgatcgagaagacactgtacaacagaagaacccggcaggatgagcctgccctgttcgtggccctgaccttcgagcggcgggaggtcctggactcctccaatatcaaaccaatgaacctgatcggcgtggcaagaggcgaaaacatccccgccgtgatcgccctgaccgaccccgagggctgcccactgagccggtttaaggatagcctgggaaacccaacccacatcctgagaatcggcgagagctataaggagaagcagcggaccatccaggccaagaaggaggtggagcagcggagagccggcggctacagccggaagtacgccagcaaagccaagaatctggcagacgatatggtgagaaacaccgctagagatctgctgtactacgccgtgacccaggatgccatgctgatcttcgccaacctgagccggggcttcggccggcagggcaagcggaccttcatggccgagagacagtacacacggatggaggactggctgaccgccaagctggcctacgagggcctgagcaagacctacctgtccaagacactggcccagtacacctccaagacatgcagcaactgtgggtttaccatcaccagcgccgactacgacagggtgctggagaagctgaagaagacagcaacaggctggatgaccacaattaacggcaaggagctgaaggtggagggccagattacctactacaacagatacaagagacagaacgtagtcaaggacctgtccgtcgagctggatagactgagcgaagaatctgtgaacaacgacatctcctcctggacaaagggcagaagcggagaagctctgagcctcctgaagaaaagattctcccatagacccgtgcaggagaagttcgtgtgcctgaactgcggcttcgagacacacgcagccgagcaagccgccctgaacatcgccagatcctggctgttcctgcggagccaggagtacaagaaataccagacaaacaagacaaccggcaacaccgataagagagccttcgtcgagacctggcagtccttttaccggaagaagcttaaggaggtgtggaaacctgccgtgcggtctggcggatctggcggaggctcccacaagaagagcatggtgttcagcgacgtgagcctggacttcagccaggaggagtgggagtgcctgggccccgcccagaaggacctgtacagggacgtgatgctggagaactacagccacctgctgagcgtggccggcctgcacatccccaagccccaggtgatcagcctgctggagcagggcaaggagccctggatgatcggcaaggagctgaccaggggcctgtgcagcgccctggagagcggcggcccaagcagcggcgcccctcctcccagcggcggcagcccagccggctccccaacctctaccgaggagggcacctctgagtccgccacccccgagagcggccctggcacctccaccgagcccagcgagggcagcgcacccggcagccctgccggcagccccacctccacagaggagggaaccagcaccgagcccagcgaaggcagcgccccaggcaccagcaccgagcctagtgagcaggagattaaacggatcaacaagatcagaagaagacttgtgaaagacagcaacaccaagaaggccggcaagacaggccccatgaaaaccctgctggttagagtgatgacacccgatctgagagagcggctggaaaacctgagaaagaagcctgaaaatatcccccagcccatcagcaatacatctagagccaacctgaataagctgctgaccgattacaccgaaatgaagaaggcgatcctgcatgtgtactgggaagagttccagaaggaccctgtgggcctgatgagccgggtggcccagcctgccagcaagaagatcgatcagaacaagctgaaacctgagatggacgagaagggcaacctgaccaccgccggctttgcctgctctcagtgtggccagcccctgttcgtgtacaagctggagcaggtgtctgagaagggcaaggcttacaccaactacttcggacggtgcaatgtggccgagcacgaaaagctgatcctgctggcccagctgaagcccgagaaggatagcgacgaagccgtgacatatagcctgggaaagtttgggcagagggccctggatttctacagcattcatgtgaccaaggagtccacccaccccgtgaagcccctggcccagatcgccggaaacagatacgcctccggacctgtgggaaaggccctgagcgacgcatgtatgggcacaatcgcctccttcctgtctaagtaccaggacatcatcatcgaacaccagaaggtggtgaagggcaaccagaagagactggagagcctgcgggagctggccggcaaggaaaacctggaataccctagcgtgaccctgccacctcagcctcacaccaaggagggcgttgatgcctacaacgaagtgatcgcccgggtgcgaatgtgggtgaacctgaacctgtggcagaagctgaagctaagcagagatgatgccaagcctctgctgagactgaagggattcccttcctttcctctggtcgagagacaggccaacgaagtggactggtgggacatggtgtgtaacgtgaagaagctgatcaacgagaaaaaggaggatggcaaggtgttttggcagaatctggctggctacaagagacaggaagccctgagaccatacctgagcagcgaggaagatcggaagaagggaaagaaattcgctcggtaccagctgggcgacctgctgctgcacctggaaaagaagcacggcgaggactggggaaaggtgtacgacgaggcctgggagcggattgacaagaaagtggaaggcctgagcaagcacatcaagctggaagaggaacggagaagcgaggacgcccagagcaaggccgccctgaccgactggctgcgggctaaggccagcttcgtgatcgagggcctgaaggaggccgacaaggacgagttctgcagatgcgagctgaagctgcagaagtggtacggggacctgcggggaaagcccttcgccatcgaagccgagaacagcatcctggacatcagcggcttcagcaagcagtacaactgtgccttcatctggcagaaggacggcgtgaagaagctgaacctgtacctgatcatcaactacttcaagggcggcaagctgcggttcaagaagatcaaacctgaagccttcgaagccaacagattctacaccgtgatcaacaaaaagagcggcgagatcgtgcccatggaggtgaacttcaacttcgacgaccccaacctgatcatcctgcctctggcctttggcaagagacagggcagagaattcatctggaacgacctgctgtccctggaaaccggcagcctgaagctggccaacggaagagtgatcgagaagacactgtacaacagaagaacccggcaggatgagcctgccctgttcgtggccctgaccttcgagcggcgggaggtcctggactcctccaatatcaaaccaatgaacctgatcggcgtggcaagaggcgaaaacatccccgccgtgatcgccctgaccgaccccgagggctgcccactgagccggtttaaggatagcctgggaaacccaacccacatcctgagaatcggcgagagctataaggagaagcagcggaccatccaggccaagaaggaggtggagcagcggagagccggcggctacagccggaagtacgccagcaaagccaagaatctggcagacgatatggtgagaaacaccgctagagatctgctgtactacgccgtgacccaggatgccatgctgatcttcgccaacctgagccggggcttcggccggcagggcaagcggaccttcatggccgagagacagtacacacggatggaggactggctgaccgccaagctggcctacgagggcctgagcaagacctacctgtccaagacactggcccagtacacctccaagacatgcagcaactgtgggtttaccatcaccagcgccgactacgacagggtgctggagaagctgaagaagacagcaacaggctggatgaccacaattaacggcaaggagctgaaggtggagggccagattacctactacaacagatacaagagacagaacgtagtcaaggacctgtccgtcgagctggatagactgagcgaagaatctgtgaacaacgacatctcctcctggacaaagggcagaagcggagaagctctgagcctcctgaagaaaagattctcccatagacccgtgcaggagaagttcgtgtgcctgaactgcggcttcgagacacacgcagccgagcaagccgccctgaacatcgccagatcctggctgttcctgcggagccaggagtacaagaaataccagacaaacaagacaaccggcaacaccgataagagagccttcgtcgagacctggcagtccttttaccggaagaagcttaaggaggtgtggaaacctgccgtgcggtctggcggatctggcggaggctcctcacaagaagagcatggtgttcagcgacgtgagcctggacttcagccaggaggagtgggagtgcctgggccccgcccagaaggacctgtacagggacgtgatgctggagaactacagccacctgctgagcgtggccggcctgcacatccccaagccccaggtgatcagcctgctggagcagggcaaggagccctggatgatcggcaaggagctgaccaggggcctgtgcagcgccctggagagcggatctggctccggcagcggccccaagaaaaagagaaaagtctaagctgccttctgcggggcttgccttctggccatgcccttcttctctcccttgcacctgtacctcttggtctttgaataaagcctgagtaggaaggctagcaaaaaaaaaaaaaaaaaaaaaaaaaaaaaaaaaaaaaaaaaaaaaaaaaaaaaaaaaaaaaaaaaaaaaaaaaaaaaaaa

SEQ ID NO: 16596 - RNA, 9485 nt, synthetic construct
  source 1..9485: mol_type = other RNA
aggaaataagagagaaaagaagagtaagaagaaatataagagccaccatggcccctaagaagaagcgtaaagtgagccggatggaacgcctcgtctacgaggtgcggcagaagtgcagaaacatcgaggacatctgcatctcctgcggatctctgaacgtgaccctggagcacccactgttcatcggcggcatgtgccagaactgtaaaaactgttttctggagtgtgcctatcaatacgacgatgacggctaccagagctactgcaccatctgttgcggcggaagagaggtgctgatgtgtggaaataacaactgctgccggtgcttctgcgtggaatgcgtggacctgctggtgggccccggcgccgcccaggccgctattaaggaagatccttggaactgctacatgtgcggccacaagggcacatacggcctgctgagacggagagaggactggcctagcagactgcagatgttcttcgccaataaccacgaccaggagttcgacccccctaaggtgtaccctcccgtccccgccgagaagagaaagcccatccgggtcctgagcctgttcgatggcatcgccaccggtctgctggtgctgaaggacctgggcatccaggtggataggtacattgcctccgaggtgtgcgaggactccatcaccgtgggaatggtgcgtcatcagggcaagatcatgtacgtgggcgacgtgcggagcgtgacacagaagcatatccaggagtggggccctttcgacctggtgatcggcggcagcccttgcaatgacctgagcatcgtgaacccagcccggaagggcctgtacgagggaaccggcagactgttcttcgagttttacagactgctgcacgacgcccggcctaaggaaggcgacgaccggcccttcttttggctgttcgagaatgtggtggccatgggagtcagcgacaagcgggatattagccggttcctggagagcaaccccgtgatgatcgatgccaaggaagtgagcgccgcccaccgggccagatacttctggggcaatctgcctggcatgaacagacccctggccagcaccgtgaacgacaagctggagctgcaggagtgcctggagcacggccggatcgccaagttcagcaaggtgagaaccatcaccacccgaagcaacagcatcaaacaaggcaaggaccagcactttcctgtgttcatgaacgagaaggaggacatcctgtggtgtaccgagatggagagagtgttcgggttcccagtccactacacagatgtcagcaacatgtctagactggccagacagagactgctgggaagaagctggtccgtccctgtgatcagacacctgttcgcccctctgaaggagtacttcgcctgcgtgagcagcggcaacagcaacgccaacagccggggccccagcttctctagcggcctggtgccactgtccctgagagggagccacatgggccccatggagatctacaaaaccgtgagcgcctggaagcggcagcctgtgcgcgtgctgagcctgtttcggaatatcgataaagtcctgaaaagcctgggattcctggagagcggctctggctccggcggtggcaccctgaagtacgtggaggatgtgacaaacgtggtcagacgggatgtggagaagtggggccccttcgatctggtgtacggcagcacccaacccctgggcagctcttgtgaccggtgccctggctggtacatgtttcagttccaccggatcctgcagtacgccctgccgagacaggagtcccagcggccattcttttggattttcatggacaacttgctgctgaccgaggatgaccaggaaactaccactcggttcctgcagaccgaagccgtgaccctgcaggacgtgagaggccgggactaccagaacgccatgcgggtgtggtccaacatccctggactgaaaagcaagcacgcacctctgacccctaaagaagaggagtacctgcaggcccaggtgcggagcagaagcaagctggacgcccctaaggtggatctgctggtgaagaattgcctcctgcccctgagagagtacttcaagtatttcagccagaatagtctgcccctgggaggcagcggcggcggcgccctggtgacatttgaggacgtcgccgtgcggttcacccaggaggaatgggctctgctggatccttctcagaaaatcctgtaccgggacgtgatgagagagacataccggaatctgacctccgtgggcatcaactgggaatgttgggaccttgaagcctgcttcagaagcctgggaagaaacctgagagtgcaggtggtgaagagaaagtgcgagctgaccaacagcggcccctgcgccgagggcggcccaagcagcggcgcccctcctcccagcggcggcagcccagccggctccccaacctctaccgaggagggcacctctgagtccgccacccccgagagcggccctggcacctccaccgagcccagcgagggcagcgcacccggcagccctgccggcagccccacctccacagaggagggaaccagcaccgagcccagcgaaggcagcgccccaggcaccagcaccgagcctagtgagcaggagattaaacggatcaacaagatcagaagaagacttgtgaaagacagcaacaccaagaaggccggcaagacaggccccatgaaaaccctgctggttagagtgatgacacccgatctgagagagcggctggaaaacctgagaaagaagcctgaaaatatcccccagcccatcagcaatacatctagagccaacctgaataagctgctgaccgattacaccgaaatgaagaaggcgatcctgcatgtgtactgggaagagttccagaaggaccctgtgggcctgatgagccgggtggcccagcctgccagcaagaagatcgatcagaacaagctgaaacctgagatggacgagaagggcaacctgaccaccgccggctttgcctgctctcagtgtggccagcccctgttcgtgtacaagctggagcaggtgtctgagaagggcaaggcttacaccaactacttcggacggtgcaatgtggccgagcacgaaaagctgatcctgctggcccagctgaagcccgagaaggatagcgacgaagccgtgacatatagcctgggaaagtttgggcagagggccctggatttctacagcattcatgtgaccaaggagtccacccaccccgtgaagcccctggcccagatcgccggaaacagatacgcctccggacctgtgggaaaggccctgagcgacgcatgtatgggcacaatcgcctccttcctgtctaagtaccaggacatcatcatcgaacaccagaaggtggtgaagggcaaccagaagagactggagagcctgcgggagctggccggcaaggaaaacctggaataccctagcgtgaccctgccacctcagcctcacaccaaggagggcgttgatgcctacaacgaagtgatcgcccgggtgcgaatgtgggtgaacctgaacctgtggcagaagctgaagctaagcagagatgatgccaagcctctgctgagactgaagggattcccttcctttcctctggtcgagagacaggccaacgaagtggactggtgggacatggtgtgtaacgtgaagaagctgatcaacgagaaaaaggaggatggcaaggtgttttggcagaatctggctggctacaagagacaggaagccctgagaccatacctgagcagcgaggaagatcggaagaagggaaagaaattcgctcggtaccagctgggcgacctgctgctgcacctggaaaagaagcacggcgaggactggggaaaggtgtacgacgaggcctgggagcggattgacaagaaagtggaaggcctgagcaagcacatcaagctggaagaggaacggagaagcgaggacgcccagagcaaggccgccctgaccgactggctgcgggctaaggccagcttcgtgatcgagggcctgaaggaggccgacaaggacgagttctgcagatgcgagctgaagctgcagaagtggtacggggacctgcggggaaagcccttcgccatcgaagccgagaacagcatcctggacatcagcggcttcagcaagcagtacaactgtgccttcatctggcagaaggacggcgtgaagaagctgaacctgtacctgatcatcaactacttcaagggcggcaagctgcggttcaagaagatcaaacctgaagccttcgaagccaacagattctacaccgtgatcaacaaaaagagcggcgagatcgtgcccatggaggtgaacttcaacttcgacgaccccaacctgatcatcctgcctctggcctttggcaagagacagggcagagaattcatctggaacgacctgctgtccctggaaaccggcagcctgaagctggccaacggaagagtgatcgagaagacactgtacaacagaagaacccggcaggatgagcctgccctgttcgtggccctgaccttcgagcggcgggaggtcctggactcctccaatatcaaaccaatgaacctgatcggcgtggcaagaggcgaaaacatccccgccgtgatcgccctgaccgaccccgagggctgcccactgagccggtttaaggatagcctgggaaacccaacccacatcctgagaatcggcgagagctataaggagaagcagcggaccatccaggccaagaaggaggtggagcagcggagagccggcggctacagccggaagtacgccagcaaagccaagaatctggcagacgatatggtgagaaacaccgctagagatctgctgtactacgccgtgacccaggatgccatgctgatcttcgccaacctgagccggggcttcggccggcagggcaagcggaccttcatggccgagagacagtacacacggatggaggactggctgaccgccaagctggcctacgagggcctgagcaagacctacctgtccaagacactggcccagtacacctccaagacatgcagcaactgtgggtttaccatcaccagcgccgactacgacagggtgctggagaagctgaagaagacagcaacaggctggatgaccacaattaacggcaaggagctgaaggtggagggccagattacctactacaacagatacaagagacagaacgtagtcaaggacctgtccgtcgagctggatagactgagcgaagaatctgtgaacaacgacatctcctcctggacaaagggcagaagcggagaagctctgagcctcctgaagaaaagattctcccatagacccgtgcaggagaagttcgtgtgcctgaactgcggcttcgagacacacgcagccgagcaagccgccctgaacatcgccagatcctggctgttcctgcggagccaggagtacaagaaataccagacaaacaagacaaccggcaacaccgataagagagccttcgtcgagacctggcagtccttttaccggaagaagcttaaggaggtgtggaaacctgccgtgcggtctggcggatctggcggaggctccttccagatccccgtgaccttcgaggaggtggccgtgtacttcacccagggccagggcgccctgctggaccccgcccagagggccctgtacagggacgtgatgcaggagaactacgagaccgtgaccagcctgggcttccccatccccaagcccgacctgatcgccaggctggagaggggcgaggagccctgggtgctggacctgcaggccagcgacgagagcgtgagcctgaggggcacctgcggcggcccaagcagcggcgcccctcctcccagcggcggcagcccagccggctccccaacctctaccgaggagggcacctctgagtccgccacccccgagagcggccctggcacctccaccgagcccagcgagggcagcgcacccggcagccctgccggcagccccacctccacagaggagggaaccagcaccgagcccagcgaaggcagcgccccaggcaccagcaccgagcctagtgagcaggagattaaacggatcaacaagatcagaagaagacttgtgaaagacagcaacaccaagaaggccggcaagacaggccccatgaaaaccctgctggttagagtgatgacacccgatctgagagagcggctggaaaacctgagaaagaagcctgaaaatatcccccagcccatcagcaatacatctagagccaacctgaataagctgctgaccgattacaccgaaatgaagaaggcgatcctgcatgtgtactgggaagagttccagaaggaccctgtgggcctgatgagccgggtggcccagcctgccagcaagaagatcgatcagaacaagctgaaacctgagatggacgagaagggcaacctgaccaccgccggctttgcctgctctcagtgtggccagcccctgttcgtgtacaagctggagcaggtgtctgagaagggcaaggcttacaccaactacttcggacggtgcaatgtggccgagcacgaaaagctgatcctgctggcccagctgaagcccgagaaggatagcgacgaagccgtgacatatagcctgggaaagtttgggcagagggccctggatttctacagcattcatgtgaccaaggagtccacccaccccgtgaagcccctggcccagatcgccggaaacagatacgcctccggacctgtgggaaaggccctgagcgacgcatgtatgggcacaatcgcctccttcctgtctaagtaccaggacatcatcatcgaacaccagaaggtggtgaagggcaaccagaagagactggagagcctgcgggagctggccggcaaggaaaacctggaataccctagcgtgaccctgccacctcagcctcacaccaaggagggcgttgatgcctacaacgaagtgatcgcccgggtgcgaatgtgggtgaacctgaacctgtggcagaagctgaagctaagcagagatgatgccaagcctctgctgagactgaagggattcccttcctttcctctggtcgagagacaggccaacgaagtggactggtgggacatggtgtgtaacgtgaagaagctgatcaacgagaaaaaggaggatggcaaggtgttttggcagaatctggctggctacaagagacaggaagccctgagaccatacctgagcagcgaggaagatcggaagaagggaaagaaattcgctcggtaccagctgggcgacctgctgctgcacctggaaaagaagcacggcgaggactggggaaaggtgtacgacgaggcctgggagcggattgacaagaaagtggaaggcctgagcaagcacatcaagctggaagaggaacggagaagcgaggacgcccagagcaaggccgccctgaccgactggctgcgggctaaggccagcttcgtgatcgagggcctgaaggaggccgacaaggacgagttctgcagatgcgagctgaagctgcagaagtggtacggggacctgcggggaaagcccttcgccatcgaagccgagaacagcatcctggacatcagcggcttcagcaagcagtacaactgtgccttcatctggcagaaggacggcgtgaagaagctgaacctgtacctgatcatcaactacttcaagggcggcaagctgcggttcaagaagatcaaacctgaagccttcgaagccaacagattctacaccgtgatcaacaaaaagagcggcgagatcgtgcccatggaggtgaacttcaacttcgacgaccccaacctgatcatcctgcctctggcctttggcaagagacagggcagagaattcatctggaacgacctgctgtccctggaaaccggcagcctgaagctggccaacggaagagtgatcgagaagacactgtacaacagaagaacccggcaggatgagcctgccctgttcgtggccctgaccttcgagcggcgggaggtcctggactcctccaatatcaaaccaatgaacctgatcggcgtggcaagaggcgaaaacatccccgccgtgatcgccctgaccgaccccgagggctgcccactgagccggtttaaggatagcctgggaaacccaacccacatcctgagaatcggcgagagctataaggagaagcagcggaccatccaggccaagaaggaggtggagcagcggagagccggcggctacagccggaagtacgccagcaaagccaagaatctggcagacgatatggtgagaaacaccgctagagatctgctgtactacgccgtgacccaggatgccatgctgatcttcgccaacctgagccggggcttcggccggcagggcaagcggaccttcatggccgagagacagtacacacggatggaggactggctgaccgccaagctggcctacgagggcctgagcaagacctacctgtccaagacactggcccagtacacctccaagacatgcagcaactgtgggtttaccatcaccagcgccgactacgacagggtgctggagaagctgaagaagacagcaacaggctggatgaccacaattaacggcaaggagctgaaggtggagggccagattacctactacaacagatacaagagacagaacgtagtcaaggacctgtccgtcgagctggatagactgagcgaagaatctgtgaacaacgacatctcctcctggacaaagggcagaagcggagaagctctgagcctcctgaagaaaagattctcccatagacccgtgcaggagaagttcgtgtgcctgaactgcggcttcgagacacacgcagccgagcaagccgccctgaacatcgccagatcctggctgttcctgcggagccaggagtacaagaaataccagacaaacaagacaaccggcaacaccgataagagagccttcgtcgagacctggcagtccttttaccggaagaagcttaaggaggtgtggaaacctgccgtgcggtctggcggatctggcggaggctcctttccagatccccgtgaccttcgaggaggtggccgtgtacttcacccagggccagggcgccctgctggaccccgcccagagggccctgtacagggacgtgatgcaggagaactacgagaccgtgaccagcctgggcttccccatccccaagcccgacctgatcgccaggctggagaggggcgaggagccctgggtgctggacctgcaggccagcgacgagagcgtgagcctgaggggcacctgcggatctggctccggcagcggccccaagaaaaagagaaaagtctaagctgccttctgcggggcttgccttctggccatgcccttcttctctcccttgcacctgtacctcttggtctttgaataaagcctgagtaggaaggctagcaaaaaaaaaaaaaaaaaaaaaaaaaaaaaaaaaaaaaaaaaaaaaaaaaaaaaaaaaaaaaaaaaaaaaaaaaaaaaaaa

SEQ ID NO: 16597 - RNA, 9485 nt, synthetic construct
  source 1..9485: mol_type = other RNA
aggaaataagagagaaaagaagagtaagaagaaatataagagccaccatggcccctaagaagaagcgtaaagtgagccggatggaacgcctcgtctacgaggtgcggcagaagtgcagaaacatcgaggacatctgcatctcctgcggatctctgaacgtgaccctggagcacccactgttcatcggcggcatgtgccagaactgtaaaaactgttttctggagtgtgcctatcaatacgacgatgacggctaccagagctactgcaccatctgttgcggcggaagagaggtgctgatgtgtggaaataacaactgctgccggtgcttctgcgtggaatgcgtggacctgctggtgggccccggcgccgcccaggccgctattaaggaagatccttggaactgctacatgtgcggccacaagggcacatacggcctgctgagacggagagaggactggcctagcagactgcagatgttcttcgccaataaccacgaccaggagttcgacccccctaaggtgtaccctcccgtccccgccgagaagagaaagcccatccgggtcctgagcctgttcgatggcatcgccaccggtctgctggtgctgaaggacctgggcatccaggtggataggtacattgcctccgaggtgtgcgaggactccatcaccgtgggaatggtgcgtcatcagggcaagatcatgtacgtgggcgacgtgcggagcgtgacacagaagcatatccaggagtggggccctttcgacctggtgatcggcggcagcccttgcaatgacctgagcatcgtgaacccagcccggaagggcctgtacgagggaaccggcagactgttcttcgagttttacagactgctgcacgacgcccggcctaaggaaggcgacgaccggcccttcttttggctgttcgagaatgtggtggccatgggagtcagcgacaagcgggatattagccggttcctggagagcaaccccgtgatgatcgatgccaaggaagtgagcgccgcccaccgggccagatacttctggggcaatctgcctggcatgaacagacccctggccagcaccgtgaacgacaagctggagctgcaggagtgcctggagcacggccggatcgccaagttcagcaaggtgagaaccatcaccacccgaagcaacagcatcaaacaaggcaaggaccagcactttcctgtgttcatgaacgagaaggaggacatcctgtggtgtaccgagatggagagagtgttcgggttcccagtccactacacagatgtcagcaacatgtctagactggccagacagagactgctgggaagaagctggtccgtccctgtgatcagacacctgttcgcccctctgaaggagtacttcgcctgcgtgagcagcggcaacagcaacgccaacagccggggccccagcttctctagcggcctggtgccactgtccctgagagggagccacatgggccccatggagatctacaaaaccgtgagcgcctggaagcggcagcctgtgcgcgtgctgagcctgtttcggaatatcgataaagtcctgaaaagcctgggattcctggagagcggctctggctccggcggtggcaccctgaagtacgtggaggatgtgacaaacgtggtcagacgggatgtggagaagtggggccccttcgatctggtgtacggcagcacccaacccctgggcagctcttgtgaccggtgccctggctggtacatgtttcagttccaccggatcctgcagtacgccctgccgagacaggagtcccagcggccattcttttggattttcatggacaacttgctgctgaccgaggatgaccaggaaactaccactcggttcctgcagaccgaagccgtgaccctgcaggacgtgagaggccgggactaccagaacgccatgcgggtgtggtccaacatccctggactgaaaagcaagcacgcacctctgacccctaaagaagaggagtacctgcaggcccaggtgcggagcagaagcaagctggacgcccctaaggtggatctgctggtgaagaattgcctcctgcccctgagagagtacttcaagtatttcagccagaatagtctgcccctgggaggcagcggcggcggcgccctggtgacatttgaggacgtcgccgtgcggttcacccaggaggaatgggctctgctggatccttctcagaaaatcctgtaccgggacgtgatgagagagacataccggaatctgacctccgtgggcatcaactgggaatgttgggaccttgaagcctgcttcagaagcctgggaagaaacctgagagtgcaggtggtgaagagaaagtgcgagctgaccaacagcggcccctgcgccgagggcggcccaagcagcggcgcccctcctcccagcggcggcagcccagccggctccccaacctctaccgaggagggcacctctgagtccgccacccccgagagcggccctggcacctccaccgagcccagcgagggcagcgcacccggcagccctgccggcagccccacctccacagaggagggaaccagcaccgagcccagcgaaggcagcgccccaggcaccagcaccgagcctagtgagcaggagattaaacggatcaacaagatcagaagaagacttgtgaaagacagcaacaccaagaaggccggcaagacaggccccatgaaaaccctgctggttagagtgatgacacccgatctgagagagcggctggaaaacctgagaaagaagcctgaaaatatcccccagcccatcagcaatacatctagagccaacctgaataagctgctgaccgattacaccgaaatgaagaaggcgatcctgcatgtgtactgggaagagttccagaaggaccctgtgggcctgatgagccgggtggcccagcctgccagcaagaagatcgatcagaacaagctgaaacctgagatggacgagaagggcaacctgaccaccgccggctttgcctgctctcagtgtggccagcccctgttcgtgtacaagctggagcaggtgtctgagaagggcaaggcttacaccaactacttcggacggtgcaatgtggccgagcacgaaaagctgatcctgctggcccagctgaagcccgagaaggatagcgacgaagccgtgacatatagcctgggaaagtttgggcagagggccctggatttctacagcattcatgtgaccaaggagtccacccaccccgtgaagcccctggcccagatcgccggaaacagatacgcctccggacctgtgggaaaggccctgagcgacgcatgtatgggcacaatcgcctccttcctgtctaagtaccaggacatcatcatcgaacaccagaaggtggtgaagggcaaccagaagagactggagagcctgcgggagctggccggcaaggaaaacctggaataccctagcgtgaccctgccacctcagcctcacaccaaggagggcgttgatgcctacaacgaagtgatcgcccgggtgcgaatgtgggtgaacctgaacctgtggcagaagctgaagctaagcagagatgatgccaagcctctgctgagactgaagggattcccttcctttcctctggtcgagagacaggccaacgaagtggactggtgggacatggtgtgtaacgtgaagaagctgatcaacgagaaaaaggaggatggcaaggtgttttggcagaatctggctggctacaagagacaggaagccctgagaccatacctgagcagcgaggaagatcggaagaagggaaagaaattcgctcggtaccagctgggcgacctgctgctgcacctggaaaagaagcacggcgaggactggggaaaggtgtacgacgaggcctgggagcggattgacaagaaagtggaaggcctgagcaagcacatcaagctggaagaggaacggagaagcgaggacgcccagagcaaggccgccctgaccgactggctgcgggctaaggccagcttcgtgatcgagggcctgaaggaggccgacaaggacgagttctgcagatgcgagctgaagctgcagaagtggtacggggacctgcggggaaagcccttcgccatcgaagccgagaacagcatcctggacatcagcggcttcagcaagcagtacaactgtgccttcatctggcagaaggacggcgtgaagaagctgaacctgtacctgatcatcaactacttcaagggcggcaagctgcggttcaagaagatcaaacctgaagccttcgaagccaacagattctacaccgtgatcaacaaaaagagcggcgagatcgtgcccatggaggtgaacttcaacttcgacgaccccaacctgatcatcctgcctctggcctttggcaagagacagggcagagaattcatctggaacgacctgctgtccctggaaaccggcagcctgaagctggccaacggaagagtgatcgagaagacactgtacaacagaagaacccggcaggatgagcctgccctgttcgtggccctgaccttcgagcggcgggaggtcctggactcctccaatatcaaaccaatgaacctgatcggcgtggcaagaggcgaaaacatccccgccgtgatcgccctgaccgaccccgagggctgcccactgagccggtttaaggatagcctgggaaacccaacccacatcctgagaatcggcgagagctataaggagaagcagcggaccatccaggccaagaaggaggtggagcagcggagagccggcggctacagccggaagtacgccagcaaagccaagaatctggcagacgatatggtgagaaacaccgctagagatctgctgtactacgccgtgacccaggatgccatgctgatcttcgccaacctgagccggggcttcggccggcagggcaagcggaccttcatggccgagagacagtacacacggatggaggactggctgaccgccaagctggcctacgagggcctgagcaagacctacctgtccaagacactggcccagtacacctccaagacatgcagcaactgtgggtttaccatcaccagcgccgactacgacagggtgctggagaagctgaagaagacagcaacaggctggatgaccacaattaacggcaaggagctgaaggtggagggccagattacctactacaacagatacaagagacagaacgtagtcaaggacctgtccgtcgagctggatagactgagcgaagaatctgtgaacaacgacatctcctcctggacaaagggcagaagcggagaagctctgagcctcctgaagaaaagattctcccatagacccgtgcaggagaagttcgtgtgcctgaactgcggcttcgagacacacgcagccgagcaagccgccctgaacatcgccagatcctggctgttcctgcggagccaggagtacaagaaataccagacaaacaagacaaccggcaacaccgataagagagccttcgtcgagacctggcagtccttttaccggaagaagcttaaggaggtgtggaaacctgccgtgcggtctggcggatctggcggaggctccatggccgtggacctgctgcccgcccaggagagcatgaccttcagggacgtggccgtgttcttcagccaggacgagtggctgcacctggacagcgcccagagggccctgtacagggaggtgatgctggagaactacagcaccctggtgagcctgggcatccccttcagcatgcccaaggtgatccaccagctgcagcagggccaggacccctgcatggtggagggcgaggtgcccagcgacatcggcggcccaagcagcggcgcccctcctcccagcggcggcagcccagccggctccccaacctctaccgaggagggcacctctgagtccgccacccccgagagcggccctggcacctccaccgagcccagcgagggcagcgcacccggcagccctgccggcagccccacctccacagaggagggaaccagcaccgagcccagcgaaggcagcgccccaggcaccagcaccgagcctagtgagcaggagattaaacggatcaacaagatcagaagaagacttgtgaaagacagcaacaccaagaaggccggcaagacaggccccatgaaaaccctgctggttagagtgatgacacccgatctgagagagcggctggaaaacctgagaaagaagcctgaaaatatcccccagcccatcagcaatacatctagagccaacctgaataagctgctgaccgattacaccgaaatgaagaaggcgatcctgcatgtgtactgggaagagttccagaaggaccctgtgggcctgatgagccgggtggcccagcctgccagcaagaagatcgatcagaacaagctgaaacctgagatggacgagaagggcaacctgaccaccgccggctttgcctgctctcagtgtggccagcccctgttcgtgtacaagctggagcaggtgtctgagaagggcaaggcttacaccaactacttcggacggtgcaatgtggccgagcacgaaaagctgatcctgctggcccagctgaagcccgagaaggatagcgacgaagccgtgacatatagcctgggaaagtttgggcagagggccctggatttctacagcattcatgtgaccaaggagtccacccaccccgtgaagcccctggcccagatcgccggaaacagatacgcctccggacctgtgggaaaggccctgagcgacgcatgtatgggcacaatcgcctccttcctgtctaagtaccaggacatcatcatcgaacaccagaaggtggtgaagggcaaccagaagagactggagagcctgcgggagctggccggcaaggaaaacctggaataccctagcgtgaccctgccacctcagcctcacaccaaggagggcgttgatgcctacaacgaagtgatcgcccgggtgcgaatgtgggtgaacctgaacctgtggcagaagctgaagctaagcagagatgatgccaagcctctgctgagactgaagggattcccttcctttcctctggtcgagagacaggccaacgaagtggactggtgggacatggtgtgtaacgtgaagaagctgatcaacgagaaaaaggaggatggcaaggtgttttggcagaatctggctggctacaagagacaggaagccctgagaccatacctgagcagcgaggaagatcggaagaagggaaagaaattcgctcggtaccagctgggcgacctgctgctgcacctggaaaagaagcacggcgaggactggggaaaggtgtacgacgaggcctgggagcggattgacaagaaagtggaaggcctgagcaagcacatcaagctggaagaggaacggagaagcgaggacgcccagagcaaggccgccctgaccgactggctgcgggctaaggccagcttcgtgatcgagggcctgaaggaggccgacaaggacgagttctgcagatgcgagctgaagctgcagaagtggtacggggacctgcggggaaagcccttcgccatcgaagccgagaacagcatcctggacatcagcggcttcagcaagcagtacaactgtgccttcatctggcagaaggacggcgtgaagaagctgaacctgtacctgatcatcaactacttcaagggcggcaagctgcggttcaagaagatcaaacctgaagccttcgaagccaacagattctacaccgtgatcaacaaaaagagcggcgagatcgtgcccatggaggtgaacttcaacttcgacgaccccaacctgatcatcctgcctctggcctttggcaagagacagggcagagaattcatctggaacgacctgctgtccctggaaaccggcagcctgaagctggccaacggaagagtgatcgagaagacactgtacaacagaagaacccggcaggatgagcctgccctgttcgtggccctgaccttcgagcggcgggaggtcctggactcctccaatatcaaaccaatgaacctgatcggcgtggcaagaggcgaaaacatccccgccgtgatcgccctgaccgaccccgagggctgcccactgagccggtttaaggatagcctgggaaacccaacccacatcctgagaatcggcgagagctataaggagaagcagcggaccatccaggccaagaaggaggtggagcagcggagagccggcggctacagccggaagtacgccagcaaagccaagaatctggcagacgatatggtgagaaacaccgctagagatctgctgtactacgccgtgacccaggatgccatgctgatcttcgccaacctgagccggggcttcggccggcagggcaagcggaccttcatggccgagagacagtacacacggatggaggactggctgaccgccaagctggcctacgagggcctgagcaagacctacctgtccaagacactggcccagtacacctccaagacatgcagcaactgtgggtttaccatcaccagcgccgactacgacagggtgctggagaagctgaagaagacagcaacaggctggatgaccacaattaacggcaaggagctgaaggtggagggccagattacctactacaacagatacaagagacagaacgtagtcaaggacctgtccgtcgagctggatagactgagcgaagaatctgtgaacaacgacatctcctcctggacaaagggcagaagcggagaagctctgagcctcctgaagaaaagattctcccatagacccgtgcaggagaagttcgtgtgcctgaactgcggcttcgagacacacgcagccgagcaagccgccctgaacatcgccagatcctggctgttcctgcggagccaggagtacaagaaataccagacaaacaagacaaccggcaacaccgataagagagccttcgtcgagacctggcagtccttttaccggaagaagcttaaggaggtgtggaaacctgccgtgcggtctggcggatctggcggaggctcctatggccgtggacctgctgcccgcccaggagagcatgaccttcagggacgtggccgtgttcttcagccaggacgagtggctgcacctggacagcgcccagagggccctgtacagggaggtgatgctggagaactacagcaccctggtgagcctgggcatccccttcagcatgcccaaggtgatccaccagctgcagcagggccaggacccctgcatggtggagggcgaggtgcccagcgacatcggatctggctccggcagcggccccaagaaaaagagaaaagtctaagctgccttctgcggggcttgccttctggccatgcccttcttctctcccttgcacctgtacctcttggtctttgaataaagcctgagtaggaaggctagcaaaaaaaaaaaaaaaaaaaaaaaaaaaaaaaaaaaaaaaaaaaaaaaaaaaaaaaaaaaaaaaaaaaaaaaaaaaaaaaa

SEQ ID NO: 16598 - RNA, 9485 nt, synthetic construct
  source 1..9485: mol_type = other RNA
aggaaataagagagaaaagaagagtaagaagaaatataagagccaccatggcccctaagaagaagcgtaaagtgagccggatggaacgcctcgtctacgaggtgcggcagaagtgcagaaacatcgaggacatctgcatctcctgcggatctctgaacgtgaccctggagcacccactgttcatcggcggcatgtgccagaactgtaaaaactgttttctggagtgtgcctatcaatacgacgatgacggctaccagagctactgcaccatctgttgcggcggaagagaggtgctgatgtgtggaaataacaactgctgccggtgcttctgcgtggaatgcgtggacctgctggtgggccccggcgccgcccaggccgctattaaggaagatccttggaactgctacatgtgcggccacaagggcacatacggcctgctgagacggagagaggactggcctagcagactgcagatgttcttcgccaataaccacgaccaggagttcgacccccctaaggtgtaccctcccgtccccgccgagaagagaaagcccatccgggtcctgagcctgttcgatggcatcgccaccggtctgctggtgctgaaggacctgggcatccaggtggataggtacattgcctccgaggtgtgcgaggactccatcaccgtgggaatggtgcgtcatcagggcaagatcatgtacgtgggcgacgtgcggagcgtgacacagaagcatatccaggagtggggccctttcgacctggtgatcggcggcagcccttgcaatgacctgagcatcgtgaacccagcccggaagggcctgtacgagggaaccggcagactgttcttcgagttttacagactgctgcacgacgcccggcctaaggaaggcgacgaccggcccttcttttggctgttcgagaatgtggtggccatgggagtcagcgacaagcgggatattagccggttcctggagagcaaccccgtgatgatcgatgccaaggaagtgagcgccgcccaccgggccagatacttctggggcaatctgcctggcatgaacagacccctggccagcaccgtgaacgacaagctggagctgcaggagtgcctggagcacggccggatcgccaagttcagcaaggtgagaaccatcaccacccgaagcaacagcatcaaacaaggcaaggaccagcactttcctgtgttcatgaacgagaaggaggacatcctgtggtgtaccgagatggagagagtgttcgggttcccagtccactacacagatgtcagcaacatgtctagactggccagacagagactgctgggaagaagctggtccgtccctgtgatcagacacctgttcgcccctctgaaggagtacttcgcctgcgtgagcagcggcaacagcaacgccaacagccggggccccagcttctctagcggcctggtgccactgtccctgagagggagccacatgggccccatggagatctacaaaaccgtgagcgcctggaagcggcagcctgtgcgcgtgctgagcctgtttcggaatatcgataaagtcctgaaaagcctgggattcctggagagcggctctggctccggcggtggcaccctgaagtacgtggaggatgtgacaaacgtggtcagacgggatgtggagaagtggggccccttcgatctggtgtacggcagcacccaacccctgggcagctcttgtgaccggtgccctggctggtacatgtttcagttccaccggatcctgcagtacgccctgccgagacaggagtcccagcggccattcttttggattttcatggacaacttgctgctgaccgaggatgaccaggaaactaccactcggttcctgcagaccgaagccgtgaccctgcaggacgtgagaggccgggactaccagaacgccatgcgggtgtggtccaacatccctggactgaaaagcaagcacgcacctctgacccctaaagaagaggagtacctgcaggcccaggtgcggagcagaagcaagctggacgcccctaaggtggatctgctggtgaagaattgcctcctgcccctgagagagtacttcaagtatttcagccagaatagtctgcccctgggaggcagcggcggcggcgccctggtgacatttgaggacgtcgccgtgcggttcacccaggaggaatgggctctgctggatccttctcagaaaatcctgtaccgggacgtgatgagagagacataccggaatctgacctccgtgggcatcaactgggaatgttgggaccttgaagcctgcttcagaagcctgggaagaaacctgagagtgcaggtggtgaagagaaagtgcgagctgaccaacagcggcccctgcgccgagggcggcccaagcagcggcgcccctcctcccagcggcggcagcccagccggctccccaacctctaccgaggagggcacctctgagtccgccacccccgagagcggccctggcacctccaccgagcccagcgagggcagcgcacccggcagccctgccggcagccccacctccacagaggagggaaccagcaccgagcccagcgaaggcagcgccccaggcaccagcaccgagcctagtgagcaggagattaaacggatcaacaagatcagaagaagacttgtgaaagacagcaacaccaagaaggccggcaagacaggccccatgaaaaccctgctggttagagtgatgacacccgatctgagagagcggctggaaaacctgagaaagaagcctgaaaatatcccccagcccatcagcaatacatctagagccaacctgaataagctgctgaccgattacaccgaaatgaagaaggcgatcctgcatgtgtactgggaagagttccagaaggaccctgtgggcctgatgagccgggtggcccagcctgccagcaagaagatcgatcagaacaagctgaaacctgagatggacgagaagggcaacctgaccaccgccggctttgcctgctctcagtgtggccagcccctgttcgtgtacaagctggagcaggtgtctgagaagggcaaggcttacaccaactacttcggacggtgcaatgtggccgagcacgaaaagctgatcctgctggcccagctgaagcccgagaaggatagcgacgaagccgtgacatatagcctgggaaagtttgggcagagggccctggatttctacagcattcatgtgaccaaggagtccacccaccccgtgaagcccctggcccagatcgccggaaacagatacgcctccggacctgtgggaaaggccctgagcgacgcatgtatgggcacaatcgcctccttcctgtctaagtaccaggacatcatcatcgaacaccagaaggtggtgaagggcaaccagaagagactggagagcctgcgggagctggccggcaaggaaaacctggaataccctagcgtgaccctgccacctcagcctcacaccaaggagggcgttgatgcctacaacgaagtgatcgcccgggtgcgaatgtgggtgaacctgaacctgtggcagaagctgaagctaagcagagatgatgccaagcctctgctgagactgaagggattcccttcctttcctctggtcgagagacaggccaacgaagtggactggtgggacatggtgtgtaacgtgaagaagctgatcaacgagaaaaaggaggatggcaaggtgttttggcagaatctggctggctacaagagacaggaagccctgagaccatacctgagcagcgaggaagatcggaagaagggaaagaaattcgctcggtaccagctgggcgacctgctgctgcacctggaaaagaagcacggcgaggactggggaaaggtgtacgacgaggcctgggagcggattgacaagaaagtggaaggcctgagcaagcacatcaagctggaagaggaacggagaagcgaggacgcccagagcaaggccgccctgaccgactggctgcgggctaaggccagcttcgtgatcgagggcctgaaggaggccgacaaggacgagttctgcagatgcgagctgaagctgcagaagtggtacggggacctgcggggaaagcccttcgccatcgaagccgagaacagcatcctggacatcagcggcttcagcaagcagtacaactgtgccttcatctggcagaaggacggcgtgaagaagctgaacctgtacctgatcatcaactacttcaagggcggcaagctgcggttcaagaagatcaaacctgaagccttcgaagccaacagattctacaccgtgatcaacaaaaagagcggcgagatcgtgcccatggaggtgaacttcaacttcgacgaccccaacctgatcatcctgcctctggcctttggcaagagacagggcagagaattcatctggaacgacctgctgtccctggaaaccggcagcctgaagctggccaacggaagagtgatcgagaagacactgtacaacagaagaacccggcaggatgagcctgccctgttcgtggccctgaccttcgagcggcgggaggtcctggactcctccaatatcaaaccaatgaacctgatcggcgtggcaagaggcgaaaacatccccgccgtgatcgccctgaccgaccccgagggctgcccactgagccggtttaaggatagcctgggaaacccaacccacatcctgagaatcggcgagagctataaggagaagcagcggaccatccaggccaagaaggaggtggagcagcggagagccggcggctacagccggaagtacgccagcaaagccaagaatctggcagacgatatggtgagaaacaccgctagagatctgctgtactacgccgtgacccaggatgccatgctgatcttcgccaacctgagccggggcttcggccggcagggcaagcggaccttcatggccgagagacagtacacacggatggaggactggctgaccgccaagctggcctacgagggcctgagcaagacctacctgtccaagacactggcccagtacacctccaagacatgcagcaactgtgggtttaccatcaccagcgccgactacgacagggtgctggagaagctgaagaagacagcaacaggctggatgaccacaattaacggcaaggagctgaaggtggagggccagattacctactacaacagatacaagagacagaacgtagtcaaggacctgtccgtcgagctggatagactgagcgaagaatctgtgaacaacgacatctcctcctggacaaagggcagaagcggagaagctctgagcctcctgaagaaaagattctcccatagacccgtgcaggagaagttcgtgtgcctgaactgcggcttcgagacacacgcagccgagcaagccgccctgaacatcgccagatcctggctgttcctgcggagccaggagtacaagaaataccagacaaacaagacaaccggcaacaccgataagagagccttcgtcgagacctggcagtccttttaccggaagaagcttaaggaggtgtggaaacctgccgtgcggtctggcggatctggcggaggctccaagcccctggccgtgaggttcgccgacgtggccgtgtacttcagccccgaggagtggggctgcctgaggcccgcccagagggccctgtacagggacgtgatgcaggagacctacggccacctgggcgccctgggcttccccggccccaagcccgccctgatcagctggatggagcaggagagcgaggcctggagccccgccgcccaggaccccgaggagggcgagagcctgggcggcgccctgggcggcccaagcagcggcgcccctcctcccagcggcggcagcccagccggctccccaacctctaccgaggagggcacctctgagtccgccacccccgagagcggccctggcacctccaccgagcccagcgagggcagcgcacccggcagccctgccggcagccccacctccacagaggagggaaccagcaccgagcccagcgaaggcagcgccccaggcaccagcaccgagcctagtgagcaggagattaaacggatcaacaagatcagaagaagacttgtgaaagacagcaacaccaagaaggccggcaagacaggccccatgaaaaccctgctggttagagtgatgacacccgatctgagagagcggctggaaaacctgagaaagaagcctgaaaatatcccccagcccatcagcaatacatctagagccaacctgaataagctgctgaccgattacaccgaaatgaagaaggcgatcctgcatgtgtactgggaagagttccagaaggaccctgtgggcctgatgagccgggtggcccagcctgccagcaagaagatcgatcagaacaagctgaaacctgagatggacgagaagggcaacctgaccaccgccggctttgcctgctctcagtgtggccagcccctgttcgtgtacaagctggagcaggtgtctgagaagggcaaggcttacaccaactacttcggacggtgcaatgtggccgagcacgaaaagctgatcctgctggcccagctgaagcccgagaaggatagcgacgaagccgtgacatatagcctgggaaagtttgggcagagggccctggatttctacagcattcatgtgaccaaggagtccacccaccccgtgaagcccctggcccagatcgccggaaacagatacgcctccggacctgtgggaaaggccctgagcgacgcatgtatgggcacaatcgcctccttcctgtctaagtaccaggacatcatcatcgaacaccagaaggtggtgaagggcaaccagaagagactggagagcctgcgggagctggccggcaaggaaaacctggaataccctagcgtgaccctgccacctcagcctcacaccaaggagggcgttgatgcctacaacgaagtgatcgcccgggtgcgaatgtgggtgaacctgaacctgtggcagaagctgaagctaagcagagatgatgccaagcctctgctgagactgaagggattcccttcctttcctctggtcgagagacaggccaacgaagtggactggtgggacatggtgtgtaacgtgaagaagctgatcaacgagaaaaaggaggatggcaaggtgttttggcagaatctggctggctacaagagacaggaagccctgagaccatacctgagcagcgaggaagatcggaagaagggaaagaaattcgctcggtaccagctgggcgacctgctgctgcacctggaaaagaagcacggcgaggactggggaaaggtgtacgacgaggcctgggagcggattgacaagaaagtggaaggcctgagcaagcacatcaagctggaagaggaacggagaagcgaggacgcccagagcaaggccgccctgaccgactggctgcgggctaaggccagcttcgtgatcgagggcctgaaggaggccgacaaggacgagttctgcagatgcgagctgaagctgcagaagtggtacggggacctgcggggaaagcccttcgccatcgaagccgagaacagcatcctggacatcagcggcttcagcaagcagtacaactgtgccttcatctggcagaaggacggcgtgaagaagctgaacctgtacctgatcatcaactacttcaagggcggcaagctgcggttcaagaagatcaaacctgaagccttcgaagccaacagattctacaccgtgatcaacaaaaagagcggcgagatcgtgcccatggaggtgaacttcaacttcgacgaccccaacctgatcatcctgcctctggcctttggcaagagacagggcagagaattcatctggaacgacctgctgtccctggaaaccggcagcctgaagctggccaacggaagagtgatcgagaagacactgtacaacagaagaacccggcaggatgagcctgccctgttcgtggccctgaccttcgagcggcgggaggtcctggactcctccaatatcaaaccaatgaacctgatcggcgtggcaagaggcgaaaacatccccgccgtgatcgccctgaccgaccccgagggctgcccactgagccggtttaaggatagcctgggaaacccaacccacatcctgagaatcggcgagagctataaggagaagcagcggaccatccaggccaagaaggaggtggagcagcggagagccggcggctacagccggaagtacgccagcaaagccaagaatctggcagacgatatggtgagaaacaccgctagagatctgctgtactacgccgtgacccaggatgccatgctgatcttcgccaacctgagccggggcttcggccggcagggcaagcggaccttcatggccgagagacagtacacacggatggaggactggctgaccgccaagctggcctacgagggcctgagcaagacctacctgtccaagacactggcccagtacacctccaagacatgcagcaactgtgggtttaccatcaccagcgccgactacgacagggtgctggagaagctgaagaagacagcaacaggctggatgaccacaattaacggcaaggagctgaaggtggagggccagattacctactacaacagatacaagagacagaacgtagtcaaggacctgtccgtcgagctggatagactgagcgaagaatctgtgaacaacgacatctcctcctggacaaagggcagaagcggagaagctctgagcctcctgaagaaaagattctcccatagacccgtgcaggagaagttcgtgtgcctgaactgcggcttcgagacacacgcagccgagcaagccgccctgaacatcgccagatcctggctgttcctgcggagccaggagtacaagaaataccagacaaacaagacaaccggcaacaccgataagagagccttcgtcgagacctggcagtccttttaccggaagaagcttaaggaggtgtggaaacctgccgtgcggtctggcggatctggcggaggctcctaagcccctggccgtgaggttcgccgacgtggccgtgtacttcagccccgaggagtggggctgcctgaggcccgcccagagggccctgtacagggacgtgatgcaggagacctacggccacctgggcgccctgggcttccccggccccaagcccgccctgatcagctggatggagcaggagagcgaggcctggagccccgccgcccaggaccccgaggagggcgagagcctgggcggcgccctgggatctggctccggcagcggccccaagaaaaagagaaaagtctaagctgccttctgcggggcttgccttctggccatgcccttcttctctcccttgcacctgtacctcttggtctttgaataaagcctgagtaggaaggctagcaaaaaaaaaaaaaaaaaaaaaaaaaaaaaaaaaaaaaaaaaaaaaaaaaaaaaaaaaaaaaaaaaaaaaaaaaaaaaaaa

SEQ ID NO: 16599 - RNA, 9485 nt, synthetic construct
  source 1..9485: mol_type = other RNA
aggaaataagagagaaaagaagagtaagaagaaatataagagccaccatggcccctaagaagaagcgtaaagtgagccggatggaacgcctcgtctacgaggtgcggcagaagtgcagaaacatcgaggacatctgcatctcctgcggatctctgaacgtgaccctggagcacccactgttcatcggcggcatgtgccagaactgtaaaaactgttttctggagtgtgcctatcaatacgacgatgacggctaccagagctactgcaccatctgttgcggcggaagagaggtgctgatgtgtggaaataacaactgctgccggtgcttctgcgtggaatgcgtggacctgctggtgggccccggcgccgcccaggccgctattaaggaagatccttggaactgctacatgtgcggccacaagggcacatacggcctgctgagacggagagaggactggcctagcagactgcagatgttcttcgccaataaccacgaccaggagttcgacccccctaaggtgtaccctcccgtccccgccgagaagagaaagcccatccgggtcctgagcctgttcgatggcatcgccaccggtctgctggtgctgaaggacctgggcatccaggtggataggtacattgcctccgaggtgtgcgaggactccatcaccgtgggaatggtgcgtcatcagggcaagatcatgtacgtgggcgacgtgcggagcgtgacacagaagcatatccaggagtggggccctttcgacctggtgatcggcggcagcccttgcaatgacctgagcatcgtgaacccagcccggaagggcctgtacgagggaaccggcagactgttcttcgagttttacagactgctgcacgacgcccggcctaaggaaggcgacgaccggcccttcttttggctgttcgagaatgtggtggccatgggagtcagcgacaagcgggatattagccggttcctggagagcaaccccgtgatgatcgatgccaaggaagtgagcgccgcccaccgggccagatacttctggggcaatctgcctggcatgaacagacccctggccagcaccgtgaacgacaagctggagctgcaggagtgcctggagcacggccggatcgccaagttcagcaaggtgagaaccatcaccacccgaagcaacagcatcaaacaaggcaaggaccagcactttcctgtgttcatgaacgagaaggaggacatcctgtggtgtaccgagatggagagagtgttcgggttcccagtccactacacagatgtcagcaacatgtctagactggccagacagagactgctgggaagaagctggtccgtccctgtgatcagacacctgttcgcccctctgaaggagtacttcgcctgcgtgagcagcggcaacagcaacgccaacagccggggccccagcttctctagcggcctggtgccactgtccctgagagggagccacatgggccccatggagatctacaaaaccgtgagcgcctggaagcggcagcctgtgcgcgtgctgagcctgtttcggaatatcgataaagtcctgaaaagcctgggattcctggagagcggctctggctccggcggtggcaccctgaagtacgtggaggatgtgacaaacgtggtcagacgggatgtggagaagtggggccccttcgatctggtgtacggcagcacccaacccctgggcagctcttgtgaccggtgccctggctggtacatgtttcagttccaccggatcctgcagtacgccctgccgagacaggagtcccagcggccattcttttggattttcatggacaacttgctgctgaccgaggatgaccaggaaactaccactcggttcctgcagaccgaagccgtgaccctgcaggacgtgagaggccgggactaccagaacgccatgcgggtgtggtccaacatccctggactgaaaagcaagcacgcacctctgacccctaaagaagaggagtacctgcaggcccaggtgcggagcagaagcaagctggacgcccctaaggtggatctgctggtgaagaattgcctcctgcccctgagagagtacttcaagtatttcagccagaatagtctgcccctgggaggcagcggcggcggcgccctggtgacatttgaggacgtcgccgtgcggttcacccaggaggaatgggctctgctggatccttctcagaaaatcctgtaccgggacgtgatgagagagacataccggaatctgacctccgtgggcatcaactgggaatgttgggaccttgaagcctgcttcagaagcctgggaagaaacctgagagtgcaggtggtgaagagaaagtgcgagctgaccaacagcggcccctgcgccgagggcggcccaagcagcggcgcccctcctcccagcggcggcagcccagccggctccccaacctctaccgaggagggcacctctgagtccgccacccccgagagcggccctggcacctccaccgagcccagcgagggcagcgcacccggcagccctgccggcagccccacctccacagaggagggaaccagcaccgagcccagcgaaggcagcgccccaggcaccagcaccgagcctagtgagcaggagattaaacggatcaacaagatcagaagaagacttgtgaaagacagcaacaccaagaaggccggcaagacaggccccatgaaaaccctgctggttagagtgatgacacccgatctgagagagcggctggaaaacctgagaaagaagcctgaaaatatcccccagcccatcagcaatacatctagagccaacctgaataagctgctgaccgattacaccgaaatgaagaaggcgatcctgcatgtgtactgggaagagttccagaaggaccctgtgggcctgatgagccgggtggcccagcctgccagcaagaagatcgatcagaacaagctgaaacctgagatggacgagaagggcaacctgaccaccgccggctttgcctgctctcagtgtggccagcccctgttcgtgtacaagctggagcaggtgtctgagaagggcaaggcttacaccaactacttcggacggtgcaatgtggccgagcacgaaaagctgatcctgctggcccagctgaagcccgagaaggatagcgacgaagccgtgacatatagcctgggaaagtttgggcagagggccctggatttctacagcattcatgtgaccaaggagtccacccaccccgtgaagcccctggcccagatcgccggaaacagatacgcctccggacctgtgggaaaggccctgagcgacgcatgtatgggcacaatcgcctccttcctgtctaagtaccaggacatcatcatcgaacaccagaaggtggtgaagggcaaccagaagagactggagagcctgcgggagctggccggcaaggaaaacctggaataccctagcgtgaccctgccacctcagcctcacaccaaggagggcgttgatgcctacaacgaagtgatcgcccgggtgcgaatgtgggtgaacctgaacctgtggcagaagctgaagctaagcagagatgatgccaagcctctgctgagactgaagggattcccttcctttcctctggtcgagagacaggccaacgaagtggactggtgggacatggtgtgtaacgtgaagaagctgatcaacgagaaaaaggaggatggcaaggtgttttggcagaatctggctggctacaagagacaggaagccctgagaccatacctgagcagcgaggaagatcggaagaagggaaagaaattcgctcggtaccagctgggcgacctgctgctgcacctggaaaagaagcacggcgaggactggggaaaggtgtacgacgaggcctgggagcggattgacaagaaagtggaaggcctgagcaagcacatcaagctggaagaggaacggagaagcgaggacgcccagagcaaggccgccctgaccgactggctgcgggctaaggccagcttcgtgatcgagggcctgaaggaggccgacaaggacgagttctgcagatgcgagctgaagctgcagaagtggtacggggacctgcggggaaagcccttcgccatcgaagccgagaacagcatcctggacatcagcggcttcagcaagcagtacaactgtgccttcatctggcagaaggacggcgtgaagaagctgaacctgtacctgatcatcaactacttcaagggcggcaagctgcggttcaagaagatcaaacctgaagccttcgaagccaacagattctacaccgtgatcaacaaaaagagcggcgagatcgtgcccatggaggtgaacttcaacttcgacgaccccaacctgatcatcctgcctctggcctttggcaagagacagggcagagaattcatctggaacgacctgctgtccctggaaaccggcagcctgaagctggccaacggaagagtgatcgagaagacactgtacaacagaagaacccggcaggatgagcctgccctgttcgtggccctgaccttcgagcggcgggaggtcctggactcctccaatatcaaaccaatgaacctgatcggcgtggcaagaggcgaaaacatccccgccgtgatcgccctgaccgaccccgagggctgcccactgagccggtttaaggatagcctgggaaacccaacccacatcctgagaatcggcgagagctataaggagaagcagcggaccatccaggccaagaaggaggtggagcagcggagagccggcggctacagccggaagtacgccagcaaagccaagaatctggcagacgatatggtgagaaacaccgctagagatctgctgtactacgccgtgacccaggatgccatgctgatcttcgccaacctgagccggggcttcggccggcagggcaagcggaccttcatggccgagagacagtacacacggatggaggactggctgaccgccaagctggcctacgagggcctgagcaagacctacctgtccaagacactggcccagtacacctccaagacatgcagcaactgtgggtttaccatcaccagcgccgactacgacagggtgctggagaagctgaagaagacagcaacaggctggatgaccacaattaacggcaaggagctgaaggtggagggccagattacctactacaacagatacaagagacagaacgtagtcaaggacctgtccgtcgagctggatagactgagcgaagaatctgtgaacaacgacatctcctcctggacaaagggcagaagcggagaagctctgagcctcctgaagaaaagattctcccatagacccgtgcaggagaagttcgtgtgcctgaactgcggcttcgagacacacgcagccgagcaagccgccctgaacatcgccagatcctggctgttcctgcggagccaggagtacaagaaataccagacaaacaagacaaccggcaacaccgataagagagccttcgtcgagacctggcagtccttttaccggaagaagcttaaggaggtgtggaaacctgccgtgcggtctggcggatctggcggaggctccatggcccacttccagggcagcgtgaccttcgaggacgtggccatcgccttcagccagcaggagtgggagagcctggacagcagccagaggggcctgtacagggacgtgatgctggagaactacaggaacctggtgagcatggccggccacagcctgagcaagccccacgtgatcgccctgctggagaggtggaaggagcccaaggtgaccgagaggaaggacggcaggaggtggtgcaccgacggcggcccaagcagcggcgcccctcctcccagcggcggcagcccagccggctccccaacctctaccgaggagggcacctctgagtccgccacccccgagagcggccctggcacctccaccgagcccagcgagggcagcgcacccggcagccctgccggcagccccacctccacagaggagggaaccagcaccgagcccagcgaaggcagcgccccaggcaccagcaccgagcctagtgagcaggagattaaacggatcaacaagatcagaagaagacttgtgaaagacagcaacaccaagaaggccggcaagacaggccccatgaaaaccctgctggttagagtgatgacacccgatctgagagagcggctggaaaacctgagaaagaagcctgaaaatatcccccagcccatcagcaatacatctagagccaacctgaataagctgctgaccgattacaccgaaatgaagaaggcgatcctgcatgtgtactgggaagagttccagaaggaccctgtgggcctgatgagccgggtggcccagcctgccagcaagaagatcgatcagaacaagctgaaacctgagatggacgagaagggcaacctgaccaccgccggctttgcctgctctcagtgtggccagcccctgttcgtgtacaagctggagcaggtgtctgagaagggcaaggcttacaccaactacttcggacggtgcaatgtggccgagcacgaaaagctgatcctgctggcccagctgaagcccgagaaggatagcgacgaagccgtgacatatagcctgggaaagtttgggcagagggccctggatttctacagcattcatgtgaccaaggagtccacccaccccgtgaagcccctggcccagatcgccggaaacagatacgcctccggacctgtgggaaaggccctgagcgacgcatgtatgggcacaatcgcctccttcctgtctaagtaccaggacatcatcatcgaacaccagaaggtggtgaagggcaaccagaagagactggagagcctgcgggagctggccggcaaggaaaacctggaataccctagcgtgaccctgccacctcagcctcacaccaaggagggcgttgatgcctacaacgaagtgatcgcccgggtgcgaatgtgggtgaacctgaacctgtggcagaagctgaagctaagcagagatgatgccaagcctctgctgagactgaagggattcccttcctttcctctggtcgagagacaggccaacgaagtggactggtgggacatggtgtgtaacgtgaagaagctgatcaacgagaaaaaggaggatggcaaggtgttttggcagaatctggctggctacaagagacaggaagccctgagaccatacctgagcagcgaggaagatcggaagaagggaaagaaattcgctcggtaccagctgggcgacctgctgctgcacctggaaaagaagcacggcgaggactggggaaaggtgtacgacgaggcctgggagcggattgacaagaaagtggaaggcctgagcaagcacatcaagctggaagaggaacggagaagcgaggacgcccagagcaaggccgccctgaccgactggctgcgggctaaggccagcttcgtgatcgagggcctgaaggaggccgacaaggacgagttctgcagatgcgagctgaagctgcagaagtggtacggggacctgcggggaaagcccttcgccatcgaagccgagaacagcatcctggacatcagcggcttcagcaagcagtacaactgtgccttcatctggcagaaggacggcgtgaagaagctgaacctgtacctgatcatcaactacttcaagggcggcaagctgcggttcaagaagatcaaacctgaagccttcgaagccaacagattctacaccgtgatcaacaaaaagagcggcgagatcgtgcccatggaggtgaacttcaacttcgacgaccccaacctgatcatcctgcctctggcctttggcaagagacagggcagagaattcatctggaacgacctgctgtccctggaaaccggcagcctgaagctggccaacggaagagtgatcgagaagacactgtacaacagaagaacccggcaggatgagcctgccctgttcgtggccctgaccttcgagcggcgggaggtcctggactcctccaatatcaaaccaatgaacctgatcggcgtggcaagaggcgaaaacatccccgccgtgatcgccctgaccgaccccgagggctgcccactgagccggtttaaggatagcctgggaaacccaacccacatcctgagaatcggcgagagctataaggagaagcagcggaccatccaggccaagaaggaggtggagcagcggagagccggcggctacagccggaagtacgccagcaaagccaagaatctggcagacgatatggtgagaaacaccgctagagatctgctgtactacgccgtgacccaggatgccatgctgatcttcgccaacctgagccggggcttcggccggcagggcaagcggaccttcatggccgagagacagtacacacggatggaggactggctgaccgccaagctggcctacgagggcctgagcaagacctacctgtccaagacactggcccagtacacctccaagacatgcagcaactgtgggtttaccatcaccagcgccgactacgacagggtgctggagaagctgaagaagacagcaacaggctggatgaccacaattaacggcaaggagctgaaggtggagggccagattacctactacaacagatacaagagacagaacgtagtcaaggacctgtccgtcgagctggatagactgagcgaagaatctgtgaacaacgacatctcctcctggacaaagggcagaagcggagaagctctgagcctcctgaagaaaagattctcccatagacccgtgcaggagaagttcgtgtgcctgaactgcggcttcgagacacacgcagccgagcaagccgccctgaacatcgccagatcctggctgttcctgcggagccaggagtacaagaaataccagacaaacaagacaaccggcaacaccgataagagagccttcgtcgagacctggcagtccttttaccggaagaagcttaaggaggtgtggaaacctgccgtgcggtctggcggatctggcggaggctcctatggcccacttccagggcagcgtgaccttcgaggacgtggccatcgccttcagccagcaggagtgggagagcctggacagcagccagaggggcctgtacagggacgtgatgctggagaactacaggaacctggtgagcatggccggccacagcctgagcaagccccacgtgatcgccctgctggagaggtggaaggagcccaaggtgaccgagaggaaggacggcaggaggtggtgcaccgacggatctggctccggcagcggccccaagaaaaagagaaaagtctaagctgccttctgcggggcttgccttctggccatgcccttcttctctcccttgcacctgtacctcttggtctttgaataaagcctgagtaggaaggctagcaaaaaaaaaaaaaaaaaaaaaaaaaaaaaaaaaaaaaaaaaaaaaaaaaaaaaaaaaaaaaaaaaaaaaaaaaaaaaaaa

SEQ ID NO: 16600 - RNA, 9485 nt, synthetic construct
  source 1..9485: mol_type = other RNA
aggaaataagagagaaaagaagagtaagaagaaatataagagccaccatggcccctaagaagaagcgtaaagtgagccggatggaacgcctcgtctacgaggtgcggcagaagtgcagaaacatcgaggacatctgcatctcctgcggatctctgaacgtgaccctggagcacccactgttcatcggcggcatgtgccagaactgtaaaaactgttttctggagtgtgcctatcaatacgacgatgacggctaccagagctactgcaccatctgttgcggcggaagagaggtgctgatgtgtggaaataacaactgctgccggtgcttctgcgtggaatgcgtggacctgctggtgggccccggcgccgcccaggccgctattaaggaagatccttggaactgctacatgtgcggccacaagggcacatacggcctgctgagacggagagaggactggcctagcagactgcagatgttcttcgccaataaccacgaccaggagttcgacccccctaaggtgtaccctcccgtccccgccgagaagagaaagcccatccgggtcctgagcctgttcgatggcatcgccaccggtctgctggtgctgaaggacctgggcatccaggtggataggtacattgcctccgaggtgtgcgaggactccatcaccgtgggaatggtgcgtcatcagggcaagatcatgtacgtgggcgacgtgcggagcgtgacacagaagcatatccaggagtggggccctttcgacctggtgatcggcggcagcccttgcaatgacctgagcatcgtgaacccagcccggaagggcctgtacgagggaaccggcagactgttcttcgagttttacagactgctgcacgacgcccggcctaaggaaggcgacgaccggcccttcttttggctgttcgagaatgtggtggccatgggagtcagcgacaagcgggatattagccggttcctggagagcaaccccgtgatgatcgatgccaaggaagtgagcgccgcccaccgggccagatacttctggggcaatctgcctggcatgaacagacccctggccagcaccgtgaacgacaagctggagctgcaggagtgcctggagcacggccggatcgccaagttcagcaaggtgagaaccatcaccacccgaagcaacagcatcaaacaaggcaaggaccagcactttcctgtgttcatgaacgagaaggaggacatcctgtggtgtaccgagatggagagagtgttcgggttcccagtccactacacagatgtcagcaacatgtctagactggccagacagagactgctgggaagaagctggtccgtccctgtgatcagacacctgttcgcccctctgaaggagtacttcgcctgcgtgagcagcggcaacagcaacgccaacagccggggccccagcttctctagcggcctggtgccactgtccctgagagggagccacatgggccccatggagatctacaaaaccgtgagcgcctggaagcggcagcctgtgcgcgtgctgagcctgtttcggaatatcgataaagtcctgaaaagcctgggattcctggagagcggctctggctccggcggtggcaccctgaagtacgtggaggatgtgacaaacgtggtcagacgggatgtggagaagtggggccccttcgatctggtgtacggcagcacccaacccctgggcagctcttgtgaccggtgccctggctggtacatgtttcagttccaccggatcctgcagtacgccctgccgagacaggagtcccagcggccattcttttggattttcatggacaacttgctgctgaccgaggatgaccaggaaactaccactcggttcctgcagaccgaagccgtgaccctgcaggacgtgagaggccgggactaccagaacgccatgcgggtgtggtccaacatccctggactgaaaagcaagcacgcacctctgacccctaaagaagaggagtacctgcaggcccaggtgcggagcagaagcaagctggacgcccctaaggtggatctgctggtgaagaattgcctcctgcccctgagagagtacttcaagtatttcagccagaatagtctgcccctgggaggcagcggcggcggcgccctggtgacatttgaggacgtcgccgtgcggttcacccaggaggaatgggctctgctggatccttctcagaaaatcctgtaccgggacgtgatgagagagacataccggaatctgacctccgtgggcatcaactgggaatgttgggaccttgaagcctgcttcagaagcctgggaagaaacctgagagtgcaggtggtgaagagaaagtgcgagctgaccaacagcggcccctgcgccgagggcggcccaagcagcggcgcccctcctcccagcggcggcagcccagccggctccccaacctctaccgaggagggcacctctgagtccgccacccccgagagcggccctggcacctccaccgagcccagcgagggcagcgcacccggcagccctgccggcagccccacctccacagaggagggaaccagcaccgagcccagcgaaggcagcgccccaggcaccagcaccgagcctagtgagcaggagattaaacggatcaacaagatcagaagaagacttgtgaaagacagcaacaccaagaaggccggcaagacaggccccatgaaaaccctgctggttagagtgatgacacccgatctgagagagcggctggaaaacctgagaaagaagcctgaaaatatcccccagcccatcagcaatacatctagagccaacctgaataagctgctgaccgattacaccgaaatgaagaaggcgatcctgcatgtgtactgggaagagttccagaaggaccctgtgggcctgatgagccgggtggcccagcctgccagcaagaagatcgatcagaacaagctgaaacctgagatggacgagaagggcaacctgaccaccgccggctttgcctgctctcagtgtggccagcccctgttcgtgtacaagctggagcaggtgtctgagaagggcaaggcttacaccaactacttcggacggtgcaatgtggccgagcacgaaaagctgatcctgctggcccagctgaagcccgagaaggatagcgacgaagccgtgacatatagcctgggaaagtttgggcagagggccctggatttctacagcattcatgtgaccaaggagtccacccaccccgtgaagcccctggcccagatcgccggaaacagatacgcctccggacctgtgggaaaggccctgagcgacgcatgtatgggcacaatcgcctccttcctgtctaagtaccaggacatcatcatcgaacaccagaaggtggtgaagggcaaccagaagagactggagagcctgcgggagctggccggcaaggaaaacctggaataccctagcgtgaccctgccacctcagcctcacaccaaggagggcgttgatgcctacaacgaagtgatcgcccgggtgcgaatgtgggtgaacctgaacctgtggcagaagctgaagctaagcagagatgatgccaagcctctgctgagactgaagggattcccttcctttcctctggtcgagagacaggccaacgaagtggactggtgggacatggtgtgtaacgtgaagaagctgatcaacgagaaaaaggaggatggcaaggtgttttggcagaatctggctggctacaagagacaggaagccctgagaccatacctgagcagcgaggaagatcggaagaagggaaagaaattcgctcggtaccagctgggcgacctgctgctgcacctggaaaagaagcacggcgaggactggggaaaggtgtacgacgaggcctgggagcggattgacaagaaagtggaaggcctgagcaagcacatcaagctggaagaggaacggagaagcgaggacgcccagagcaaggccgccctgaccgactggctgcgggctaaggccagcttcgtgatcgagggcctgaaggaggccgacaaggacgagttctgcagatgcgagctgaagctgcagaagtggtacggggacctgcggggaaagcccttcgccatcgaagccgagaacagcatcctggacatcagcggcttcagcaagcagtacaactgtgccttcatctggcagaaggacggcgtgaagaagctgaacctgtacctgatcatcaactacttcaagggcggcaagctgcggttcaagaagatcaaacctgaagccttcgaagccaacagattctacaccgtgatcaacaaaaagagcggcgagatcgtgcccatggaggtgaacttcaacttcgacgaccccaacctgatcatcctgcctctggcctttggcaagagacagggcagagaattcatctggaacgacctgctgtccctggaaaccggcagcctgaagctggccaacggaagagtgatcgagaagacactgtacaacagaagaacccggcaggatgagcctgccctgttcgtggccctgaccttcgagcggcgggaggtcctggactcctccaatatcaaaccaatgaacctgatcggcgtggcaagaggcgaaaacatccccgccgtgatcgccctgaccgaccccgagggctgcccactgagccggtttaaggatagcctgggaaacccaacccacatcctgagaatcggcgagagctataaggagaagcagcggaccatccaggccaagaaggaggtggagcagcggagagccggcggctacagccggaagtacgccagcaaagccaagaatctggcagacgatatggtgagaaacaccgctagagatctgctgtactacgccgtgacccaggatgccatgctgatcttcgccaacctgagccggggcttcggccggcagggcaagcggaccttcatggccgagagacagtacacacggatggaggactggctgaccgccaagctggcctacgagggcctgagcaagacctacctgtccaagacactggcccagtacacctccaagacatgcagcaactgtgggtttaccatcaccagcgccgactacgacagggtgctggagaagctgaagaagacagcaacaggctggatgaccacaattaacggcaaggagctgaaggtggagggccagattacctactacaacagatacaagagacagaacgtagtcaaggacctgtccgtcgagctggatagactgagcgaagaatctgtgaacaacgacatctcctcctggacaaagggcagaagcggagaagctctgagcctcctgaagaaaagattctcccatagacccgtgcaggagaagttcgtgtgcctgaactgcggcttcgagacacacgcagccgagcaagccgccctgaacatcgccagatcctggctgttcctgcggagccaggagtacaagaaataccagacaaacaagacaaccggcaacaccgataagagagccttcgtcgagacctggcagtccttttaccggaagaagcttaaggaggtgtggaaacctgccgtgcggtctggcggatctggcggaggctccagccagggcctggtgaccttcggcgacgtggccatcgacttcagccaggaggagtgggagtggctgagccccatccagaggaacctgtacaggaaggtgatgctggagaactacaggaacctggccagcctgggcctgtgcgtgagcaagcccgacgtgatcagcctgctggagcagggcaaggagccctggaccgtgaagaggaggatgaccagggccaggtgccccgacacccagcacctgggcggcccaagcagcggcgcccctcctcccagcggcggcagcccagccggctccccaacctctaccgaggagggcacctctgagtccgccacccccgagagcggccctggcacctccaccgagcccagcgagggcagcgcacccggcagccctgccggcagccccacctccacagaggagggaaccagcaccgagcccagcgaaggcagcgccccaggcaccagcaccgagcctagtgagcaggagattaaacggatcaacaagatcagaagaagacttgtgaaagacagcaacaccaagaaggccggcaagacaggccccatgaaaaccctgctggttagagtgatgacacccgatctgagagagcggctggaaaacctgagaaagaagcctgaaaatatcccccagcccatcagcaatacatctagagccaacctgaataagctgctgaccgattacaccgaaatgaagaaggcgatcctgcatgtgtactgggaagagttccagaaggaccctgtgggcctgatgagccgggtggcccagcctgccagcaagaagatcgatcagaacaagctgaaacctgagatggacgagaagggcaacctgaccaccgccggctttgcctgctctcagtgtggccagcccctgttcgtgtacaagctggagcaggtgtctgagaagggcaaggcttacaccaactacttcggacggtgcaatgtggccgagcacgaaaagctgatcctgctggcccagctgaagcccgagaaggatagcgacgaagccgtgacatatagcctgggaaagtttgggcagagggccctggatttctacagcattcatgtgaccaaggagtccacccaccccgtgaagcccctggcccagatcgccggaaacagatacgcctccggacctgtgggaaaggccctgagcgacgcatgtatgggcacaatcgcctccttcctgtctaagtaccaggacatcatcatcgaacaccagaaggtggtgaagggcaaccagaagagactggagagcctgcgggagctggccggcaaggaaaacctggaataccctagcgtgaccctgccacctcagcctcacaccaaggagggcgttgatgcctacaacgaagtgatcgcccgggtgcgaatgtgggtgaacctgaacctgtggcagaagctgaagctaagcagagatgatgccaagcctctgctgagactgaagggattcccttcctttcctctggtcgagagacaggccaacgaagtggactggtgggacatggtgtgtaacgtgaagaagctgatcaacgagaaaaaggaggatggcaaggtgttttggcagaatctggctggctacaagagacaggaagccctgagaccatacctgagcagcgaggaagatcggaagaagggaaagaaattcgctcggtaccagctgggcgacctgctgctgcacctggaaaagaagcacggcgaggactggggaaaggtgtacgacgaggcctgggagcggattgacaagaaagtggaaggcctgagcaagcacatcaagctggaagaggaacggagaagcgaggacgcccagagcaaggccgccctgaccgactggctgcgggctaaggccagcttcgtgatcgagggcctgaaggaggccgacaaggacgagttctgcagatgcgagctgaagctgcagaagtggtacggggacctgcggggaaagcccttcgccatcgaagccgagaacagcatcctggacatcagcggcttcagcaagcagtacaactgtgccttcatctggcagaaggacggcgtgaagaagctgaacctgtacctgatcatcaactacttcaagggcggcaagctgcggttcaagaagatcaaacctgaagccttcgaagccaacagattctacaccgtgatcaacaaaaagagcggcgagatcgtgcccatggaggtgaacttcaacttcgacgaccccaacctgatcatcctgcctctggcctttggcaagagacagggcagagaattcatctggaacgacctgctgtccctggaaaccggcagcctgaagctggccaacggaagagtgatcgagaagacactgtacaacagaagaacccggcaggatgagcctgccctgttcgtggccctgaccttcgagcggcgggaggtcctggactcctccaatatcaaaccaatgaacctgatcggcgtggcaagaggcgaaaacatccccgccgtgatcgccctgaccgaccccgagggctgcccactgagccggtttaaggatagcctgggaaacccaacccacatcctgagaatcggcgagagctataaggagaagcagcggaccatccaggccaagaaggaggtggagcagcggagagccggcggctacagccggaagtacgccagcaaagccaagaatctggcagacgatatggtgagaaacaccgctagagatctgctgtactacgccgtgacccaggatgccatgctgatcttcgccaacctgagccggggcttcggccggcagggcaagcggaccttcatggccgagagacagtacacacggatggaggactggctgaccgccaagctggcctacgagggcctgagcaagacctacctgtccaagacactggcccagtacacctccaagacatgcagcaactgtgggtttaccatcaccagcgccgactacgacagggtgctggagaagctgaagaagacagcaacaggctggatgaccacaattaacggcaaggagctgaaggtggagggccagattacctactacaacagatacaagagacagaacgtagtcaaggacctgtccgtcgagctggatagactgagcgaagaatctgtgaacaacgacatctcctcctggacaaagggcagaagcggagaagctctgagcctcctgaagaaaagattctcccatagacccgtgcaggagaagttcgtgtgcctgaactgcggcttcgagacacacgcagccgagcaagccgccctgaacatcgccagatcctggctgttcctgcggagccaggagtacaagaaataccagacaaacaagacaaccggcaacaccgataagagagccttcgtcgagacctggcagtccttttaccggaagaagcttaaggaggtgtggaaacctgccgtgcggtctggcggatctggcggaggctcctagccagggcctggtgaccttcggcgacgtggccatcgacttcagccaggaggagtgggagtggctgagccccatccagaggaacctgtacaggaaggtgatgctggagaactacaggaacctggccagcctgggcctgtgcgtgagcaagcccgacgtgatcagcctgctggagcagggcaaggagccctggaccgtgaagaggaggatgaccagggccaggtgccccgacacccagcacctgggatctggctccggcagcggccccaagaaaaagagaaaagtctaagctgccttctgcggggcttgccttctggccatgcccttcttctctcccttgcacctgtacctcttggtctttgaataaagcctgagtaggaaggctagcaaaaaaaaaaaaaaaaaaaaaaaaaaaaaaaaaaaaaaaaaaaaaaaaaaaaaaaaaaaaaaaaaaaaaaaaaaaaaaaa

SEQ ID NO: 16601 - RNA, 9485 nt, synthetic construct
  source 1..9485: mol_type = other RNA
aggaaataagagagaaaagaagagtaagaagaaatataagagccaccatggcccctaagaagaagcgtaaagtgagccggatggaacgcctcgtctacgaggtgcggcagaagtgcagaaacatcgaggacatctgcatctcctgcggatctctgaacgtgaccctggagcacccactgttcatcggcggcatgtgccagaactgtaaaaactgttttctggagtgtgcctatcaatacgacgatgacggctaccagagctactgcaccatctgttgcggcggaagagaggtgctgatgtgtggaaataacaactgctgccggtgcttctgcgtggaatgcgtggacctgctggtgggccccggcgccgcccaggccgctattaaggaagatccttggaactgctacatgtgcggccacaagggcacatacggcctgctgagacggagagaggactggcctagcagactgcagatgttcttcgccaataaccacgaccaggagttcgacccccctaaggtgtaccctcccgtccccgccgagaagagaaagcccatccgggtcctgagcctgttcgatggcatcgccaccggtctgctggtgctgaaggacctgggcatccaggtggataggtacattgcctccgaggtgtgcgaggactccatcaccgtgggaatggtgcgtcatcagggcaagatcatgtacgtgggcgacgtgcggagcgtgacacagaagcatatccaggagtggggccctttcgacctggtgatcggcggcagcccttgcaatgacctgagcatcgtgaacccagcccggaagggcctgtacgagggaaccggcagactgttcttcgagttttacagactgctgcacgacgcccggcctaaggaaggcgacgaccggcccttcttttggctgttcgagaatgtggtggccatgggagtcagcgacaagcgggatattagccggttcctggagagcaaccccgtgatgatcgatgccaaggaagtgagcgccgcccaccgggccagatacttctggggcaatctgcctggcatgaacagacccctggccagcaccgtgaacgacaagctggagctgcaggagtgcctggagcacggccggatcgccaagttcagcaaggtgagaaccatcaccacccgaagcaacagcatcaaacaaggcaaggaccagcactttcctgtgttcatgaacgagaaggaggacatcctgtggtgtaccgagatggagagagtgttcgggttcccagtccactacacagatgtcagcaacatgtctagactggccagacagagactgctgggaagaagctggtccgtccctgtgatcagacacctgttcgcccctctgaaggagtacttcgcctgcgtgagcagcggcaacagcaacgccaacagccggggccccagcttctctagcggcctggtgccactgtccctgagagggagccacatgggccccatggagatctacaaaaccgtgagcgcctggaagcggcagcctgtgcgcgtgctgagcctgtttcggaatatcgataaagtcctgaaaagcctgggattcctggagagcggctctggctccggcggtggcaccctgaagtacgtggaggatgtgacaaacgtggtcagacgggatgtggagaagtggggccccttcgatctggtgtacggcagcacccaacccctgggcagctcttgtgaccggtgccctggctggtacatgtttcagttccaccggatcctgcagtacgccctgccgagacaggagtcccagcggccattcttttggattttcatggacaacttgctgctgaccgaggatgaccaggaaactaccactcggttcctgcagaccgaagccgtgaccctgcaggacgtgagaggccgggactaccagaacgccatgcgggtgtggtccaacatccctggactgaaaagcaagcacgcacctctgacccctaaagaagaggagtacctgcaggcccaggtgcggagcagaagcaagctggacgcccctaaggtggatctgctggtgaagaattgcctcctgcccctgagagagtacttcaagtatttcagccagaatagtctgcccctgggaggcagcggcggcggcgccctggtgacatttgaggacgtcgccgtgcggttcacccaggaggaatgggctctgctggatccttctcagaaaatcctgtaccgggacgtgatgagagagacataccggaatctgacctccgtgggcatcaactgggaatgttgggaccttgaagcctgcttcagaagcctgggaagaaacctgagagtgcaggtggtgaagagaaagtgcgagctgaccaacagcggcccctgcgccgagggcggcccaagcagcggcgcccctcctcccagcggcggcagcccagccggctccccaacctctaccgaggagggcacctctgagtccgccacccccgagagcggccctggcacctccaccgagcccagcgagggcagcgcacccggcagccctgccggcagccccacctccacagaggagggaaccagcaccgagcccagcgaaggcagcgccccaggcaccagcaccgagcctagtgagcaggagattaaacggatcaacaagatcagaagaagacttgtgaaagacagcaacaccaagaaggccggcaagacaggccccatgaaaaccctgctggttagagtgatgacacccgatctgagagagcggctggaaaacctgagaaagaagcctgaaaatatcccccagcccatcagcaatacatctagagccaacctgaataagctgctgaccgattacaccgaaatgaagaaggcgatcctgcatgtgtactgggaagagttccagaaggaccctgtgggcctgatgagccgggtggcccagcctgccagcaagaagatcgatcagaacaagctgaaacctgagatggacgagaagggcaacctgaccaccgccggctttgcctgctctcagtgtggccagcccctgttcgtgtacaagctggagcaggtgtctgagaagggcaaggcttacaccaactacttcggacggtgcaatgtggccgagcacgaaaagctgatcctgctggcccagctgaagcccgagaaggatagcgacgaagccgtgacatatagcctgggaaagtttgggcagagggccctggatttctacagcattcatgtgaccaaggagtccacccaccccgtgaagcccctggcccagatcgccggaaacagatacgcctccggacctgtgggaaaggccctgagcgacgcatgtatgggcacaatcgcctccttcctgtctaagtaccaggacatcatcatcgaacaccagaaggtggtgaagggcaaccagaagagactggagagcctgcgggagctggccggcaaggaaaacctggaataccctagcgtgaccctgccacctcagcctcacaccaaggagggcgttgatgcctacaacgaagtgatcgcccgggtgcgaatgtgggtgaacctgaacctgtggcagaagctgaagctaagcagagatgatgccaagcctctgctgagactgaagggattcccttcctttcctctggtcgagagacaggccaacgaagtggactggtgggacatggtgtgtaacgtgaagaagctgatcaacgagaaaaaggaggatggcaaggtgttttggcagaatctggctggctacaagagacaggaagccctgagaccatacctgagcagcgaggaagatcggaagaagggaaagaaattcgctcggtaccagctgggcgacctgctgctgcacctggaaaagaagcacggcgaggactggggaaaggtgtacgacgaggcctgggagcggattgacaagaaagtggaaggcctgagcaagcacatcaagctggaagaggaacggagaagcgaggacgcccagagcaaggccgccctgaccgactggctgcgggctaaggccagcttcgtgatcgagggcctgaaggaggccgacaaggacgagttctgcagatgcgagctgaagctgcagaagtggtacggggacctgcggggaaagcccttcgccatcgaagccgagaacagcatcctggacatcagcggcttcagcaagcagtacaactgtgccttcatctggcagaaggacggcgtgaagaagctgaacctgtacctgatcatcaactacttcaagggcggcaagctgcggttcaagaagatcaaacctgaagccttcgaagccaacagattctacaccgtgatcaacaaaaagagcggcgagatcgtgcccatggaggtgaacttcaacttcgacgaccccaacctgatcatcctgcctctggcctttggcaagagacagggcagagaattcatctggaacgacctgctgtccctggaaaccggcagcctgaagctggccaacggaagagtgatcgagaagacactgtacaacagaagaacccggcaggatgagcctgccctgttcgtggccctgaccttcgagcggcgggaggtcctggactcctccaatatcaaaccaatgaacctgatcggcgtggcaagaggcgaaaacatccccgccgtgatcgccctgaccgaccccgagggctgcccactgagccggtttaaggatagcctgggaaacccaacccacatcctgagaatcggcgagagctataaggagaagcagcggaccatccaggccaagaaggaggtggagcagcggagagccggcggctacagccggaagtacgccagcaaagccaagaatctggcagacgatatggtgagaaacaccgctagagatctgctgtactacgccgtgacccaggatgccatgctgatcttcgccaacctgagccggggcttcggccggcagggcaagcggaccttcatggccgagagacagtacacacggatggaggactggctgaccgccaagctggcctacgagggcctgagcaagacctacctgtccaagacactggcccagtacacctccaagacatgcagcaactgtgggtttaccatcaccagcgccgactacgacagggtgctggagaagctgaagaagacagcaacaggctggatgaccacaattaacggcaaggagctgaaggtggagggccagattacctactacaacagatacaagagacagaacgtagtcaaggacctgtccgtcgagctggatagactgagcgaagaatctgtgaacaacgacatctcctcctggacaaagggcagaagcggagaagctctgagcctcctgaagaaaagattctcccatagacccgtgcaggagaagttcgtgtgcctgaactgcggcttcgagacacacgcagccgagcaagccgccctgaacatcgccagatcctggctgttcctgcggagccaggagtacaagaaataccagacaaacaagacaaccggcaacaccgataagagagccttcgtcgagacctggcagtccttttaccggaagaagcttaaggaggtgtggaaacctgccgtgcggtctggcggatctggcggaggctcccccagcgtgcccgtgaccttcagggacgtgttcgtgcagttcagcagggacgagtgggccctgctggacgacgagcagaaggagctgcaccagagcgtgatgcagagcaactacgagatgctgatgagcctgtactgcgacctggccaagcccgaggtgagcctgcagatggagaggggcgagccctgcctgcccgccgagcccgacctgcagggcaccgccgtgagcctgaaccccgccgccggcggcccaagcagcggcgcccctcctcccagcggcggcagcccagccggctccccaacctctaccgaggagggcacctctgagtccgccacccccgagagcggccctggcacctccaccgagcccagcgagggcagcgcacccggcagccctgccggcagccccacctccacagaggagggaaccagcaccgagcccagcgaaggcagcgccccaggcaccagcaccgagcctagtgagcaggagattaaacggatcaacaagatcagaagaagacttgtgaaagacagcaacaccaagaaggccggcaagacaggccccatgaaaaccctgctggttagagtgatgacacccgatctgagagagcggctggaaaacctgagaaagaagcctgaaaatatcccccagcccatcagcaatacatctagagccaacctgaataagctgctgaccgattacaccgaaatgaagaaggcgatcctgcatgtgtactgggaagagttccagaaggaccctgtgggcctgatgagccgggtggcccagcctgccagcaagaagatcgatcagaacaagctgaaacctgagatggacgagaagggcaacctgaccaccgccggctttgcctgctctcagtgtggccagcccctgttcgtgtacaagctggagcaggtgtctgagaagggcaaggcttacaccaactacttcggacggtgcaatgtggccgagcacgaaaagctgatcctgctggcccagctgaagcccgagaaggatagcgacgaagccgtgacatatagcctgggaaagtttgggcagagggccctggatttctacagcattcatgtgaccaaggagtccacccaccccgtgaagcccctggcccagatcgccggaaacagatacgcctccggacctgtgggaaaggccctgagcgacgcatgtatgggcacaatcgcctccttcctgtctaagtaccaggacatcatcatcgaacaccagaaggtggtgaagggcaaccagaagagactggagagcctgcgggagctggccggcaaggaaaacctggaataccctagcgtgaccctgccacctcagcctcacaccaaggagggcgttgatgcctacaacgaagtgatcgcccgggtgcgaatgtgggtgaacctgaacctgtggcagaagctgaagctaagcagagatgatgccaagcctctgctgagactgaagggattcccttcctttcctctggtcgagagacaggccaacgaagtggactggtgggacatggtgtgtaacgtgaagaagctgatcaacgagaaaaaggaggatggcaaggtgttttggcagaatctggctggctacaagagacaggaagccctgagaccatacctgagcagcgaggaagatcggaagaagggaaagaaattcgctcggtaccagctgggcgacctgctgctgcacctggaaaagaagcacggcgaggactggggaaaggtgtacgacgaggcctgggagcggattgacaagaaagtggaaggcctgagcaagcacatcaagctggaagaggaacggagaagcgaggacgcccagagcaaggccgccctgaccgactggctgcgggctaaggccagcttcgtgatcgagggcctgaaggaggccgacaaggacgagttctgcagatgcgagctgaagctgcagaagtggtacggggacctgcggggaaagcccttcgccatcgaagccgagaacagcatcctggacatcagcggcttcagcaagcagtacaactgtgccttcatctggcagaaggacggcgtgaagaagctgaacctgtacctgatcatcaactacttcaagggcggcaagctgcggttcaagaagatcaaacctgaagccttcgaagccaacagattctacaccgtgatcaacaaaaagagcggcgagatcgtgcccatggaggtgaacttcaacttcgacgaccccaacctgatcatcctgcctctggcctttggcaagagacagggcagagaattcatctggaacgacctgctgtccctggaaaccggcagcctgaagctggccaacggaagagtgatcgagaagacactgtacaacagaagaacccggcaggatgagcctgccctgttcgtggccctgaccttcgagcggcgggaggtcctggactcctccaatatcaaaccaatgaacctgatcggcgtggcaagaggcgaaaacatccccgccgtgatcgccctgaccgaccccgagggctgcccactgagccggtttaaggatagcctgggaaacccaacccacatcctgagaatcggcgagagctataaggagaagcagcggaccatccaggccaagaaggaggtggagcagcggagagccggcggctacagccggaagtacgccagcaaagccaagaatctggcagacgatatggtgagaaacaccgctagagatctgctgtactacgccgtgacccaggatgccatgctgatcttcgccaacctgagccggggcttcggccggcagggcaagcggaccttcatggccgagagacagtacacacggatggaggactggctgaccgccaagctggcctacgagggcctgagcaagacctacctgtccaagacactggcccagtacacctccaagacatgcagcaactgtgggtttaccatcaccagcgccgactacgacagggtgctggagaagctgaagaagacagcaacaggctggatgaccacaattaacggcaaggagctgaaggtggagggccagattacctactacaacagatacaagagacagaacgtagtcaaggacctgtccgtcgagctggatagactgagcgaagaatctgtgaacaacgacatctcctcctggacaaagggcagaagcggagaagctctgagcctcctgaagaaaagattctcccatagacccgtgcaggagaagttcgtgtgcctgaactgcggcttcgagacacacgcagccgagcaagccgccctgaacatcgccagatcctggctgttcctgcggagccaggagtacaagaaataccagacaaacaagacaaccggcaacaccgataagagagccttcgtcgagacctggcagtccttttaccggaagaagcttaaggaggtgtggaaacctgccgtgcggtctggcggatctggcggaggctcctcccagcgtgcccgtgaccttcagggacgtgttcgtgcagttcagcagggacgagtgggccctgctggacgacgagcagaaggagctgcaccagagcgtgatgcagagcaactacgagatgctgatgagcctgtactgcgacctggccaagcccgaggtgagcctgcagatggagaggggcgagccctgcctgcccgccgagcccgacctgcagggcaccgccgtgagcctgaaccccgccgccggatctggctccggcagcggccccaagaaaaagagaaaagtctaagctgccttctgcggggcttgccttctggccatgcccttcttctctcccttgcacctgtacctcttggtctttgaataaagcctgagtaggaaggctagcaaaaaaaaaaaaaaaaaaaaaaaaaaaaaaaaaaaaaaaaaaaaaaaaaaaaaaaaaaaaaaaaaaaaaaaaaaaaaaaa

SEQ ID NO: 16602 - RNA, 9485 nt, synthetic construct
  source 1..9485: mol_type = other RNA
aggaaataagagagaaaagaagagtaagaagaaatataagagccaccatggcccctaagaagaagcgtaaagtgagccggatggaacgcctcgtctacgaggtgcggcagaagtgcagaaacatcgaggacatctgcatctcctgcggatctctgaacgtgaccctggagcacccactgttcatcggcggcatgtgccagaactgtaaaaactgttttctggagtgtgcctatcaatacgacgatgacggctaccagagctactgcaccatctgttgcggcggaagagaggtgctgatgtgtggaaataacaactgctgccggtgcttctgcgtggaatgcgtggacctgctggtgggccccggcgccgcccaggccgctattaaggaagatccttggaactgctacatgtgcggccacaagggcacatacggcctgctgagacggagagaggactggcctagcagactgcagatgttcttcgccaataaccacgaccaggagttcgacccccctaaggtgtaccctcccgtccccgccgagaagagaaagcccatccgggtcctgagcctgttcgatggcatcgccaccggtctgctggtgctgaaggacctgggcatccaggtggataggtacattgcctccgaggtgtgcgaggactccatcaccgtgggaatggtgcgtcatcagggcaagatcatgtacgtgggcgacgtgcggagcgtgacacagaagcatatccaggagtggggccctttcgacctggtgatcggcggcagcccttgcaatgacctgagcatcgtgaacccagcccggaagggcctgtacgagggaaccggcagactgttcttcgagttttacagactgctgcacgacgcccggcctaaggaaggcgacgaccggcccttcttttggctgttcgagaatgtggtggccatgggagtcagcgacaagcgggatattagccggttcctggagagcaaccccgtgatgatcgatgccaaggaagtgagcgccgcccaccgggccagatacttctggggcaatctgcctggcatgaacagacccctggccagcaccgtgaacgacaagctggagctgcaggagtgcctggagcacggccggatcgccaagttcagcaaggtgagaaccatcaccacccgaagcaacagcatcaaacaaggcaaggaccagcactttcctgtgttcatgaacgagaaggaggacatcctgtggtgtaccgagatggagagagtgttcgggttcccagtccactacacagatgtcagcaacatgtctagactggccagacagagactgctgggaagaagctggtccgtccctgtgatcagacacctgttcgcccctctgaaggagtacttcgcctgcgtgagcagcggcaacagcaacgccaacagccggggccccagcttctctagcggcctggtgccactgtccctgagagggagccacatgggccccatggagatctacaaaaccgtgagcgcctggaagcggcagcctgtgcgcgtgctgagcctgtttcggaatatcgataaagtcctgaaaagcctgggattcctggagagcggctctggctccggcggtggcaccctgaagtacgtggaggatgtgacaaacgtggtcagacgggatgtggagaagtggggccccttcgatctggtgtacggcagcacccaacccctgggcagctcttgtgaccggtgccctggctggtacatgtttcagttccaccggatcctgcagtacgccctgccgagacaggagtcccagcggccattcttttggattttcatggacaacttgctgctgaccgaggatgaccaggaaactaccactcggttcctgcagaccgaagccgtgaccctgcaggacgtgagaggccgggactaccagaacgccatgcgggtgtggtccaacatccctggactgaaaagcaagcacgcacctctgacccctaaagaagaggagtacctgcaggcccaggtgcggagcagaagcaagctggacgcccctaaggtggatctgctggtgaagaattgcctcctgcccctgagagagtacttcaagtatttcagccagaatagtctgcccctgggaggcagcggcggcggcgccctggtgacatttgaggacgtcgccgtgcggttcacccaggaggaatgggctctgctggatccttctcagaaaatcctgtaccgggacgtgatgagagagacataccggaatctgacctccgtgggcatcaactgggaatgttgggaccttgaagcctgcttcagaagcctgggaagaaacctgagagtgcaggtggtgaagagaaagtgcgagctgaccaacagcggcccctgcgccgagggcggcccaagcagcggcgcccctcctcccagcggcggcagcccagccggctccccaacctctaccgaggagggcacctctgagtccgccacccccgagagcggccctggcacctccaccgagcccagcgagggcagcgcacccggcagccctgccggcagccccacctccacagaggagggaaccagcaccgagcccagcgaaggcagcgccccaggcaccagcaccgagcctagtgagcaggagattaaacggatcaacaagatcagaagaagacttgtgaaagacagcaacaccaagaaggccggcaagacaggccccatgaaaaccctgctggttagagtgatgacacccgatctgagagagcggctggaaaacctgagaaagaagcctgaaaatatcccccagcccatcagcaatacatctagagccaacctgaataagctgctgaccgattacaccgaaatgaagaaggcgatcctgcatgtgtactgggaagagttccagaaggaccctgtgggcctgatgagccgggtggcccagcctgccagcaagaagatcgatcagaacaagctgaaacctgagatggacgagaagggcaacctgaccaccgccggctttgcctgctctcagtgtggccagcccctgttcgtgtacaagctggagcaggtgtctgagaagggcaaggcttacaccaactacttcggacggtgcaatgtggccgagcacgaaaagctgatcctgctggcccagctgaagcccgagaaggatagcgacgaagccgtgacatatagcctgggaaagtttgggcagagggccctggatttctacagcattcatgtgaccaaggagtccacccaccccgtgaagcccctggcccagatcgccggaaacagatacgcctccggacctgtgggaaaggccctgagcgacgcatgtatgggcacaatcgcctccttcctgtctaagtaccaggacatcatcatcgaacaccagaaggtggtgaagggcaaccagaagagactggagagcctgcgggagctggccggcaaggaaaacctggaataccctagcgtgaccctgccacctcagcctcacaccaaggagggcgttgatgcctacaacgaagtgatcgcccgggtgcgaatgtgggtgaacctgaacctgtggcagaagctgaagctaagcagagatgatgccaagcctctgctgagactgaagggattcccttcctttcctctggtcgagagacaggccaacgaagtggactggtgggacatggtgtgtaacgtgaagaagctgatcaacgagaaaaaggaggatggcaaggtgttttggcagaatctggctggctacaagagacaggaagccctgagaccatacctgagcagcgaggaagatcggaagaagggaaagaaattcgctcggtaccagctgggcgacctgctgctgcacctggaaaagaagcacggcgaggactggggaaaggtgtacgacgaggcctgggagcggattgacaagaaagtggaaggcctgagcaagcacatcaagctggaagaggaacggagaagcgaggacgcccagagcaaggccgccctgaccgactggctgcgggctaaggccagcttcgtgatcgagggcctgaaggaggccgacaaggacgagttctgcagatgcgagctgaagctgcagaagtggtacggggacctgcggggaaagcccttcgccatcgaagccgagaacagcatcctggacatcagcggcttcagcaagcagtacaactgtgccttcatctggcagaaggacggcgtgaagaagctgaacctgtacctgatcatcaactacttcaagggcggcaagctgcggttcaagaagatcaaacctgaagccttcgaagccaacagattctacaccgtgatcaacaaaaagagcggcgagatcgtgcccatggaggtgaacttcaacttcgacgaccccaacctgatcatcctgcctctggcctttggcaagagacagggcagagaattcatctggaacgacctgctgtccctggaaaccggcagcctgaagctggccaacggaagagtgatcgagaagacactgtacaacagaagaacccggcaggatgagcctgccctgttcgtggccctgaccttcgagcggcgggaggtcctggactcctccaatatcaaaccaatgaacctgatcggcgtggcaagaggcgaaaacatccccgccgtgatcgccctgaccgaccccgagggctgcccactgagccggtttaaggatagcctgggaaacccaacccacatcctgagaatcggcgagagctataaggagaagcagcggaccatccaggccaagaaggaggtggagcagcggagagccggcggctacagccggaagtacgccagcaaagccaagaatctggcagacgatatggtgagaaacaccgctagagatctgctgtactacgccgtgacccaggatgccatgctgatcttcgccaacctgagccggggcttcggccggcagggcaagcggaccttcatggccgagagacagtacacacggatggaggactggctgaccgccaagctggcctacgagggcctgagcaagacctacctgtccaagacactggcccagtacacctccaagacatgcagcaactgtgggtttaccatcaccagcgccgactacgacagggtgctggagaagctgaagaagacagcaacaggctggatgaccacaattaacggcaaggagctgaaggtggagggccagattacctactacaacagatacaagagacagaacgtagtcaaggacctgtccgtcgagctggatagactgagcgaagaatctgtgaacaacgacatctcctcctggacaaagggcagaagcggagaagctctgagcctcctgaagaaaagattctcccatagacccgtgcaggagaagttcgtgtgcctgaactgcggcttcgagacacacgcagccgagcaagccgccctgaacatcgccagatcctggctgttcctgcggagccaggagtacaagaaataccagacaaacaagacaaccggcaacaccgataagagagccttcgtcgagacctggcagtccttttaccggaagaagcttaaggaggtgtggaaacctgccgtgcggtctggcggatctggcggaggctccttccaggagagcgtgaccttcgaggacgtggccatctacttcagcgagaacgagtggaccggcctggcccccgcccagagggccctgtacagggacgtgatgctggagaactacggcgccgtggccagcctggccgccttccccttccccaagcccgccctgatcttccagctggagcagggcgaggccccctggagcagcgccccccagggcgccctggacggcgagggccccaggggcatcggcggcccaagcagcggcgcccctcctcccagcggcggcagcccagccggctccccaacctctaccgaggagggcacctctgagtccgccacccccgagagcggccctggcacctccaccgagcccagcgagggcagcgcacccggcagccctgccggcagccccacctccacagaggagggaaccagcaccgagcccagcgaaggcagcgccccaggcaccagcaccgagcctagtgagcaggagattaaacggatcaacaagatcagaagaagacttgtgaaagacagcaacaccaagaaggccggcaagacaggccccatgaaaaccctgctggttagagtgatgacacccgatctgagagagcggctggaaaacctgagaaagaagcctgaaaatatcccccagcccatcagcaatacatctagagccaacctgaataagctgctgaccgattacaccgaaatgaagaaggcgatcctgcatgtgtactgggaagagttccagaaggaccctgtgggcctgatgagccgggtggcccagcctgccagcaagaagatcgatcagaacaagctgaaacctgagatggacgagaagggcaacctgaccaccgccggctttgcctgctctcagtgtggccagcccctgttcgtgtacaagctggagcaggtgtctgagaagggcaaggcttacaccaactacttcggacggtgcaatgtggccgagcacgaaaagctgatcctgctggcccagctgaagcccgagaaggatagcgacgaagccgtgacatatagcctgggaaagtttgggcagagggccctggatttctacagcattcatgtgaccaaggagtccacccaccccgtgaagcccctggcccagatcgccggaaacagatacgcctccggacctgtgggaaaggccctgagcgacgcatgtatgggcacaatcgcctccttcctgtctaagtaccaggacatcatcatcgaacaccagaaggtggtgaagggcaaccagaagagactggagagcctgcgggagctggccggcaaggaaaacctggaataccctagcgtgaccctgccacctcagcctcacaccaaggagggcgttgatgcctacaacgaagtgatcgcccgggtgcgaatgtgggtgaacctgaacctgtggcagaagctgaagctaagcagagatgatgccaagcctctgctgagactgaagggattcccttcctttcctctggtcgagagacaggccaacgaagtggactggtgggacatggtgtgtaacgtgaagaagctgatcaacgagaaaaaggaggatggcaaggtgttttggcagaatctggctggctacaagagacaggaagccctgagaccatacctgagcagcgaggaagatcggaagaagggaaagaaattcgctcggtaccagctgggcgacctgctgctgcacctggaaaagaagcacggcgaggactggggaaaggtgtacgacgaggcctgggagcggattgacaagaaagtggaaggcctgagcaagcacatcaagctggaagaggaacggagaagcgaggacgcccagagcaaggccgccctgaccgactggctgcgggctaaggccagcttcgtgatcgagggcctgaaggaggccgacaaggacgagttctgcagatgcgagctgaagctgcagaagtggtacggggacctgcggggaaagcccttcgccatcgaagccgagaacagcatcctggacatcagcggcttcagcaagcagtacaactgtgccttcatctggcagaaggacggcgtgaagaagctgaacctgtacctgatcatcaactacttcaagggcggcaagctgcggttcaagaagatcaaacctgaagccttcgaagccaacagattctacaccgtgatcaacaaaaagagcggcgagatcgtgcccatggaggtgaacttcaacttcgacgaccccaacctgatcatcctgcctctggcctttggcaagagacagggcagagaattcatctggaacgacctgctgtccctggaaaccggcagcctgaagctggccaacggaagagtgatcgagaagacactgtacaacagaagaacccggcaggatgagcctgccctgttcgtggccctgaccttcgagcggcgggaggtcctggactcctccaatatcaaaccaatgaacctgatcggcgtggcaagaggcgaaaacatccccgccgtgatcgccctgaccgaccccgagggctgcccactgagccggtttaaggatagcctgggaaacccaacccacatcctgagaatcggcgagagctataaggagaagcagcggaccatccaggccaagaaggaggtggagcagcggagagccggcggctacagccggaagtacgccagcaaagccaagaatctggcagacgatatggtgagaaacaccgctagagatctgctgtactacgccgtgacccaggatgccatgctgatcttcgccaacctgagccggggcttcggccggcagggcaagcggaccttcatggccgagagacagtacacacggatggaggactggctgaccgccaagctggcctacgagggcctgagcaagacctacctgtccaagacactggcccagtacacctccaagacatgcagcaactgtgggtttaccatcaccagcgccgactacgacagggtgctggagaagctgaagaagacagcaacaggctggatgaccacaattaacggcaaggagctgaaggtggagggccagattacctactacaacagatacaagagacagaacgtagtcaaggacctgtccgtcgagctggatagactgagcgaagaatctgtgaacaacgacatctcctcctggacaaagggcagaagcggagaagctctgagcctcctgaagaaaagattctcccatagacccgtgcaggagaagttcgtgtgcctgaactgcggcttcgagacacacgcagccgagcaagccgccctgaacatcgccagatcctggctgttcctgcggagccaggagtacaagaaataccagacaaacaagacaaccggcaacaccgataagagagccttcgtcgagacctggcagtccttttaccggaagaagcttaaggaggtgtggaaacctgccgtgcggtctggcggatctggcggaggctcctttccaggagagcgtgaccttcgaggacgtggccatctacttcagcgagaacgagtggaccggcctggcccccgcccagagggccctgtacagggacgtgatgctggagaactacggcgccgtggccagcctggccgccttccccttccccaagcccgccctgatcttccagctggagcagggcgaggccccctggagcagcgccccccagggcgccctggacggcgagggccccaggggcatcggatctggctccggcagcggccccaagaaaaagagaaaagtctaagctgccttctgcggggcttgccttctggccatgcccttcttctctcccttgcacctgtacctcttggtctttgaataaagcctgagtaggaaggctagcaaaaaaaaaaaaaaaaaaaaaaaaaaaaaaaaaaaaaaaaaaaaaaaaaaaaaaaaaaaaaaaaaaaaaaaaaaaaaaaa

SEQ ID NO: 16603 - RNA, 9485 nt, synthetic construct
  source 1..9485: mol_type = other RNA
aggaaataagagagaaaagaagagtaagaagaaatataagagccaccatggcccctaagaagaagcgtaaagtgagccggatggaacgcctcgtctacgaggtgcggcagaagtgcagaaacatcgaggacatctgcatctcctgcggatctctgaacgtgaccctggagcacccactgttcatcggcggcatgtgccagaactgtaaaaactgttttctggagtgtgcctatcaatacgacgatgacggctaccagagctactgcaccatctgttgcggcggaagagaggtgctgatgtgtggaaataacaactgctgccggtgcttctgcgtggaatgcgtggacctgctggtgggccccggcgccgcccaggccgctattaaggaagatccttggaactgctacatgtgcggccacaagggcacatacggcctgctgagacggagagaggactggcctagcagactgcagatgttcttcgccaataaccacgaccaggagttcgacccccctaaggtgtaccctcccgtccccgccgagaagagaaagcccatccgggtcctgagcctgttcgatggcatcgccaccggtctgctggtgctgaaggacctgggcatccaggtggataggtacattgcctccgaggtgtgcgaggactccatcaccgtgggaatggtgcgtcatcagggcaagatcatgtacgtgggcgacgtgcggagcgtgacacagaagcatatccaggagtggggccctttcgacctggtgatcggcggcagcccttgcaatgacctgagcatcgtgaacccagcccggaagggcctgtacgagggaaccggcagactgttcttcgagttttacagactgctgcacgacgcccggcctaaggaaggcgacgaccggcccttcttttggctgttcgagaatgtggtggccatgggagtcagcgacaagcgggatattagccggttcctggagagcaaccccgtgatgatcgatgccaaggaagtgagcgccgcccaccgggccagatacttctggggcaatctgcctggcatgaacagacccctggccagcaccgtgaacgacaagctggagctgcaggagtgcctggagcacggccggatcgccaagttcagcaaggtgagaaccatcaccacccgaagcaacagcatcaaacaaggcaaggaccagcactttcctgtgttcatgaacgagaaggaggacatcctgtggtgtaccgagatggagagagtgttcgggttcccagtccactacacagatgtcagcaacatgtctagactggccagacagagactgctgggaagaagctggtccgtccctgtgatcagacacctgttcgcccctctgaaggagtacttcgcctgcgtgagcagcggcaacagcaacgccaacagccggggccccagcttctctagcggcctggtgccactgtccctgagagggagccacatgggccccatggagatctacaaaaccgtgagcgcctggaagcggcagcctgtgcgcgtgctgagcctgtttcggaatatcgataaagtcctgaaaagcctgggattcctggagagcggctctggctccggcggtggcaccctgaagtacgtggaggatgtgacaaacgtggtcagacgggatgtggagaagtggggccccttcgatctggtgtacggcagcacccaacccctgggcagctcttgtgaccggtgccctggctggtacatgtttcagttccaccggatcctgcagtacgccctgccgagacaggagtcccagcggccattcttttggattttcatggacaacttgctgctgaccgaggatgaccaggaaactaccactcggttcctgcagaccgaagccgtgaccctgcaggacgtgagaggccgggactaccagaacgccatgcgggtgtggtccaacatccctggactgaaaagcaagcacgcacctctgacccctaaagaagaggagtacctgcaggcccaggtgcggagcagaagcaagctggacgcccctaaggtggatctgctggtgaagaattgcctcctgcccctgagagagtacttcaagtatttcagccagaatagtctgcccctgggaggcagcggcggcggcgccctggtgacatttgaggacgtcgccgtgcggttcacccaggaggaatgggctctgctggatccttctcagaaaatcctgtaccgggacgtgatgagagagacataccggaatctgacctccgtgggcatcaactgggaatgttgggaccttgaagcctgcttcagaagcctgggaagaaacctgagagtgcaggtggtgaagagaaagtgcgagctgaccaacagcggcccctgcgccgagggcggcccaagcagcggcgcccctcctcccagcggcggcagcccagccggctccccaacctctaccgaggagggcacctctgagtccgccacccccgagagcggccctggcacctccaccgagcccagcgagggcagcgcacccggcagccctgccggcagccccacctccacagaggagggaaccagcaccgagcccagcgaaggcagcgccccaggcaccagcaccgagcctagtgagcaggagattaaacggatcaacaagatcagaagaagacttgtgaaagacagcaacaccaagaaggccggcaagacaggccccatgaaaaccctgctggttagagtgatgacacccgatctgagagagcggctggaaaacctgagaaagaagcctgaaaatatcccccagcccatcagcaatacatctagagccaacctgaataagctgctgaccgattacaccgaaatgaagaaggcgatcctgcatgtgtactgggaagagttccagaaggaccctgtgggcctgatgagccgggtggcccagcctgccagcaagaagatcgatcagaacaagctgaaacctgagatggacgagaagggcaacctgaccaccgccggctttgcctgctctcagtgtggccagcccctgttcgtgtacaagctggagcaggtgtctgagaagggcaaggcttacaccaactacttcggacggtgcaatgtggccgagcacgaaaagctgatcctgctggcccagctgaagcccgagaaggatagcgacgaagccgtgacatatagcctgggaaagtttgggcagagggccctggatttctacagcattcatgtgaccaaggagtccacccaccccgtgaagcccctggcccagatcgccggaaacagatacgcctccggacctgtgggaaaggccctgagcgacgcatgtatgggcacaatcgcctccttcctgtctaagtaccaggacatcatcatcgaacaccagaaggtggtgaagggcaaccagaagagactggagagcctgcgggagctggccggcaaggaaaacctggaataccctagcgtgaccctgccacctcagcctcacaccaaggagggcgttgatgcctacaacgaagtgatcgcccgggtgcgaatgtgggtgaacctgaacctgtggcagaagctgaagctaagcagagatgatgccaagcctctgctgagactgaagggattcccttcctttcctctggtcgagagacaggccaacgaagtggactggtgggacatggtgtgtaacgtgaagaagctgatcaacgagaaaaaggaggatggcaaggtgttttggcagaatctggctggctacaagagacaggaagccctgagaccatacctgagcagcgaggaagatcggaagaagggaaagaaattcgctcggtaccagctgggcgacctgctgctgcacctggaaaagaagcacggcgaggactggggaaaggtgtacgacgaggcctgggagcggattgacaagaaagtggaaggcctgagcaagcacatcaagctggaagaggaacggagaagcgaggacgcccagagcaaggccgccctgaccgactggctgcgggctaaggccagcttcgtgatcgagggcctgaaggaggccgacaaggacgagttctgcagatgcgagctgaagctgcagaagtggtacggggacctgcggggaaagcccttcgccatcgaagccgagaacagcatcctggacatcagcggcttcagcaagcagtacaactgtgccttcatctggcagaaggacggcgtgaagaagctgaacctgtacctgatcatcaactacttcaagggcggcaagctgcggttcaagaagatcaaacctgaagccttcgaagccaacagattctacaccgtgatcaacaaaaagagcggcgagatcgtgcccatggaggtgaacttcaacttcgacgaccccaacctgatcatcctgcctctggcctttggcaagagacagggcagagaattcatctggaacgacctgctgtccctggaaaccggcagcctgaagctggccaacggaagagtgatcgagaagacactgtacaacagaagaacccggcaggatgagcctgccctgttcgtggccctgaccttcgagcggcgggaggtcctggactcctccaatatcaaaccaatgaacctgatcggcgtggcaagaggcgaaaacatccccgccgtgatcgccctgaccgaccccgagggctgcccactgagccggtttaaggatagcctgggaaacccaacccacatcctgagaatcggcgagagctataaggagaagcagcggaccatccaggccaagaaggaggtggagcagcggagagccggcggctacagccggaagtacgccagcaaagccaagaatctggcagacgatatggtgagaaacaccgctagagatctgctgtactacgccgtgacccaggatgccatgctgatcttcgccaacctgagccggggcttcggccggcagggcaagcggaccttcatggccgagagacagtacacacggatggaggactggctgaccgccaagctggcctacgagggcctgagcaagacctacctgtccaagacactggcccagtacacctccaagacatgcagcaactgtgggtttaccatcaccagcgccgactacgacagggtgctggagaagctgaagaagacagcaacaggctggatgaccacaattaacggcaaggagctgaaggtggagggccagattacctactacaacagatacaagagacagaacgtagtcaaggacctgtccgtcgagctggatagactgagcgaagaatctgtgaacaacgacatctcctcctggacaaagggcagaagcggagaagctctgagcctcctgaagaaaagattctcccatagacccgtgcaggagaagttcgtgtgcctgaactgcggcttcgagacacacgcagccgagcaagccgccctgaacatcgccagatcctggctgttcctgcggagccaggagtacaagaaataccagacaaacaagacaaccggcaacaccgataagagagccttcgtcgagacctggcagtccttttaccggaagaagcttaaggaggtgtggaaacctgccgtgcggtctggcggatctggcggaggctccatgggccccctgaccatcagggacgtgaccgtggagttcagcctggaggagtggcactgcctggacaccgcccagcagaacctgtacagggacgtgatgctggagaactacaggaacctggtgttcctgggcatcgccgtgagcaagcccgacctgatcacctgcctggagcagggcaaggagccctgcaacatgaagaggcacgagatggtggccaagccccccgtgatgtgcagccacatcggcggcccaagcagcggcgcccctcctcccagcggcggcagcccagccggctccccaacctctaccgaggagggcacctctgagtccgccacccccgagagcggccctggcacctccaccgagcccagcgagggcagcgcacccggcagccctgccggcagccccacctccacagaggagggaaccagcaccgagcccagcgaaggcagcgccccaggcaccagcaccgagcctagtgagcaggagattaaacggatcaacaagatcagaagaagacttgtgaaagacagcaacaccaagaaggccggcaagacaggccccatgaaaaccctgctggttagagtgatgacacccgatctgagagagcggctggaaaacctgagaaagaagcctgaaaatatcccccagcccatcagcaatacatctagagccaacctgaataagctgctgaccgattacaccgaaatgaagaaggcgatcctgcatgtgtactgggaagagttccagaaggaccctgtgggcctgatgagccgggtggcccagcctgccagcaagaagatcgatcagaacaagctgaaacctgagatggacgagaagggcaacctgaccaccgccggctttgcctgctctcagtgtggccagcccctgttcgtgtacaagctggagcaggtgtctgagaagggcaaggcttacaccaactacttcggacggtgcaatgtggccgagcacgaaaagctgatcctgctggcccagctgaagcccgagaaggatagcgacgaagccgtgacatatagcctgggaaagtttgggcagagggccctggatttctacagcattcatgtgaccaaggagtccacccaccccgtgaagcccctggcccagatcgccggaaacagatacgcctccggacctgtgggaaaggccctgagcgacgcatgtatgggcacaatcgcctccttcctgtctaagtaccaggacatcatcatcgaacaccagaaggtggtgaagggcaaccagaagagactggagagcctgcgggagctggccggcaaggaaaacctggaataccctagcgtgaccctgccacctcagcctcacaccaaggagggcgttgatgcctacaacgaagtgatcgcccgggtgcgaatgtgggtgaacctgaacctgtggcagaagctgaagctaagcagagatgatgccaagcctctgctgagactgaagggattcccttcctttcctctggtcgagagacaggccaacgaagtggactggtgggacatggtgtgtaacgtgaagaagctgatcaacgagaaaaaggaggatggcaaggtgttttggcagaatctggctggctacaagagacaggaagccctgagaccatacctgagcagcgaggaagatcggaagaagggaaagaaattcgctcggtaccagctgggcgacctgctgctgcacctggaaaagaagcacggcgaggactggggaaaggtgtacgacgaggcctgggagcggattgacaagaaagtggaaggcctgagcaagcacatcaagctggaagaggaacggagaagcgaggacgcccagagcaaggccgccctgaccgactggctgcgggctaaggccagcttcgtgatcgagggcctgaaggaggccgacaaggacgagttctgcagatgcgagctgaagctgcagaagtggtacggggacctgcggggaaagcccttcgccatcgaagccgagaacagcatcctggacatcagcggcttcagcaagcagtacaactgtgccttcatctggcagaaggacggcgtgaagaagctgaacctgtacctgatcatcaactacttcaagggcggcaagctgcggttcaagaagatcaaacctgaagccttcgaagccaacagattctacaccgtgatcaacaaaaagagcggcgagatcgtgcccatggaggtgaacttcaacttcgacgaccccaacctgatcatcctgcctctggcctttggcaagagacagggcagagaattcatctggaacgacctgctgtccctggaaaccggcagcctgaagctggccaacggaagagtgatcgagaagacactgtacaacagaagaacccggcaggatgagcctgccctgttcgtggccctgaccttcgagcggcgggaggtcctggactcctccaatatcaaaccaatgaacctgatcggcgtggcaagaggcgaaaacatccccgccgtgatcgccctgaccgaccccgagggctgcccactgagccggtttaaggatagcctgggaaacccaacccacatcctgagaatcggcgagagctataaggagaagcagcggaccatccaggccaagaaggaggtggagcagcggagagccggcggctacagccggaagtacgccagcaaagccaagaatctggcagacgatatggtgagaaacaccgctagagatctgctgtactacgccgtgacccaggatgccatgctgatcttcgccaacctgagccggggcttcggccggcagggcaagcggaccttcatggccgagagacagtacacacggatggaggactggctgaccgccaagctggcctacgagggcctgagcaagacctacctgtccaagacactggcccagtacacctccaagacatgcagcaactgtgggtttaccatcaccagcgccgactacgacagggtgctggagaagctgaagaagacagcaacaggctggatgaccacaattaacggcaaggagctgaaggtggagggccagattacctactacaacagatacaagagacagaacgtagtcaaggacctgtccgtcgagctggatagactgagcgaagaatctgtgaacaacgacatctcctcctggacaaagggcagaagcggagaagctctgagcctcctgaagaaaagattctcccatagacccgtgcaggagaagttcgtgtgcctgaactgcggcttcgagacacacgcagccgagcaagccgccctgaacatcgccagatcctggctgttcctgcggagccaggagtacaagaaataccagacaaacaagacaaccggcaacaccgataagagagccttcgtcgagacctggcagtccttttaccggaagaagcttaaggaggtgtggaaacctgccgtgcggtctggcggatctggcggaggctcctatgggccccctgaccatcagggacgtgaccgtggagttcagcctggaggagtggcactgcctggacaccgcccagcagaacctgtacagggacgtgatgctggagaactacaggaacctggtgttcctgggcatcgccgtgagcaagcccgacctgatcacctgcctggagcagggcaaggagccctgcaacatgaagaggcacgagatggtggccaagccccccgtgatgtgcagccacatcggatctggctccggcagcggccccaagaaaaagagaaaagtctaagctgccttctgcggggcttgccttctggccatgcccttcttctctcccttgcacctgtacctcttggtctttgaataaagcctgagtaggaaggctagcaaaaaaaaaaaaaaaaaaaaaaaaaaaaaaaaaaaaaaaaaaaaaaaaaaaaaaaaaaaaaaaaaaaaaaaaaaaaaaaa

SEQ ID NO: 16604 - RNA, 9485 nt, synthetic construct
  source 1..9485: mol_type = other RNA
aggaaataagagagaaaagaagagtaagaagaaatataagagccaccatggcccctaagaagaagcgtaaagtgagccggatggaacgcctcgtctacgaggtgcggcagaagtgcagaaacatcgaggacatctgcatctcctgcggatctctgaacgtgaccctggagcacccactgttcatcggcggcatgtgccagaactgtaaaaactgttttctggagtgtgcctatcaatacgacgatgacggctaccagagctactgcaccatctgttgcggcggaagagaggtgctgatgtgtggaaataacaactgctgccggtgcttctgcgtggaatgcgtggacctgctggtgggccccggcgccgcccaggccgctattaaggaagatccttggaactgctacatgtgcggccacaagggcacatacggcctgctgagacggagagaggactggcctagcagactgcagatgttcttcgccaataaccacgaccaggagttcgacccccctaaggtgtaccctcccgtccccgccgagaagagaaagcccatccgggtcctgagcctgttcgatggcatcgccaccggtctgctggtgctgaaggacctgggcatccaggtggataggtacattgcctccgaggtgtgcgaggactccatcaccgtgggaatggtgcgtcatcagggcaagatcatgtacgtgggcgacgtgcggagcgtgacacagaagcatatccaggagtggggccctttcgacctggtgatcggcggcagcccttgcaatgacctgagcatcgtgaacccagcccggaagggcctgtacgagggaaccggcagactgttcttcgagttttacagactgctgcacgacgcccggcctaaggaaggcgacgaccggcccttcttttggctgttcgagaatgtggtggccatgggagtcagcgacaagcgggatattagccggttcctggagagcaaccccgtgatgatcgatgccaaggaagtgagcgccgcccaccgggccagatacttctggggcaatctgcctggcatgaacagacccctggccagcaccgtgaacgacaagctggagctgcaggagtgcctggagcacggccggatcgccaagttcagcaaggtgagaaccatcaccacccgaagcaacagcatcaaacaaggcaaggaccagcactttcctgtgttcatgaacgagaaggaggacatcctgtggtgtaccgagatggagagagtgttcgggttcccagtccactacacagatgtcagcaacatgtctagactggccagacagagactgctgggaagaagctggtccgtccctgtgatcagacacctgttcgcccctctgaaggagtacttcgcctgcgtgagcagcggcaacagcaacgccaacagccggggccccagcttctctagcggcctggtgccactgtccctgagagggagccacatgggccccatggagatctacaaaaccgtgagcgcctggaagcggcagcctgtgcgcgtgctgagcctgtttcggaatatcgataaagtcctgaaaagcctgggattcctggagagcggctctggctccggcggtggcaccctgaagtacgtggaggatgtgacaaacgtggtcagacgggatgtggagaagtggggccccttcgatctggtgtacggcagcacccaacccctgggcagctcttgtgaccggtgccctggctggtacatgtttcagttccaccggatcctgcagtacgccctgccgagacaggagtcccagcggccattcttttggattttcatggacaacttgctgctgaccgaggatgaccaggaaactaccactcggttcctgcagaccgaagccgtgaccctgcaggacgtgagaggccgggactaccagaacgccatgcgggtgtggtccaacatccctggactgaaaagcaagcacgcacctctgacccctaaagaagaggagtacctgcaggcccaggtgcggagcagaagcaagctggacgcccctaaggtggatctgctggtgaagaattgcctcctgcccctgagagagtacttcaagtatttcagccagaatagtctgcccctgggaggcagcggcggcggcgccctggtgacatttgaggacgtcgccgtgcggttcacccaggaggaatgggctctgctggatccttctcagaaaatcctgtaccgggacgtgatgagagagacataccggaatctgacctccgtgggcatcaactgggaatgttgggaccttgaagcctgcttcagaagcctgggaagaaacctgagagtgcaggtggtgaagagaaagtgcgagctgaccaacagcggcccctgcgccgagggcggcccaagcagcggcgcccctcctcccagcggcggcagcccagccggctccccaacctctaccgaggagggcacctctgagtccgccacccccgagagcggccctggcacctccaccgagcccagcgagggcagcgcacccggcagccctgccggcagccccacctccacagaggagggaaccagcaccgagcccagcgaaggcagcgccccaggcaccagcaccgagcctagtgagcaggagattaaacggatcaacaagatcagaagaagacttgtgaaagacagcaacaccaagaaggccggcaagacaggccccatgaaaaccctgctggttagagtgatgacacccgatctgagagagcggctggaaaacctgagaaagaagcctgaaaatatcccccagcccatcagcaatacatctagagccaacctgaataagctgctgaccgattacaccgaaatgaagaaggcgatcctgcatgtgtactgggaagagttccagaaggaccctgtgggcctgatgagccgggtggcccagcctgccagcaagaagatcgatcagaacaagctgaaacctgagatggacgagaagggcaacctgaccaccgccggctttgcctgctctcagtgtggccagcccctgttcgtgtacaagctggagcaggtgtctgagaagggcaaggcttacaccaactacttcggacggtgcaatgtggccgagcacgaaaagctgatcctgctggcccagctgaagcccgagaaggatagcgacgaagccgtgacatatagcctgggaaagtttgggcagagggccctggatttctacagcattcatgtgaccaaggagtccacccaccccgtgaagcccctggcccagatcgccggaaacagatacgcctccggacctgtgggaaaggccctgagcgacgcatgtatgggcacaatcgcctccttcctgtctaagtaccaggacatcatcatcgaacaccagaaggtggtgaagggcaaccagaagagactggagagcctgcgggagctggccggcaaggaaaacctggaataccctagcgtgaccctgccacctcagcctcacaccaaggagggcgttgatgcctacaacgaagtgatcgcccgggtgcgaatgtgggtgaacctgaacctgtggcagaagctgaagctaagcagagatgatgccaagcctctgctgagactgaagggattcccttcctttcctctggtcgagagacaggccaacgaagtggactggtgggacatggtgtgtaacgtgaagaagctgatcaacgagaaaaaggaggatggcaaggtgttttggcagaatctggctggctacaagagacaggaagccctgagaccatacctgagcagcgaggaagatcggaagaagggaaagaaattcgctcggtaccagctgggcgacctgctgctgcacctggaaaagaagcacggcgaggactggggaaaggtgtacgacgaggcctgggagcggattgacaagaaagtggaaggcctgagcaagcacatcaagctggaagaggaacggagaagcgaggacgcccagagcaaggccgccctgaccgactggctgcgggctaaggccagcttcgtgatcgagggcctgaaggaggccgacaaggacgagttctgcagatgcgagctgaagctgcagaagtggtacggggacctgcggggaaagcccttcgccatcgaagccgagaacagcatcctggacatcagcggcttcagcaagcagtacaactgtgccttcatctggcagaaggacggcgtgaagaagctgaacctgtacctgatcatcaactacttcaagggcggcaagctgcggttcaagaagatcaaacctgaagccttcgaagccaacagattctacaccgtgatcaacaaaaagagcggcgagatcgtgcccatggaggtgaacttcaacttcgacgaccccaacctgatcatcctgcctctggcctttggcaagagacagggcagagaattcatctggaacgacctgctgtccctggaaaccggcagcctgaagctggccaacggaagagtgatcgagaagacactgtacaacagaagaacccggcaggatgagcctgccctgttcgtggccctgaccttcgagcggcgggaggtcctggactcctccaatatcaaaccaatgaacctgatcggcgtggcaagaggcgaaaacatccccgccgtgatcgccctgaccgaccccgagggctgcccactgagccggtttaaggatagcctgggaaacccaacccacatcctgagaatcggcgagagctataaggagaagcagcggaccatccaggccaagaaggaggtggagcagcggagagccggcggctacagccggaagtacgccagcaaagccaagaatctggcagacgatatggtgagaaacaccgctagagatctgctgtactacgccgtgacccaggatgccatgctgatcttcgccaacctgagccggggcttcggccggcagggcaagcggaccttcatggccgagagacagtacacacggatggaggactggctgaccgccaagctggcctacgagggcctgagcaagacctacctgtccaagacactggcccagtacacctccaagacatgcagcaactgtgggtttaccatcaccagcgccgactacgacagggtgctggagaagctgaagaagacagcaacaggctggatgaccacaattaacggcaaggagctgaaggtggagggccagattacctactacaacagatacaagagacagaacgtagtcaaggacctgtccgtcgagctggatagactgagcgaagaatctgtgaacaacgacatctcctcctggacaaagggcagaagcggagaagctctgagcctcctgaagaaaagattctcccatagacccgtgcaggagaagttcgtgtgcctgaactgcggcttcgagacacacgcagccgagcaagccgccctgaacatcgccagatcctggctgttcctgcggagccaggagtacaagaaataccagacaaacaagacaaccggcaacaccgataagagagccttcgtcgagacctggcagtccttttaccggaagaagcttaaggaggtgtggaaacctgccgtgcggtctggcggatctggcggaggctcccagccccaggaggccatgaccttcaaggacgtggaggtgaccttcagccaggacgagtggggcagcctggacagcgcccagaggaacctgtacagggacgtgatgctggagaactacaggaacatggtgagcctggtgggccccttcaccaagcccgccctgatcagctggctggaggccagggagccctggggcctgaacgtgcaggccgcccagcccaagggcaaccccggcgccgcccccggcggcccaagcagcggcgcccctcctcccagcggcggcagcccagccggctccccaacctctaccgaggagggcacctctgagtccgccacccccgagagcggccctggcacctccaccgagcccagcgagggcagcgcacccggcagccctgccggcagccccacctccacagaggagggaaccagcaccgagcccagcgaaggcagcgccccaggcaccagcaccgagcctagtgagcaggagattaaacggatcaacaagatcagaagaagacttgtgaaagacagcaacaccaagaaggccggcaagacaggccccatgaaaaccctgctggttagagtgatgacacccgatctgagagagcggctggaaaacctgagaaagaagcctgaaaatatcccccagcccatcagcaatacatctagagccaacctgaataagctgctgaccgattacaccgaaatgaagaaggcgatcctgcatgtgtactgggaagagttccagaaggaccctgtgggcctgatgagccgggtggcccagcctgccagcaagaagatcgatcagaacaagctgaaacctgagatggacgagaagggcaacctgaccaccgccggctttgcctgctctcagtgtggccagcccctgttcgtgtacaagctggagcaggtgtctgagaagggcaaggcttacaccaactacttcggacggtgcaatgtggccgagcacgaaaagctgatcctgctggcccagctgaagcccgagaaggatagcgacgaagccgtgacatatagcctgggaaagtttgggcagagggccctggatttctacagcattcatgtgaccaaggagtccacccaccccgtgaagcccctggcccagatcgccggaaacagatacgcctccggacctgtgggaaaggccctgagcgacgcatgtatgggcacaatcgcctccttcctgtctaagtaccaggacatcatcatcgaacaccagaaggtggtgaagggcaaccagaagagactggagagcctgcgggagctggccggcaaggaaaacctggaataccctagcgtgaccctgccacctcagcctcacaccaaggagggcgttgatgcctacaacgaagtgatcgcccgggtgcgaatgtgggtgaacctgaacctgtggcagaagctgaagctaagcagagatgatgccaagcctctgctgagactgaagggattcccttcctttcctctggtcgagagacaggccaacgaagtggactggtgggacatggtgtgtaacgtgaagaagctgatcaacgagaaaaaggaggatggcaaggtgttttggcagaatctggctggctacaagagacaggaagccctgagaccatacctgagcagcgaggaagatcggaagaagggaaagaaattcgctcggtaccagctgggcgacctgctgctgcacctggaaaagaagcacggcgaggactggggaaaggtgtacgacgaggcctgggagcggattgacaagaaagtggaaggcctgagcaagcacatcaagctggaagaggaacggagaagcgaggacgcccagagcaaggccgccctgaccgactggctgcgggctaaggccagcttcgtgatcgagggcctgaaggaggccgacaaggacgagttctgcagatgcgagctgaagctgcagaagtggtacggggacctgcggggaaagcccttcgccatcgaagccgagaacagcatcctggacatcagcggcttcagcaagcagtacaactgtgccttcatctggcagaaggacggcgtgaagaagctgaacctgtacctgatcatcaactacttcaagggcggcaagctgcggttcaagaagatcaaacctgaagccttcgaagccaacagattctacaccgtgatcaacaaaaagagcggcgagatcgtgcccatggaggtgaacttcaacttcgacgaccccaacctgatcatcctgcctctggcctttggcaagagacagggcagagaattcatctggaacgacctgctgtccctggaaaccggcagcctgaagctggccaacggaagagtgatcgagaagacactgtacaacagaagaacccggcaggatgagcctgccctgttcgtggccctgaccttcgagcggcgggaggtcctggactcctccaatatcaaaccaatgaacctgatcggcgtggcaagaggcgaaaacatccccgccgtgatcgccctgaccgaccccgagggctgcccactgagccggtttaaggatagcctgggaaacccaacccacatcctgagaatcggcgagagctataaggagaagcagcggaccatccaggccaagaaggaggtggagcagcggagagccggcggctacagccggaagtacgccagcaaagccaagaatctggcagacgatatggtgagaaacaccgctagagatctgctgtactacgccgtgacccaggatgccatgctgatcttcgccaacctgagccggggcttcggccggcagggcaagcggaccttcatggccgagagacagtacacacggatggaggactggctgaccgccaagctggcctacgagggcctgagcaagacctacctgtccaagacactggcccagtacacctccaagacatgcagcaactgtgggtttaccatcaccagcgccgactacgacagggtgctggagaagctgaagaagacagcaacaggctggatgaccacaattaacggcaaggagctgaaggtggagggccagattacctactacaacagatacaagagacagaacgtagtcaaggacctgtccgtcgagctggatagactgagcgaagaatctgtgaacaacgacatctcctcctggacaaagggcagaagcggagaagctctgagcctcctgaagaaaagattctcccatagacccgtgcaggagaagttcgtgtgcctgaactgcggcttcgagacacacgcagccgagcaagccgccctgaacatcgccagatcctggctgttcctgcggagccaggagtacaagaaataccagacaaacaagacaaccggcaacaccgataagagagccttcgtcgagacctggcagtccttttaccggaagaagcttaaggaggtgtggaaacctgccgtgcggtctggcggatctggcggaggctcctcagccccaggaggccatgaccttcaaggacgtggaggtgaccttcagccaggacgagtggggcagcctggacagcgcccagaggaacctgtacagggacgtgatgctggagaactacaggaacatggtgagcctggtgggccccttcaccaagcccgccctgatcagctggctggaggccagggagccctggggcctgaacgtgcaggccgcccagcccaagggcaaccccggcgccgcccccggatctggctccggcagcggccccaagaaaaagagaaaagtctaagctgccttctgcggggcttgccttctggccatgcccttcttctctcccttgcacctgtacctcttggtctttgaataaagcctgagtaggaaggctagcaaaaaaaaaaaaaaaaaaaaaaaaaaaaaaaaaaaaaaaaaaaaaaaaaaaaaaaaaaaaaaaaaaaaaaaaaaaaaaaa

SEQ ID NO: 16605 - RNA, 9485 nt, synthetic construct
  source 1..9485: mol_type = other RNA
aggaaataagagagaaaagaagagtaagaagaaatataagagccaccatggcccctaagaagaagcgtaaagtgagccggatggaacgcctcgtctacgaggtgcggcagaagtgcagaaacatcgaggacatctgcatctcctgcggatctctgaacgtgaccctggagcacccactgttcatcggcggcatgtgccagaactgtaaaaactgttttctggagtgtgcctatcaatacgacgatgacggctaccagagctactgcaccatctgttgcggcggaagagaggtgctgatgtgtggaaataacaactgctgccggtgcttctgcgtggaatgcgtggacctgctggtgggccccggcgccgcccaggccgctattaaggaagatccttggaactgctacatgtgcggccacaagggcacatacggcctgctgagacggagagaggactggcctagcagactgcagatgttcttcgccaataaccacgaccaggagttcgacccccctaaggtgtaccctcccgtccccgccgagaagagaaagcccatccgggtcctgagcctgttcgatggcatcgccaccggtctgctggtgctgaaggacctgggcatccaggtggataggtacattgcctccgaggtgtgcgaggactccatcaccgtgggaatggtgcgtcatcagggcaagatcatgtacgtgggcgacgtgcggagcgtgacacagaagcatatccaggagtggggccctttcgacctggtgatcggcggcagcccttgcaatgacctgagcatcgtgaacccagcccggaagggcctgtacgagggaaccggcagactgttcttcgagttttacagactgctgcacgacgcccggcctaaggaaggcgacgaccggcccttcttttggctgttcgagaatgtggtggccatgggagtcagcgacaagcgggatattagccggttcctggagagcaaccccgtgatgatcgatgccaaggaagtgagcgccgcccaccgggccagatacttctggggcaatctgcctggcatgaacagacccctggccagcaccgtgaacgacaagctggagctgcaggagtgcctggagcacggccggatcgccaagttcagcaaggtgagaaccatcaccacccgaagcaacagcatcaaacaaggcaaggaccagcactttcctgtgttcatgaacgagaaggaggacatcctgtggtgtaccgagatggagagagtgttcgggttcccagtccactacacagatgtcagcaacatgtctagactggccagacagagactgctgggaagaagctggtccgtccctgtgatcagacacctgttcgcccctctgaaggagtacttcgcctgcgtgagcagcggcaacagcaacgccaacagccggggccccagcttctctagcggcctggtgccactgtccctgagagggagccacatgggccccatggagatctacaaaaccgtgagcgcctggaagcggcagcctgtgcgcgtgctgagcctgtttcggaatatcgataaagtcctgaaaagcctgggattcctggagagcggctctggctccggcggtggcaccctgaagtacgtggaggatgtgacaaacgtggtcagacgggatgtggagaagtggggccccttcgatctggtgtacggcagcacccaacccctgggcagctcttgtgaccggtgccctggctggtacatgtttcagttccaccggatcctgcagtacgccctgccgagacaggagtcccagcggccattcttttggattttcatggacaacttgctgctgaccgaggatgaccaggaaactaccactcggttcctgcagaccgaagccgtgaccctgcaggacgtgagaggccgggactaccagaacgccatgcgggtgtggtccaacatccctggactgaaaagcaagcacgcacctctgacccctaaagaagaggagtacctgcaggcccaggtgcggagcagaagcaagctggacgcccctaaggtggatctgctggtgaagaattgcctcctgcccctgagagagtacttcaagtatttcagccagaatagtctgcccctgggaggcagcggcggcggcgccctggtgacatttgaggacgtcgccgtgcggttcacccaggaggaatgggctctgctggatccttctcagaaaatcctgtaccgggacgtgatgagagagacataccggaatctgacctccgtgggcatcaactgggaatgttgggaccttgaagcctgcttcagaagcctgggaagaaacctgagagtgcaggtggtgaagagaaagtgcgagctgaccaacagcggcccctgcgccgagggcggcccaagcagcggcgcccctcctcccagcggcggcagcccagccggctccccaacctctaccgaggagggcacctctgagtccgccacccccgagagcggccctggcacctccaccgagcccagcgagggcagcgcacccggcagccctgccggcagccccacctccacagaggagggaaccagcaccgagcccagcgaaggcagcgccccaggcaccagcaccgagcctagtgagcaggagattaaacggatcaacaagatcagaagaagacttgtgaaagacagcaacaccaagaaggccggcaagacaggccccatgaaaaccctgctggttagagtgatgacacccgatctgagagagcggctggaaaacctgagaaagaagcctgaaaatatcccccagcccatcagcaatacatctagagccaacctgaataagctgctgaccgattacaccgaaatgaagaaggcgatcctgcatgtgtactgggaagagttccagaaggaccctgtgggcctgatgagccgggtggcccagcctgccagcaagaagatcgatcagaacaagctgaaacctgagatggacgagaagggcaacctgaccaccgccggctttgcctgctctcagtgtggccagcccctgttcgtgtacaagctggagcaggtgtctgagaagggcaaggcttacaccaactacttcggacggtgcaatgtggccgagcacgaaaagctgatcctgctggcccagctgaagcccgagaaggatagcgacgaagccgtgacatatagcctgggaaagtttgggcagagggccctggatttctacagcattcatgtgaccaaggagtccacccaccccgtgaagcccctggcccagatcgccggaaacagatacgcctccggacctgtgggaaaggccctgagcgacgcatgtatgggcacaatcgcctccttcctgtctaagtaccaggacatcatcatcgaacaccagaaggtggtgaagggcaaccagaagagactggagagcctgcgggagctggccggcaaggaaaacctggaataccctagcgtgaccctgccacctcagcctcacaccaaggagggcgttgatgcctacaacgaagtgatcgcccgggtgcgaatgtgggtgaacctgaacctgtggcagaagctgaagctaagcagagatgatgccaagcctctgctgagactgaagggattcccttcctttcctctggtcgagagacaggccaacgaagtggactggtgggacatggtgtgtaacgtgaagaagctgatcaacgagaaaaaggaggatggcaaggtgttttggcagaatctggctggctacaagagacaggaagccctgagaccatacctgagcagcgaggaagatcggaagaagggaaagaaattcgctcggtaccagctgggcgacctgctgctgcacctggaaaagaagcacggcgaggactggggaaaggtgtacgacgaggcctgggagcggattgacaagaaagtggaaggcctgagcaagcacatcaagctggaagaggaacggagaagcgaggacgcccagagcaaggccgccctgaccgactggctgcgggctaaggccagcttcgtgatcgagggcctgaaggaggccgacaaggacgagttctgcagatgcgagctgaagctgcagaagtggtacggggacctgcggggaaagcccttcgccatcgaagccgagaacagcatcctggacatcagcggcttcagcaagcagtacaactgtgccttcatctggcagaaggacggcgtgaagaagctgaacctgtacctgatcatcaactacttcaagggcggcaagctgcggttcaagaagatcaaacctgaagccttcgaagccaacagattctacaccgtgatcaacaaaaagagcggcgagatcgtgcccatggaggtgaacttcaacttcgacgaccccaacctgatcatcctgcctctggcctttggcaagagacagggcagagaattcatctggaacgacctgctgtccctggaaaccggcagcctgaagctggccaacggaagagtgatcgagaagacactgtacaacagaagaacccggcaggatgagcctgccctgttcgtggccctgaccttcgagcggcgggaggtcctggactcctccaatatcaaaccaatgaacctgatcggcgtggcaagaggcgaaaacatccccgccgtgatcgccctgaccgaccccgagggctgcccactgagccggtttaaggatagcctgggaaacccaacccacatcctgagaatcggcgagagctataaggagaagcagcggaccatccaggccaagaaggaggtggagcagcggagagccggcggctacagccggaagtacgccagcaaagccaagaatctggcagacgatatggtgagaaacaccgctagagatctgctgtactacgccgtgacccaggatgccatgctgatcttcgccaacctgagccggggcttcggccggcagggcaagcggaccttcatggccgagagacagtacacacggatggaggactggctgaccgccaagctggcctacgagggcctgagcaagacctacctgtccaagacactggcccagtacacctccaagacatgcagcaactgtgggtttaccatcaccagcgccgactacgacagggtgctggagaagctgaagaagacagcaacaggctggatgaccacaattaacggcaaggagctgaaggtggagggccagattacctactacaacagatacaagagacagaacgtagtcaaggacctgtccgtcgagctggatagactgagcgaagaatctgtgaacaacgacatctcctcctggacaaagggcagaagcggagaagctctgagcctcctgaagaaaagattctcccatagacccgtgcaggagaagttcgtgtgcctgaactgcggcttcgagacacacgcagccgagcaagccgccctgaacatcgccagatcctggctgttcctgcggagccaggagtacaagaaataccagacaaacaagacaaccggcaacaccgataagagagccttcgtcgagacctggcagtccttttaccggaagaagcttaaggaggtgtggaaacctgccgtgcggtctggcggatctggcggaggctccatgaacagcgaggtgatcgtggaccccatccagggccaggtgaacttcgaggacgtgttcgtgtacttcagccaggaggagtgggtgctgctggacgaggcccagaggctgctgtacagggacgtgatgctggagaacttcgccctgatggccagcctgggccacaccagcttcatgagccacatcggcgccagcctggtgatgggcagcgagccctgggtgcccgactgggtggacatgatcggcggcccaagcagcggcgcccctcctcccagcggcggcagcccagccggctccccaacctctaccgaggagggcacctctgagtccgccacccccgagagcggccctggcacctccaccgagcccagcgagggcagcgcacccggcagccctgccggcagccccacctccacagaggagggaaccagcaccgagcccagcgaaggcagcgccccaggcaccagcaccgagcctagtgagcaggagattaaacggatcaacaagatcagaagaagacttgtgaaagacagcaacaccaagaaggccggcaagacaggccccatgaaaaccctgctggttagagtgatgacacccgatctgagagagcggctggaaaacctgagaaagaagcctgaaaatatcccccagcccatcagcaatacatctagagccaacctgaataagctgctgaccgattacaccgaaatgaagaaggcgatcctgcatgtgtactgggaagagttccagaaggaccctgtgggcctgatgagccgggtggcccagcctgccagcaagaagatcgatcagaacaagctgaaacctgagatggacgagaagggcaacctgaccaccgccggctttgcctgctctcagtgtggccagcccctgttcgtgtacaagctggagcaggtgtctgagaagggcaaggcttacaccaactacttcggacggtgcaatgtggccgagcacgaaaagctgatcctgctggcccagctgaagcccgagaaggatagcgacgaagccgtgacatatagcctgggaaagtttgggcagagggccctggatttctacagcattcatgtgaccaaggagtccacccaccccgtgaagcccctggcccagatcgccggaaacagatacgcctccggacctgtgggaaaggccctgagcgacgcatgtatgggcacaatcgcctccttcctgtctaagtaccaggacatcatcatcgaacaccagaaggtggtgaagggcaaccagaagagactggagagcctgcgggagctggccggcaaggaaaacctggaataccctagcgtgaccctgccacctcagcctcacaccaaggagggcgttgatgcctacaacgaagtgatcgcccgggtgcgaatgtgggtgaacctgaacctgtggcagaagctgaagctaagcagagatgatgccaagcctctgctgagactgaagggattcccttcctttcctctggtcgagagacaggccaacgaagtggactggtgggacatggtgtgtaacgtgaagaagctgatcaacgagaaaaaggaggatggcaaggtgttttggcagaatctggctggctacaagagacaggaagccctgagaccatacctgagcagcgaggaagatcggaagaagggaaagaaattcgctcggtaccagctgggcgacctgctgctgcacctggaaaagaagcacggcgaggactggggaaaggtgtacgacgaggcctgggagcggattgacaagaaagtggaaggcctgagcaagcacatcaagctggaagaggaacggagaagcgaggacgcccagagcaaggccgccctgaccgactggctgcgggctaaggccagcttcgtgatcgagggcctgaaggaggccgacaaggacgagttctgcagatgcgagctgaagctgcagaagtggtacggggacctgcggggaaagcccttcgccatcgaagccgagaacagcatcctggacatcagcggcttcagcaagcagtacaactgtgccttcatctggcagaaggacggcgtgaagaagctgaacctgtacctgatcatcaactacttcaagggcggcaagctgcggttcaagaagatcaaacctgaagccttcgaagccaacagattctacaccgtgatcaacaaaaagagcggcgagatcgtgcccatggaggtgaacttcaacttcgacgaccccaacctgatcatcctgcctctggcctttggcaagagacagggcagagaattcatctggaacgacctgctgtccctggaaaccggcagcctgaagctggccaacggaagagtgatcgagaagacactgtacaacagaagaacccggcaggatgagcctgccctgttcgtggccctgaccttcgagcggcgggaggtcctggactcctccaatatcaaaccaatgaacctgatcggcgtggcaagaggcgaaaacatccccgccgtgatcgccctgaccgaccccgagggctgcccactgagccggtttaaggatagcctgggaaacccaacccacatcctgagaatcggcgagagctataaggagaagcagcggaccatccaggccaagaaggaggtggagcagcggagagccggcggctacagccggaagtacgccagcaaagccaagaatctggcagacgatatggtgagaaacaccgctagagatctgctgtactacgccgtgacccaggatgccatgctgatcttcgccaacctgagccggggcttcggccggcagggcaagcggaccttcatggccgagagacagtacacacggatggaggactggctgaccgccaagctggcctacgagggcctgagcaagacctacctgtccaagacactggcccagtacacctccaagacatgcagcaactgtgggtttaccatcaccagcgccgactacgacagggtgctggagaagctgaagaagacagcaacaggctggatgaccacaattaacggcaaggagctgaaggtggagggccagattacctactacaacagatacaagagacagaacgtagtcaaggacctgtccgtcgagctggatagactgagcgaagaatctgtgaacaacgacatctcctcctggacaaagggcagaagcggagaagctctgagcctcctgaagaaaagattctcccatagacccgtgcaggagaagttcgtgtgcctgaactgcggcttcgagacacacgcagccgagcaagccgccctgaacatcgccagatcctggctgttcctgcggagccaggagtacaagaaataccagacaaacaagacaaccggcaacaccgataagagagccttcgtcgagacctggcagtccttttaccggaagaagcttaaggaggtgtggaaacctgccgtgcggtctggcggatctggcggaggctcctatgaacagcgaggtgatcgtggaccccatccagggccaggtgaacttcgaggacgtgttcgtgtacttcagccaggaggagtgggtgctgctggacgaggcccagaggctgctgtacagggacgtgatgctggagaacttcgccctgatggccagcctgggccacaccagcttcatgagccacatcggcgccagcctggtgatgggcagcgagccctgggtgcccgactgggtggacatgatcggatctggctccggcagcggccccaagaaaaagagaaaagtctaagctgccttctgcggggcttgccttctggccatgcccttcttctctcccttgcacctgtacctcttggtctttgaataaagcctgagtaggaaggctagcaaaaaaaaaaaaaaaaaaaaaaaaaaaaaaaaaaaaaaaaaaaaaaaaaaaaaaaaaaaaaaaaaaaaaaaaaaaaaaaa

SEQ ID NO: 16606 - RNA, 9485 nt, synthetic construct
  source 1..9485: mol_type = other RNA
aggaaataagagagaaaagaagagtaagaagaaatataagagccaccatggcccctaagaagaagcgtaaagtgagccggatggaacgcctcgtctacgaggtgcggcagaagtgcagaaacatcgaggacatctgcatctcctgcggatctctgaacgtgaccctggagcacccactgttcatcggcggcatgtgccagaactgtaaaaactgttttctggagtgtgcctatcaatacgacgatgacggctaccagagctactgcaccatctgttgcggcggaagagaggtgctgatgtgtggaaataacaactgctgccggtgcttctgcgtggaatgcgtggacctgctggtgggccccggcgccgcccaggccgctattaaggaagatccttggaactgctacatgtgcggccacaagggcacatacggcctgctgagacggagagaggactggcctagcagactgcagatgttcttcgccaataaccacgaccaggagttcgacccccctaaggtgtaccctcccgtccccgccgagaagagaaagcccatccgggtcctgagcctgttcgatggcatcgccaccggtctgctggtgctgaaggacctgggcatccaggtggataggtacattgcctccgaggtgtgcgaggactccatcaccgtgggaatggtgcgtcatcagggcaagatcatgtacgtgggcgacgtgcggagcgtgacacagaagcatatccaggagtggggccctttcgacctggtgatcggcggcagcccttgcaatgacctgagcatcgtgaacccagcccggaagggcctgtacgagggaaccggcagactgttcttcgagttttacagactgctgcacgacgcccggcctaaggaaggcgacgaccggcccttcttttggctgttcgagaatgtggtggccatgggagtcagcgacaagcgggatattagccggttcctggagagcaaccccgtgatgatcgatgccaaggaagtgagcgccgcccaccgggccagatacttctggggcaatctgcctggcatgaacagacccctggccagcaccgtgaacgacaagctggagctgcaggagtgcctggagcacggccggatcgccaagttcagcaaggtgagaaccatcaccacccgaagcaacagcatcaaacaaggcaaggaccagcactttcctgtgttcatgaacgagaaggaggacatcctgtggtgtaccgagatggagagagtgttcgggttcccagtccactacacagatgtcagcaacatgtctagactggccagacagagactgctgggaagaagctggtccgtccctgtgatcagacacctgttcgcccctctgaaggagtacttcgcctgcgtgagcagcggcaacagcaacgccaacagccggggccccagcttctctagcggcctggtgccactgtccctgagagggagccacatgggccccatggagatctacaaaaccgtgagcgcctggaagcggcagcctgtgcgcgtgctgagcctgtttcggaatatcgataaagtcctgaaaagcctgggattcctggagagcggctctggctccggcggtggcaccctgaagtacgtggaggatgtgacaaacgtggtcagacgggatgtggagaagtggggccccttcgatctggtgtacggcagcacccaacccctgggcagctcttgtgaccggtgccctggctggtacatgtttcagttccaccggatcctgcagtacgccctgccgagacaggagtcccagcggccattcttttggattttcatggacaacttgctgctgaccgaggatgaccaggaaactaccactcggttcctgcagaccgaagccgtgaccctgcaggacgtgagaggccgggactaccagaacgccatgcgggtgtggtccaacatccctggactgaaaagcaagcacgcacctctgacccctaaagaagaggagtacctgcaggcccaggtgcggagcagaagcaagctggacgcccctaaggtggatctgctggtgaagaattgcctcctgcccctgagagagtacttcaagtatttcagccagaatagtctgcccctgggaggcagcggcggcggcgccctggtgacatttgaggacgtcgccgtgcggttcacccaggaggaatgggctctgctggatccttctcagaaaatcctgtaccgggacgtgatgagagagacataccggaatctgacctccgtgggcatcaactgggaatgttgggaccttgaagcctgcttcagaagcctgggaagaaacctgagagtgcaggtggtgaagagaaagtgcgagctgaccaacagcggcccctgcgccgagggcggcccaagcagcggcgcccctcctcccagcggcggcagcccagccggctccccaacctctaccgaggagggcacctctgagtccgccacccccgagagcggccctggcacctccaccgagcccagcgagggcagcgcacccggcagccctgccggcagccccacctccacagaggagggaaccagcaccgagcccagcgaaggcagcgccccaggcaccagcaccgagcctagtgagcaggagattaaacggatcaacaagatcagaagaagacttgtgaaagacagcaacaccaagaaggccggcaagacaggccccatgaaaaccctgctggttagagtgatgacacccgatctgagagagcggctggaaaacctgagaaagaagcctgaaaatatcccccagcccatcagcaatacatctagagccaacctgaataagctgctgaccgattacaccgaaatgaagaaggcgatcctgcatgtgtactgggaagagttccagaaggaccctgtgggcctgatgagccgggtggcccagcctgccagcaagaagatcgatcagaacaagctgaaacctgagatggacgagaagggcaacctgaccaccgccggctttgcctgctctcagtgtggccagcccctgttcgtgtacaagctggagcaggtgtctgagaagggcaaggcttacaccaactacttcggacggtgcaatgtggccgagcacgaaaagctgatcctgctggcccagctgaagcccgagaaggatagcgacgaagccgtgacatatagcctgggaaagtttgggcagagggccctggatttctacagcattcatgtgaccaaggagtccacccaccccgtgaagcccctggcccagatcgccggaaacagatacgcctccggacctgtgggaaaggccctgagcgacgcatgtatgggcacaatcgcctccttcctgtctaagtaccaggacatcatcatcgaacaccagaaggtggtgaagggcaaccagaagagactggagagcctgcgggagctggccggcaaggaaaacctggaataccctagcgtgaccctgccacctcagcctcacaccaaggagggcgttgatgcctacaacgaagtgatcgcccgggtgcgaatgtgggtgaacctgaacctgtggcagaagctgaagctaagcagagatgatgccaagcctctgctgagactgaagggattcccttcctttcctctggtcgagagacaggccaacgaagtggactggtgggacatggtgtgtaacgtgaagaagctgatcaacgagaaaaaggaggatggcaaggtgttttggcagaatctggctggctacaagagacaggaagccctgagaccatacctgagcagcgaggaagatcggaagaagggaaagaaattcgctcggtaccagctgggcgacctgctgctgcacctggaaaagaagcacggcgaggactggggaaaggtgtacgacgaggcctgggagcggattgacaagaaagtggaaggcctgagcaagcacatcaagctggaagaggaacggagaagcgaggacgcccagagcaaggccgccctgaccgactggctgcgggctaaggccagcttcgtgatcgagggcctgaaggaggccgacaaggacgagttctgcagatgcgagctgaagctgcagaagtggtacggggacctgcggggaaagcccttcgccatcgaagccgagaacagcatcctggacatcagcggcttcagcaagcagtacaactgtgccttcatctggcagaaggacggcgtgaagaagctgaacctgtacctgatcatcaactacttcaagggcggcaagctgcggttcaagaagatcaaacctgaagccttcgaagccaacagattctacaccgtgatcaacaaaaagagcggcgagatcgtgcccatggaggtgaacttcaacttcgacgaccccaacctgatcatcctgcctctggcctttggcaagagacagggcagagaattcatctggaacgacctgctgtccctggaaaccggcagcctgaagctggccaacggaagagtgatcgagaagacactgtacaacagaagaacccggcaggatgagcctgccctgttcgtggccctgaccttcgagcggcgggaggtcctggactcctccaatatcaaaccaatgaacctgatcggcgtggcaagaggcgaaaacatccccgccgtgatcgccctgaccgaccccgagggctgcccactgagccggtttaaggatagcctgggaaacccaacccacatcctgagaatcggcgagagctataaggagaagcagcggaccatccaggccaagaaggaggtggagcagcggagagccggcggctacagccggaagtacgccagcaaagccaagaatctggcagacgatatggtgagaaacaccgctagagatctgctgtactacgccgtgacccaggatgccatgctgatcttcgccaacctgagccggggcttcggccggcagggcaagcggaccttcatggccgagagacagtacacacggatggaggactggctgaccgccaagctggcctacgagggcctgagcaagacctacctgtccaagacactggcccagtacacctccaagacatgcagcaactgtgggtttaccatcaccagcgccgactacgacagggtgctggagaagctgaagaagacagcaacaggctggatgaccacaattaacggcaaggagctgaaggtggagggccagattacctactacaacagatacaagagacagaacgtagtcaaggacctgtccgtcgagctggatagactgagcgaagaatctgtgaacaacgacatctcctcctggacaaagggcagaagcggagaagctctgagcctcctgaagaaaagattctcccatagacccgtgcaggagaagttcgtgtgcctgaactgcggcttcgagacacacgcagccgagcaagccgccctgaacatcgccagatcctggctgttcctgcggagccaggagtacaagaaataccagacaaacaagacaaccggcaacaccgataagagagccttcgtcgagacctggcagtccttttaccggaagaagcttaaggaggtgtggaaacctgccgtgcggtctggcggatctggcggaggctccctgcaggagagcgtgaccttcagggacgtggccgtgttcttcagccaggacgagtggctgaggctggacagcgcccagaggaccctgtacagggaggtgatgctggagaactacggcaccctggtgagcctgggcatccccttcagcacccccaaggtgatctgccagctgcagcagggcgaggacccctgcgtggtggacagggagctgccccaggacgcctggcccggcctgaagacccagggcggcccaagcagcggcgcccctcctcccagcggcggcagcccagccggctccccaacctctaccgaggagggcacctctgagtccgccacccccgagagcggccctggcacctccaccgagcccagcgagggcagcgcacccggcagccctgccggcagccccacctccacagaggagggaaccagcaccgagcccagcgaaggcagcgccccaggcaccagcaccgagcctagtgagcaggagattaaacggatcaacaagatcagaagaagacttgtgaaagacagcaacaccaagaaggccggcaagacaggccccatgaaaaccctgctggttagagtgatgacacccgatctgagagagcggctggaaaacctgagaaagaagcctgaaaatatcccccagcccatcagcaatacatctagagccaacctgaataagctgctgaccgattacaccgaaatgaagaaggcgatcctgcatgtgtactgggaagagttccagaaggaccctgtgggcctgatgagccgggtggcccagcctgccagcaagaagatcgatcagaacaagctgaaacctgagatggacgagaagggcaacctgaccaccgccggctttgcctgctctcagtgtggccagcccctgttcgtgtacaagctggagcaggtgtctgagaagggcaaggcttacaccaactacttcggacggtgcaatgtggccgagcacgaaaagctgatcctgctggcccagctgaagcccgagaaggatagcgacgaagccgtgacatatagcctgggaaagtttgggcagagggccctggatttctacagcattcatgtgaccaaggagtccacccaccccgtgaagcccctggcccagatcgccggaaacagatacgcctccggacctgtgggaaaggccctgagcgacgcatgtatgggcacaatcgcctccttcctgtctaagtaccaggacatcatcatcgaacaccagaaggtggtgaagggcaaccagaagagactggagagcctgcgggagctggccggcaaggaaaacctggaataccctagcgtgaccctgccacctcagcctcacaccaaggagggcgttgatgcctacaacgaagtgatcgcccgggtgcgaatgtgggtgaacctgaacctgtggcagaagctgaagctaagcagagatgatgccaagcctctgctgagactgaagggattcccttcctttcctctggtcgagagacaggccaacgaagtggactggtgggacatggtgtgtaacgtgaagaagctgatcaacgagaaaaaggaggatggcaaggtgttttggcagaatctggctggctacaagagacaggaagccctgagaccatacctgagcagcgaggaagatcggaagaagggaaagaaattcgctcggtaccagctgggcgacctgctgctgcacctggaaaagaagcacggcgaggactggggaaaggtgtacgacgaggcctgggagcggattgacaagaaagtggaaggcctgagcaagcacatcaagctggaagaggaacggagaagcgaggacgcccagagcaaggccgccctgaccgactggctgcgggctaaggccagcttcgtgatcgagggcctgaaggaggccgacaaggacgagttctgcagatgcgagctgaagctgcagaagtggtacggggacctgcggggaaagcccttcgccatcgaagccgagaacagcatcctggacatcagcggcttcagcaagcagtacaactgtgccttcatctggcagaaggacggcgtgaagaagctgaacctgtacctgatcatcaactacttcaagggcggcaagctgcggttcaagaagatcaaacctgaagccttcgaagccaacagattctacaccgtgatcaacaaaaagagcggcgagatcgtgcccatggaggtgaacttcaacttcgacgaccccaacctgatcatcctgcctctggcctttggcaagagacagggcagagaattcatctggaacgacctgctgtccctggaaaccggcagcctgaagctggccaacggaagagtgatcgagaagacactgtacaacagaagaacccggcaggatgagcctgccctgttcgtggccctgaccttcgagcggcgggaggtcctggactcctccaatatcaaaccaatgaacctgatcggcgtggcaagaggcgaaaacatccccgccgtgatcgccctgaccgaccccgagggctgcccactgagccggtttaaggatagcctgggaaacccaacccacatcctgagaatcggcgagagctataaggagaagcagcggaccatccaggccaagaaggaggtggagcagcggagagccggcggctacagccggaagtacgccagcaaagccaagaatctggcagacgatatggtgagaaacaccgctagagatctgctgtactacgccgtgacccaggatgccatgctgatcttcgccaacctgagccggggcttcggccggcagggcaagcggaccttcatggccgagagacagtacacacggatggaggactggctgaccgccaagctggcctacgagggcctgagcaagacctacctgtccaagacactggcccagtacacctccaagacatgcagcaactgtgggtttaccatcaccagcgccgactacgacagggtgctggagaagctgaagaagacagcaacaggctggatgaccacaattaacggcaaggagctgaaggtggagggccagattacctactacaacagatacaagagacagaacgtagtcaaggacctgtccgtcgagctggatagactgagcgaagaatctgtgaacaacgacatctcctcctggacaaagggcagaagcggagaagctctgagcctcctgaagaaaagattctcccatagacccgtgcaggagaagttcgtgtgcctgaactgcggcttcgagacacacgcagccgagcaagccgccctgaacatcgccagatcctggctgttcctgcggagccaggagtacaagaaataccagacaaacaagacaaccggcaacaccgataagagagccttcgtcgagacctggcagtccttttaccggaagaagcttaaggaggtgtggaaacctgccgtgcggtctggcggatctggcggaggctcctctgcaggagagcgtgaccttcagggacgtggccgtgttcttcagccaggacgagtggctgaggctggacagcgcccagaggaccctgtacagggaggtgatgctggagaactacggcaccctggtgagcctgggcatccccttcagcacccccaaggtgatctgccagctgcagcagggcgaggacccctgcgtggtggacagggagctgccccaggacgcctggcccggcctgaagacccagggatctggctccggcagcggccccaagaaaaagagaaaagtctaagctgccttctgcggggcttgccttctggccatgcccttcttctctcccttgcacctgtacctcttggtctttgaataaagcctgagtaggaaggctagcaaaaaaaaaaaaaaaaaaaaaaaaaaaaaaaaaaaaaaaaaaaaaaaaaaaaaaaaaaaaaaaaaaaaaaaaaaaaaaaa

SEQ ID NO: 16607 - RNA, 9485 nt, synthetic construct
  source 1..9485: mol_type = other RNA
aggaaataagagagaaaagaagagtaagaagaaatataagagccaccatggcccctaagaagaagcgtaaagtgagccggatggaacgcctcgtctacgaggtgcggcagaagtgcagaaacatcgaggacatctgcatctcctgcggatctctgaacgtgaccctggagcacccactgttcatcggcggcatgtgccagaactgtaaaaactgttttctggagtgtgcctatcaatacgacgatgacggctaccagagctactgcaccatctgttgcggcggaagagaggtgctgatgtgtggaaataacaactgctgccggtgcttctgcgtggaatgcgtggacctgctggtgggccccggcgccgcccaggccgctattaaggaagatccttggaactgctacatgtgcggccacaagggcacatacggcctgctgagacggagagaggactggcctagcagactgcagatgttcttcgccaataaccacgaccaggagttcgacccccctaaggtgtaccctcccgtccccgccgagaagagaaagcccatccgggtcctgagcctgttcgatggcatcgccaccggtctgctggtgctgaaggacctgggcatccaggtggataggtacattgcctccgaggtgtgcgaggactccatcaccgtgggaatggtgcgtcatcagggcaagatcatgtacgtgggcgacgtgcggagcgtgacacagaagcatatccaggagtggggccctttcgacctggtgatcggcggcagcccttgcaatgacctgagcatcgtgaacccagcccggaagggcctgtacgagggaaccggcagactgttcttcgagttttacagactgctgcacgacgcccggcctaaggaaggcgacgaccggcccttcttttggctgttcgagaatgtggtggccatgggagtcagcgacaagcgggatattagccggttcctggagagcaaccccgtgatgatcgatgccaaggaagtgagcgccgcccaccgggccagatacttctggggcaatctgcctggcatgaacagacccctggccagcaccgtgaacgacaagctggagctgcaggagtgcctggagcacggccggatcgccaagttcagcaaggtgagaaccatcaccacccgaagcaacagcatcaaacaaggcaaggaccagcactttcctgtgttcatgaacgagaaggaggacatcctgtggtgtaccgagatggagagagtgttcgggttcccagtccactacacagatgtcagcaacatgtctagactggccagacagagactgctgggaagaagctggtccgtccctgtgatcagacacctgttcgcccctctgaaggagtacttcgcctgcgtgagcagcggcaacagcaacgccaacagccggggccccagcttctctagcggcctggtgccactgtccctgagagggagccacatgggccccatggagatctacaaaaccgtgagcgcctggaagcggcagcctgtgcgcgtgctgagcctgtttcggaatatcgataaagtcctgaaaagcctgggattcctggagagcggctctggctccggcggtggcaccctgaagtacgtggaggatgtgacaaacgtggtcagacgggatgtggagaagtggggccccttcgatctggtgtacggcagcacccaacccctgggcagctcttgtgaccggtgccctggctggtacatgtttcagttccaccggatcctgcagtacgccctgccgagacaggagtcccagcggccattcttttggattttcatggacaacttgctgctgaccgaggatgaccaggaaactaccactcggttcctgcagaccgaagccgtgaccctgcaggacgtgagaggccgggactaccagaacgccatgcgggtgtggtccaacatccctggactgaaaagcaagcacgcacctctgacccctaaagaagaggagtacctgcaggcccaggtgcggagcagaagcaagctggacgcccctaaggtggatctgctggtgaagaattgcctcctgcccctgagagagtacttcaagtatttcagccagaatagtctgcccctgggaggcagcggcggcggcgccctggtgacatttgaggacgtcgccgtgcggttcacccaggaggaatgggctctgctggatccttctcagaaaatcctgtaccgggacgtgatgagagagacataccggaatctgacctccgtgggcatcaactgggaatgttgggaccttgaagcctgcttcagaagcctgggaagaaacctgagagtgcaggtggtgaagagaaagtgcgagctgaccaacagcggcccctgcgccgagggcggcccaagcagcggcgcccctcctcccagcggcggcagcccagccggctccccaacctctaccgaggagggcacctctgagtccgccacccccgagagcggccctggcacctccaccgagcccagcgagggcagcgcacccggcagccctgccggcagccccacctccacagaggagggaaccagcaccgagcccagcgaaggcagcgccccaggcaccagcaccgagcctagtgagcaggagattaaacggatcaacaagatcagaagaagacttgtgaaagacagcaacaccaagaaggccggcaagacaggccccatgaaaaccctgctggttagagtgatgacacccgatctgagagagcggctggaaaacctgagaaagaagcctgaaaatatcccccagcccatcagcaatacatctagagccaacctgaataagctgctgaccgattacaccgaaatgaagaaggcgatcctgcatgtgtactgggaagagttccagaaggaccctgtgggcctgatgagccgggtggcccagcctgccagcaagaagatcgatcagaacaagctgaaacctgagatggacgagaagggcaacctgaccaccgccggctttgcctgctctcagtgtggccagcccctgttcgtgtacaagctggagcaggtgtctgagaagggcaaggcttacaccaactacttcggacggtgcaatgtggccgagcacgaaaagctgatcctgctggcccagctgaagcccgagaaggatagcgacgaagccgtgacatatagcctgggaaagtttgggcagagggccctggatttctacagcattcatgtgaccaaggagtccacccaccccgtgaagcccctggcccagatcgccggaaacagatacgcctccggacctgtgggaaaggccctgagcgacgcatgtatgggcacaatcgcctccttcctgtctaagtaccaggacatcatcatcgaacaccagaaggtggtgaagggcaaccagaagagactggagagcctgcgggagctggccggcaaggaaaacctggaataccctagcgtgaccctgccacctcagcctcacaccaaggagggcgttgatgcctacaacgaagtgatcgcccgggtgcgaatgtgggtgaacctgaacctgtggcagaagctgaagctaagcagagatgatgccaagcctctgctgagactgaagggattcccttcctttcctctggtcgagagacaggccaacgaagtggactggtgggacatggtgtgtaacgtgaagaagctgatcaacgagaaaaaggaggatggcaaggtgttttggcagaatctggctggctacaagagacaggaagccctgagaccatacctgagcagcgaggaagatcggaagaagggaaagaaattcgctcggtaccagctgggcgacctgctgctgcacctggaaaagaagcacggcgaggactggggaaaggtgtacgacgaggcctgggagcggattgacaagaaagtggaaggcctgagcaagcacatcaagctggaagaggaacggagaagcgaggacgcccagagcaaggccgccctgaccgactggctgcgggctaaggccagcttcgtgatcgagggcctgaaggaggccgacaaggacgagttctgcagatgcgagctgaagctgcagaagtggtacggggacctgcggggaaagcccttcgccatcgaagccgagaacagcatcctggacatcagcggcttcagcaagcagtacaactgtgccttcatctggcagaaggacggcgtgaagaagctgaacctgtacctgatcatcaactacttcaagggcggcaagctgcggttcaagaagatcaaacctgaagccttcgaagccaacagattctacaccgtgatcaacaaaaagagcggcgagatcgtgcccatggaggtgaacttcaacttcgacgaccccaacctgatcatcctgcctctggcctttggcaagagacagggcagagaattcatctggaacgacctgctgtccctggaaaccggcagcctgaagctggccaacggaagagtgatcgagaagacactgtacaacagaagaacccggcaggatgagcctgccctgttcgtggccctgaccttcgagcggcgggaggtcctggactcctccaatatcaaaccaatgaacctgatcggcgtggcaagaggcgaaaacatccccgccgtgatcgccctgaccgaccccgagggctgcccactgagccggtttaaggatagcctgggaaacccaacccacatcctgagaatcggcgagagctataaggagaagcagcggaccatccaggccaagaaggaggtggagcagcggagagccggcggctacagccggaagtacgccagcaaagccaagaatctggcagacgatatggtgagaaacaccgctagagatctgctgtactacgccgtgacccaggatgccatgctgatcttcgccaacctgagccggggcttcggccggcagggcaagcggaccttcatggccgagagacagtacacacggatggaggactggctgaccgccaagctggcctacgagggcctgagcaagacctacctgtccaagacactggcccagtacacctccaagacatgcagcaactgtgggtttaccatcaccagcgccgactacgacagggtgctggagaagctgaagaagacagcaacaggctggatgaccacaattaacggcaaggagctgaaggtggagggccagattacctactacaacagatacaagagacagaacgtagtcaaggacctgtccgtcgagctggatagactgagcgaagaatctgtgaacaacgacatctcctcctggacaaagggcagaagcggagaagctctgagcctcctgaagaaaagattctcccatagacccgtgcaggagaagttcgtgtgcctgaactgcggcttcgagacacacgcagccgagcaagccgccctgaacatcgccagatcctggctgttcctgcggagccaggagtacaagaaataccagacaaacaagacaaccggcaacaccgataagagagccttcgtcgagacctggcagtccttttaccggaagaagcttaaggaggtgtggaaacctgccgtgcggtctggcggatctggcggaggctccttccagggcagcatcagcttcaaggacgtgaccgtgggcttcacccaggaggagtggcagcacctggaccccagccagagggccctgtacagggacgtgaccctggagaactacagcaacctggtgagcgtgggctactgcgtgcacaagcccgaggtgatcttcaggctggagcagggcgaggagccctggaggctggaggaggagttccccagccagagcttccccgaggtgtggaccgccggcggcccaagcagcggcgcccctcctcccagcggcggcagcccagccggctccccaacctctaccgaggagggcacctctgagtccgccacccccgagagcggccctggcacctccaccgagcccagcgagggcagcgcacccggcagccctgccggcagccccacctccacagaggagggaaccagcaccgagcccagcgaaggcagcgccccaggcaccagcaccgagcctagtgagcaggagattaaacggatcaacaagatcagaagaagacttgtgaaagacagcaacaccaagaaggccggcaagacaggccccatgaaaaccctgctggttagagtgatgacacccgatctgagagagcggctggaaaacctgagaaagaagcctgaaaatatcccccagcccatcagcaatacatctagagccaacctgaataagctgctgaccgattacaccgaaatgaagaaggcgatcctgcatgtgtactgggaagagttccagaaggaccctgtgggcctgatgagccgggtggcccagcctgccagcaagaagatcgatcagaacaagctgaaacctgagatggacgagaagggcaacctgaccaccgccggctttgcctgctctcagtgtggccagcccctgttcgtgtacaagctggagcaggtgtctgagaagggcaaggcttacaccaactacttcggacggtgcaatgtggccgagcacgaaaagctgatcctgctggcccagctgaagcccgagaaggatagcgacgaagccgtgacatatagcctgggaaagtttgggcagagggccctggatttctacagcattcatgtgaccaaggagtccacccaccccgtgaagcccctggcccagatcgccggaaacagatacgcctccggacctgtgggaaaggccctgagcgacgcatgtatgggcacaatcgcctccttcctgtctaagtaccaggacatcatcatcgaacaccagaaggtggtgaagggcaaccagaagagactggagagcctgcgggagctggccggcaaggaaaacctggaataccctagcgtgaccctgccacctcagcctcacaccaaggagggcgttgatgcctacaacgaagtgatcgcccgggtgcgaatgtgggtgaacctgaacctgtggcagaagctgaagctaagcagagatgatgccaagcctctgctgagactgaagggattcccttcctttcctctggtcgagagacaggccaacgaagtggactggtgggacatggtgtgtaacgtgaagaagctgatcaacgagaaaaaggaggatggcaaggtgttttggcagaatctggctggctacaagagacaggaagccctgagaccatacctgagcagcgaggaagatcggaagaagggaaagaaattcgctcggtaccagctgggcgacctgctgctgcacctggaaaagaagcacggcgaggactggggaaaggtgtacgacgaggcctgggagcggattgacaagaaagtggaaggcctgagcaagcacatcaagctggaagaggaacggagaagcgaggacgcccagagcaaggccgccctgaccgactggctgcgggctaaggccagcttcgtgatcgagggcctgaaggaggccgacaaggacgagttctgcagatgcgagctgaagctgcagaagtggtacggggacctgcggggaaagcccttcgccatcgaagccgagaacagcatcctggacatcagcggcttcagcaagcagtacaactgtgccttcatctggcagaaggacggcgtgaagaagctgaacctgtacctgatcatcaactacttcaagggcggcaagctgcggttcaagaagatcaaacctgaagccttcgaagccaacagattctacaccgtgatcaacaaaaagagcggcgagatcgtgcccatggaggtgaacttcaacttcgacgaccccaacctgatcatcctgcctctggcctttggcaagagacagggcagagaattcatctggaacgacctgctgtccctggaaaccggcagcctgaagctggccaacggaagagtgatcgagaagacactgtacaacagaagaacccggcaggatgagcctgccctgttcgtggccctgaccttcgagcggcgggaggtcctggactcctccaatatcaaaccaatgaacctgatcggcgtggcaagaggcgaaaacatccccgccgtgatcgccctgaccgaccccgagggctgcccactgagccggtttaaggatagcctgggaaacccaacccacatcctgagaatcggcgagagctataaggagaagcagcggaccatccaggccaagaaggaggtggagcagcggagagccggcggctacagccggaagtacgccagcaaagccaagaatctggcagacgatatggtgagaaacaccgctagagatctgctgtactacgccgtgacccaggatgccatgctgatcttcgccaacctgagccggggcttcggccggcagggcaagcggaccttcatggccgagagacagtacacacggatggaggactggctgaccgccaagctggcctacgagggcctgagcaagacctacctgtccaagacactggcccagtacacctccaagacatgcagcaactgtgggtttaccatcaccagcgccgactacgacagggtgctggagaagctgaagaagacagcaacaggctggatgaccacaattaacggcaaggagctgaaggtggagggccagattacctactacaacagatacaagagacagaacgtagtcaaggacctgtccgtcgagctggatagactgagcgaagaatctgtgaacaacgacatctcctcctggacaaagggcagaagcggagaagctctgagcctcctgaagaaaagattctcccatagacccgtgcaggagaagttcgtgtgcctgaactgcggcttcgagacacacgcagccgagcaagccgccctgaacatcgccagatcctggctgttcctgcggagccaggagtacaagaaataccagacaaacaagacaaccggcaacaccgataagagagccttcgtcgagacctggcagtccttttaccggaagaagcttaaggaggtgtggaaacctgccgtgcggtctggcggatctggcggaggctcctttccagggcagcatcagcttcaaggacgtgaccgtgggcttcacccaggaggagtggcagcacctggaccccagccagagggccctgtacagggacgtgaccctggagaactacagcaacctggtgagcgtgggctactgcgtgcacaagcccgaggtgatcttcaggctggagcagggcgaggagccctggaggctggaggaggagttccccagccagagcttccccgaggtgtggaccgccggatctggctccggcagcggccccaagaaaaagagaaaagtctaagctgccttctgcggggcttgccttctggccatgcccttcttctctcccttgcacctgtacctcttggtctttgaataaagcctgagtaggaaggctagcaaaaaaaaaaaaaaaaaaaaaaaaaaaaaaaaaaaaaaaaaaaaaaaaaaaaaaaaaaaaaaaaaaaaaaaaaaaaaaaa

SEQ ID NO: 16608 - RNA, 9485 nt, synthetic construct
  source 1..9485: mol_type = other RNA
aggaaataagagagaaaagaagagtaagaagaaatataagagccaccatggcccctaagaagaagcgtaaagtgagccggatggaacgcctcgtctacgaggtgcggcagaagtgcagaaacatcgaggacatctgcatctcctgcggatctctgaacgtgaccctggagcacccactgttcatcggcggcatgtgccagaactgtaaaaactgttttctggagtgtgcctatcaatacgacgatgacggctaccagagctactgcaccatctgttgcggcggaagagaggtgctgatgtgtggaaataacaactgctgccggtgcttctgcgtggaatgcgtggacctgctggtgggccccggcgccgcccaggccgctattaaggaagatccttggaactgctacatgtgcggccacaagggcacatacggcctgctgagacggagagaggactggcctagcagactgcagatgttcttcgccaataaccacgaccaggagttcgacccccctaaggtgtaccctcccgtccccgccgagaagagaaagcccatccgggtcctgagcctgttcgatggcatcgccaccggtctgctggtgctgaaggacctgggcatccaggtggataggtacattgcctccgaggtgtgcgaggactccatcaccgtgggaatggtgcgtcatcagggcaagatcatgtacgtgggcgacgtgcggagcgtgacacagaagcatatccaggagtggggccctttcgacctggtgatcggcggcagcccttgcaatgacctgagcatcgtgaacccagcccggaagggcctgtacgagggaaccggcagactgttcttcgagttttacagactgctgcacgacgcccggcctaaggaaggcgacgaccggcccttcttttggctgttcgagaatgtggtggccatgggagtcagcgacaagcgggatattagccggttcctggagagcaaccccgtgatgatcgatgccaaggaagtgagcgccgcccaccgggccagatacttctggggcaatctgcctggcatgaacagacccctggccagcaccgtgaacgacaagctggagctgcaggagtgcctggagcacggccggatcgccaagttcagcaaggtgagaaccatcaccacccgaagcaacagcatcaaacaaggcaaggaccagcactttcctgtgttcatgaacgagaaggaggacatcctgtggtgtaccgagatggagagagtgttcgggttcccagtccactacacagatgtcagcaacatgtctagactggccagacagagactgctgggaagaagctggtccgtccctgtgatcagacacctgttcgcccctctgaaggagtacttcgcctgcgtgagcagcggcaacagcaacgccaacagccggggccccagcttctctagcggcctggtgccactgtccctgagagggagccacatgggccccatggagatctacaaaaccgtgagcgcctggaagcggcagcctgtgcgcgtgctgagcctgtttcggaatatcgataaagtcctgaaaagcctgggattcctggagagcggctctggctccggcggtggcaccctgaagtacgtggaggatgtgacaaacgtggtcagacgggatgtggagaagtggggccccttcgatctggtgtacggcagcacccaacccctgggcagctcttgtgaccggtgccctggctggtacatgtttcagttccaccggatcctgcagtacgccctgccgagacaggagtcccagcggccattcttttggattttcatggacaacttgctgctgaccgaggatgaccaggaaactaccactcggttcctgcagaccgaagccgtgaccctgcaggacgtgagaggccgggactaccagaacgccatgcgggtgtggtccaacatccctggactgaaaagcaagcacgcacctctgacccctaaagaagaggagtacctgcaggcccaggtgcggagcagaagcaagctggacgcccctaaggtggatctgctggtgaagaattgcctcctgcccctgagagagtacttcaagtatttcagccagaatagtctgcccctgggaggcagcggcggcggcgccctggtgacatttgaggacgtcgccgtgcggttcacccaggaggaatgggctctgctggatccttctcagaaaatcctgtaccgggacgtgatgagagagacataccggaatctgacctccgtgggcatcaactgggaatgttgggaccttgaagcctgcttcagaagcctgggaagaaacctgagagtgcaggtggtgaagagaaagtgcgagctgaccaacagcggcccctgcgccgagggcggcccaagcagcggcgcccctcctcccagcggcggcagcccagccggctccccaacctctaccgaggagggcacctctgagtccgccacccccgagagcggccctggcacctccaccgagcccagcgagggcagcgcacccggcagccctgccggcagccccacctccacagaggagggaaccagcaccgagcccagcgaaggcagcgccccaggcaccagcaccgagcctagtgagcaggagattaaacggatcaacaagatcagaagaagacttgtgaaagacagcaacaccaagaaggccggcaagacaggccccatgaaaaccctgctggttagagtgatgacacccgatctgagagagcggctggaaaacctgagaaagaagcctgaaaatatcccccagcccatcagcaatacatctagagccaacctgaataagctgctgaccgattacaccgaaatgaagaaggcgatcctgcatgtgtactgggaagagttccagaaggaccctgtgggcctgatgagccgggtggcccagcctgccagcaagaagatcgatcagaacaagctgaaacctgagatggacgagaagggcaacctgaccaccgccggctttgcctgctctcagtgtggccagcccctgttcgtgtacaagctggagcaggtgtctgagaagggcaaggcttacaccaactacttcggacggtgcaatgtggccgagcacgaaaagctgatcctgctggcccagctgaagcccgagaaggatagcgacgaagccgtgacatatagcctgggaaagtttgggcagagggccctggatttctacagcattcatgtgaccaaggagtccacccaccccgtgaagcccctggcccagatcgccggaaacagatacgcctccggacctgtgggaaaggccctgagcgacgcatgtatgggcacaatcgcctccttcctgtctaagtaccaggacatcatcatcgaacaccagaaggtggtgaagggcaaccagaagagactggagagcctgcgggagctggccggcaaggaaaacctggaataccctagcgtgaccctgccacctcagcctcacaccaaggagggcgttgatgcctacaacgaagtgatcgcccgggtgcgaatgtgggtgaacctgaacctgtggcagaagctgaagctaagcagagatgatgccaagcctctgctgagactgaagggattcccttcctttcctctggtcgagagacaggccaacgaagtggactggtgggacatggtgtgtaacgtgaagaagctgatcaacgagaaaaaggaggatggcaaggtgttttggcagaatctggctggctacaagagacaggaagccctgagaccatacctgagcagcgaggaagatcggaagaagggaaagaaattcgctcggtaccagctgggcgacctgctgctgcacctggaaaagaagcacggcgaggactggggaaaggtgtacgacgaggcctgggagcggattgacaagaaagtggaaggcctgagcaagcacatcaagctggaagaggaacggagaagcgaggacgcccagagcaaggccgccctgaccgactggctgcgggctaaggccagcttcgtgatcgagggcctgaaggaggccgacaaggacgagttctgcagatgcgagctgaagctgcagaagtggtacggggacctgcggggaaagcccttcgccatcgaagccgagaacagcatcctggacatcagcggcttcagcaagcagtacaactgtgccttcatctggcagaaggacggcgtgaagaagctgaacctgtacctgatcatcaactacttcaagggcggcaagctgcggttcaagaagatcaaacctgaagccttcgaagccaacagattctacaccgtgatcaacaaaaagagcggcgagatcgtgcccatggaggtgaacttcaacttcgacgaccccaacctgatcatcctgcctctggcctttggcaagagacagggcagagaattcatctggaacgacctgctgtccctggaaaccggcagcctgaagctggccaacggaagagtgatcgagaagacactgtacaacagaagaacccggcaggatgagcctgccctgttcgtggccctgaccttcgagcggcgggaggtcctggactcctccaatatcaaaccaatgaacctgatcggcgtggcaagaggcgaaaacatccccgccgtgatcgccctgaccgaccccgagggctgcccactgagccggtttaaggatagcctgggaaacccaacccacatcctgagaatcggcgagagctataaggagaagcagcggaccatccaggccaagaaggaggtggagcagcggagagccggcggctacagccggaagtacgccagcaaagccaagaatctggcagacgatatggtgagaaacaccgctagagatctgctgtactacgccgtgacccaggatgccatgctgatcttcgccaacctgagccggggcttcggccggcagggcaagcggaccttcatggccgagagacagtacacacggatggaggactggctgaccgccaagctggcctacgagggcctgagcaagacctacctgtccaagacactggcccagtacacctccaagacatgcagcaactgtgggtttaccatcaccagcgccgactacgacagggtgctggagaagctgaagaagacagcaacaggctggatgaccacaattaacggcaaggagctgaaggtggagggccagattacctactacaacagatacaagagacagaacgtagtcaaggacctgtccgtcgagctggatagactgagcgaagaatctgtgaacaacgacatctcctcctggacaaagggcagaagcggagaagctctgagcctcctgaagaaaagattctcccatagacccgtgcaggagaagttcgtgtgcctgaactgcggcttcgagacacacgcagccgagcaagccgccctgaacatcgccagatcctggctgttcctgcggagccaggagtacaagaaataccagacaaacaagacaaccggcaacaccgataagagagccttcgtcgagacctggcagtccttttaccggaagaagcttaaggaggtgtggaaacctgccgtgcggtctggcggatctggcggaggctccccccaggagcccgtgaccttcgaggacgtggccgtgtacttcacccagaaccagtgggccagcctggaccccacccagagggccctgtacagggaggtgatgctggagaactacgccagcgtggccagcctggtgttccccttccccaagcccgacctggtgagccagctggagagggaggaggccccctggggccccgacccctgggaggccgaggtgctgaggggcatctgccccggcggcggcggcccaagcagcggcgcccctcctcccagcggcggcagcccagccggctccccaacctctaccgaggagggcacctctgagtccgccacccccgagagcggccctggcacctccaccgagcccagcgagggcagcgcacccggcagccctgccggcagccccacctccacagaggagggaaccagcaccgagcccagcgaaggcagcgccccaggcaccagcaccgagcctagtgagcaggagattaaacggatcaacaagatcagaagaagacttgtgaaagacagcaacaccaagaaggccggcaagacaggccccatgaaaaccctgctggttagagtgatgacacccgatctgagagagcggctggaaaacctgagaaagaagcctgaaaatatcccccagcccatcagcaatacatctagagccaacctgaataagctgctgaccgattacaccgaaatgaagaaggcgatcctgcatgtgtactgggaagagttccagaaggaccctgtgggcctgatgagccgggtggcccagcctgccagcaagaagatcgatcagaacaagctgaaacctgagatggacgagaagggcaacctgaccaccgccggctttgcctgctctcagtgtggccagcccctgttcgtgtacaagctggagcaggtgtctgagaagggcaaggcttacaccaactacttcggacggtgcaatgtggccgagcacgaaaagctgatcctgctggcccagctgaagcccgagaaggatagcgacgaagccgtgacatatagcctgggaaagtttgggcagagggccctggatttctacagcattcatgtgaccaaggagtccacccaccccgtgaagcccctggcccagatcgccggaaacagatacgcctccggacctgtgggaaaggccctgagcgacgcatgtatgggcacaatcgcctccttcctgtctaagtaccaggacatcatcatcgaacaccagaaggtggtgaagggcaaccagaagagactggagagcctgcgggagctggccggcaaggaaaacctggaataccctagcgtgaccctgccacctcagcctcacaccaaggagggcgttgatgcctacaacgaagtgatcgcccgggtgcgaatgtgggtgaacctgaacctgtggcagaagctgaagctaagcagagatgatgccaagcctctgctgagactgaagggattcccttcctttcctctggtcgagagacaggccaacgaagtggactggtgggacatggtgtgtaacgtgaagaagctgatcaacgagaaaaaggaggatggcaaggtgttttggcagaatctggctggctacaagagacaggaagccctgagaccatacctgagcagcgaggaagatcggaagaagggaaagaaattcgctcggtaccagctgggcgacctgctgctgcacctggaaaagaagcacggcgaggactggggaaaggtgtacgacgaggcctgggagcggattgacaagaaagtggaaggcctgagcaagcacatcaagctggaagaggaacggagaagcgaggacgcccagagcaaggccgccctgaccgactggctgcgggctaaggccagcttcgtgatcgagggcctgaaggaggccgacaaggacgagttctgcagatgcgagctgaagctgcagaagtggtacggggacctgcggggaaagcccttcgccatcgaagccgagaacagcatcctggacatcagcggcttcagcaagcagtacaactgtgccttcatctggcagaaggacggcgtgaagaagctgaacctgtacctgatcatcaactacttcaagggcggcaagctgcggttcaagaagatcaaacctgaagccttcgaagccaacagattctacaccgtgatcaacaaaaagagcggcgagatcgtgcccatggaggtgaacttcaacttcgacgaccccaacctgatcatcctgcctctggcctttggcaagagacagggcagagaattcatctggaacgacctgctgtccctggaaaccggcagcctgaagctggccaacggaagagtgatcgagaagacactgtacaacagaagaacccggcaggatgagcctgccctgttcgtggccctgaccttcgagcggcgggaggtcctggactcctccaatatcaaaccaatgaacctgatcggcgtggcaagaggcgaaaacatccccgccgtgatcgccctgaccgaccccgagggctgcccactgagccggtttaaggatagcctgggaaacccaacccacatcctgagaatcggcgagagctataaggagaagcagcggaccatccaggccaagaaggaggtggagcagcggagagccggcggctacagccggaagtacgccagcaaagccaagaatctggcagacgatatggtgagaaacaccgctagagatctgctgtactacgccgtgacccaggatgccatgctgatcttcgccaacctgagccggggcttcggccggcagggcaagcggaccttcatggccgagagacagtacacacggatggaggactggctgaccgccaagctggcctacgagggcctgagcaagacctacctgtccaagacactggcccagtacacctccaagacatgcagcaactgtgggtttaccatcaccagcgccgactacgacagggtgctggagaagctgaagaagacagcaacaggctggatgaccacaattaacggcaaggagctgaaggtggagggccagattacctactacaacagatacaagagacagaacgtagtcaaggacctgtccgtcgagctggatagactgagcgaagaatctgtgaacaacgacatctcctcctggacaaagggcagaagcggagaagctctgagcctcctgaagaaaagattctcccatagacccgtgcaggagaagttcgtgtgcctgaactgcggcttcgagacacacgcagccgagcaagccgccctgaacatcgccagatcctggctgttcctgcggagccaggagtacaagaaataccagacaaacaagacaaccggcaacaccgataagagagccttcgtcgagacctggcagtccttttaccggaagaagcttaaggaggtgtggaaacctgccgtgcggtctggcggatctggcggaggctcctccccaggagcccgtgaccttcgaggacgtggccgtgtacttcacccagaaccagtgggccagcctggaccccacccagagggccctgtacagggaggtgatgctggagaactacgccagcgtggccagcctggtgttccccttccccaagcccgacctggtgagccagctggagagggaggaggccccctggggccccgacccctgggaggccgaggtgctgaggggcatctgccccggcggcggatctggctccggcagcggccccaagaaaaagagaaaagtctaagctgccttctgcggggcttgccttctggccatgcccttcttctctcccttgcacctgtacctcttggtctttgaataaagcctgagtaggaaggctagcaaaaaaaaaaaaaaaaaaaaaaaaaaaaaaaaaaaaaaaaaaaaaaaaaaaaaaaaaaaaaaaaaaaaaaaaaaaaaaaa

SEQ ID NO: 16609 - RNA, 9485 nt, synthetic construct
  source 1..9485: mol_type = other RNA
aggaaataagagagaaaagaagagtaagaagaaatataagagccaccatggcccctaagaagaagcgtaaagtgagccggatggaacgcctcgtctacgaggtgcggcagaagtgcagaaacatcgaggacatctgcatctcctgcggatctctgaacgtgaccctggagcacccactgttcatcggcggcatgtgccagaactgtaaaaactgttttctggagtgtgcctatcaatacgacgatgacggctaccagagctactgcaccatctgttgcggcggaagagaggtgctgatgtgtggaaataacaactgctgccggtgcttctgcgtggaatgcgtggacctgctggtgggccccggcgccgcccaggccgctattaaggaagatccttggaactgctacatgtgcggccacaagggcacatacggcctgctgagacggagagaggactggcctagcagactgcagatgttcttcgccaataaccacgaccaggagttcgacccccctaaggtgtaccctcccgtccccgccgagaagagaaagcccatccgggtcctgagcctgttcgatggcatcgccaccggtctgctggtgctgaaggacctgggcatccaggtggataggtacattgcctccgaggtgtgcgaggactccatcaccgtgggaatggtgcgtcatcagggcaagatcatgtacgtgggcgacgtgcggagcgtgacacagaagcatatccaggagtggggccctttcgacctggtgatcggcggcagcccttgcaatgacctgagcatcgtgaacccagcccggaagggcctgtacgagggaaccggcagactgttcttcgagttttacagactgctgcacgacgcccggcctaaggaaggcgacgaccggcccttcttttggctgttcgagaatgtggtggccatgggagtcagcgacaagcgggatattagccggttcctggagagcaaccccgtgatgatcgatgccaaggaagtgagcgccgcccaccgggccagatacttctggggcaatctgcctggcatgaacagacccctggccagcaccgtgaacgacaagctggagctgcaggagtgcctggagcacggccggatcgccaagttcagcaaggtgagaaccatcaccacccgaagcaacagcatcaaacaaggcaaggaccagcactttcctgtgttcatgaacgagaaggaggacatcctgtggtgtaccgagatggagagagtgttcgggttcccagtccactacacagatgtcagcaacatgtctagactggccagacagagactgctgggaagaagctggtccgtccctgtgatcagacacctgttcgcccctctgaaggagtacttcgcctgcgtgagcagcggcaacagcaacgccaacagccggggccccagcttctctagcggcctggtgccactgtccctgagagggagccacatgggccccatggagatctacaaaaccgtgagcgcctggaagcggcagcctgtgcgcgtgctgagcctgtttcggaatatcgataaagtcctgaaaagcctgggattcctggagagcggctctggctccggcggtggcaccctgaagtacgtggaggatgtgacaaacgtggtcagacgggatgtggagaagtggggccccttcgatctggtgtacggcagcacccaacccctgggcagctcttgtgaccggtgccctggctggtacatgtttcagttccaccggatcctgcagtacgccctgccgagacaggagtcccagcggccattcttttggattttcatggacaacttgctgctgaccgaggatgaccaggaaactaccactcggttcctgcagaccgaagccgtgaccctgcaggacgtgagaggccgggactaccagaacgccatgcgggtgtggtccaacatccctggactgaaaagcaagcacgcacctctgacccctaaagaagaggagtacctgcaggcccaggtgcggagcagaagcaagctggacgcccctaaggtggatctgctggtgaagaattgcctcctgcccctgagagagtacttcaagtatttcagccagaatagtctgcccctgggaggcagcggcggcggcgccctggtgacatttgaggacgtcgccgtgcggttcacccaggaggaatgggctctgctggatccttctcagaaaatcctgtaccgggacgtgatgagagagacataccggaatctgacctccgtgggcatcaactgggaatgttgggaccttgaagcctgcttcagaagcctgggaagaaacctgagagtgcaggtggtgaagagaaagtgcgagctgaccaacagcggcccctgcgccgagggcggcccaagcagcggcgcccctcctcccagcggcggcagcccagccggctccccaacctctaccgaggagggcacctctgagtccgccacccccgagagcggccctggcacctccaccgagcccagcgagggcagcgcacccggcagccctgccggcagccccacctccacagaggagggaaccagcaccgagcccagcgaaggcagcgccccaggcaccagcaccgagcctagtgagcaggagattaaacggatcaacaagatcagaagaagacttgtgaaagacagcaacaccaagaaggccggcaagacaggccccatgaaaaccctgctggttagagtgatgacacccgatctgagagagcggctggaaaacctgagaaagaagcctgaaaatatcccccagcccatcagcaatacatctagagccaacctgaataagctgctgaccgattacaccgaaatgaagaaggcgatcctgcatgtgtactgggaagagttccagaaggaccctgtgggcctgatgagccgggtggcccagcctgccagcaagaagatcgatcagaacaagctgaaacctgagatggacgagaagggcaacctgaccaccgccggctttgcctgctctcagtgtggccagcccctgttcgtgtacaagctggagcaggtgtctgagaagggcaaggcttacaccaactacttcggacggtgcaatgtggccgagcacgaaaagctgatcctgctggcccagctgaagcccgagaaggatagcgacgaagccgtgacatatagcctgggaaagtttgggcagagggccctggatttctacagcattcatgtgaccaaggagtccacccaccccgtgaagcccctggcccagatcgccggaaacagatacgcctccggacctgtgggaaaggccctgagcgacgcatgtatgggcacaatcgcctccttcctgtctaagtaccaggacatcatcatcgaacaccagaaggtggtgaagggcaaccagaagagactggagagcctgcgggagctggccggcaaggaaaacctggaataccctagcgtgaccctgccacctcagcctcacaccaaggagggcgttgatgcctacaacgaagtgatcgcccgggtgcgaatgtgggtgaacctgaacctgtggcagaagctgaagctaagcagagatgatgccaagcctctgctgagactgaagggattcccttcctttcctctggtcgagagacaggccaacgaagtggactggtgggacatggtgtgtaacgtgaagaagctgatcaacgagaaaaaggaggatggcaaggtgttttggcagaatctggctggctacaagagacaggaagccctgagaccatacctgagcagcgaggaagatcggaagaagggaaagaaattcgctcggtaccagctgggcgacctgctgctgcacctggaaaagaagcacggcgaggactggggaaaggtgtacgacgaggcctgggagcggattgacaagaaagtggaaggcctgagcaagcacatcaagctggaagaggaacggagaagcgaggacgcccagagcaaggccgccctgaccgactggctgcgggctaaggccagcttcgtgatcgagggcctgaaggaggccgacaaggacgagttctgcagatgcgagctgaagctgcagaagtggtacggggacctgcggggaaagcccttcgccatcgaagccgagaacagcatcctggacatcagcggcttcagcaagcagtacaactgtgccttcatctggcagaaggacggcgtgaagaagctgaacctgtacctgatcatcaactacttcaagggcggcaagctgcggttcaagaagatcaaacctgaagccttcgaagccaacagattctacaccgtgatcaacaaaaagagcggcgagatcgtgcccatggaggtgaacttcaacttcgacgaccccaacctgatcatcctgcctctggcctttggcaagagacagggcagagaattcatctggaacgacctgctgtccctggaaaccggcagcctgaagctggccaacggaagagtgatcgagaagacactgtacaacagaagaacccggcaggatgagcctgccctgttcgtggccctgaccttcgagcggcgggaggtcctggactcctccaatatcaaaccaatgaacctgatcggcgtggcaagaggcgaaaacatccccgccgtgatcgccctgaccgaccccgagggctgcccactgagccggtttaaggatagcctgggaaacccaacccacatcctgagaatcggcgagagctataaggagaagcagcggaccatccaggccaagaaggaggtggagcagcggagagccggcggctacagccggaagtacgccagcaaagccaagaatctggcagacgatatggtgagaaacaccgctagagatctgctgtactacgccgtgacccaggatgccatgctgatcttcgccaacctgagccggggcttcggccggcagggcaagcggaccttcatggccgagagacagtacacacggatggaggactggctgaccgccaagctggcctacgagggcctgagcaagacctacctgtccaagacactggcccagtacacctccaagacatgcagcaactgtgggtttaccatcaccagcgccgactacgacagggtgctggagaagctgaagaagacagcaacaggctggatgaccacaattaacggcaaggagctgaaggtggagggccagattacctactacaacagatacaagagacagaacgtagtcaaggacctgtccgtcgagctggatagactgagcgaagaatctgtgaacaacgacatctcctcctggacaaagggcagaagcggagaagctctgagcctcctgaagaaaagattctcccatagacccgtgcaggagaagttcgtgtgcctgaactgcggcttcgagacacacgcagccgagcaagccgccctgaacatcgccagatcctggctgttcctgcggagccaggagtacaagaaataccagacaaacaagacaaccggcaacaccgataagagagccttcgtcgagacctggcagtccttttaccggaagaagcttaaggaggtgtggaaacctgccgtgcggtctggcggatctggcggaggctcccccaaggtgcccgtgaccttcgacgacgtggccgtgtacttcagcgagagcgagtggggcaggctggacaagtggcagaaggagctgtacaagcacgtgatgaggggcaactacgagatgctggtgagcctggactacgccatcagcaagcccgacatcctgaccaggatggagaggggcgaggagccctgccccgacggcccctggggccccgaggagggcaaggagagggaggccgccaggggcggcccaagcagcggcgcccctcctcccagcggcggcagcccagccggctccccaacctctaccgaggagggcacctctgagtccgccacccccgagagcggccctggcacctccaccgagcccagcgagggcagcgcacccggcagccctgccggcagccccacctccacagaggagggaaccagcaccgagcccagcgaaggcagcgccccaggcaccagcaccgagcctagtgagcaggagattaaacggatcaacaagatcagaagaagacttgtgaaagacagcaacaccaagaaggccggcaagacaggccccatgaaaaccctgctggttagagtgatgacacccgatctgagagagcggctggaaaacctgagaaagaagcctgaaaatatcccccagcccatcagcaatacatctagagccaacctgaataagctgctgaccgattacaccgaaatgaagaaggcgatcctgcatgtgtactgggaagagttccagaaggaccctgtgggcctgatgagccgggtggcccagcctgccagcaagaagatcgatcagaacaagctgaaacctgagatggacgagaagggcaacctgaccaccgccggctttgcctgctctcagtgtggccagcccctgttcgtgtacaagctggagcaggtgtctgagaagggcaaggcttacaccaactacttcggacggtgcaatgtggccgagcacgaaaagctgatcctgctggcccagctgaagcccgagaaggatagcgacgaagccgtgacatatagcctgggaaagtttgggcagagggccctggatttctacagcattcatgtgaccaaggagtccacccaccccgtgaagcccctggcccagatcgccggaaacagatacgcctccggacctgtgggaaaggccctgagcgacgcatgtatgggcacaatcgcctccttcctgtctaagtaccaggacatcatcatcgaacaccagaaggtggtgaagggcaaccagaagagactggagagcctgcgggagctggccggcaaggaaaacctggaataccctagcgtgaccctgccacctcagcctcacaccaaggagggcgttgatgcctacaacgaagtgatcgcccgggtgcgaatgtgggtgaacctgaacctgtggcagaagctgaagctaagcagagatgatgccaagcctctgctgagactgaagggattcccttcctttcctctggtcgagagacaggccaacgaagtggactggtgggacatggtgtgtaacgtgaagaagctgatcaacgagaaaaaggaggatggcaaggtgttttggcagaatctggctggctacaagagacaggaagccctgagaccatacctgagcagcgaggaagatcggaagaagggaaagaaattcgctcggtaccagctgggcgacctgctgctgcacctggaaaagaagcacggcgaggactggggaaaggtgtacgacgaggcctgggagcggattgacaagaaagtggaaggcctgagcaagcacatcaagctggaagaggaacggagaagcgaggacgcccagagcaaggccgccctgaccgactggctgcgggctaaggccagcttcgtgatcgagggcctgaaggaggccgacaaggacgagttctgcagatgcgagctgaagctgcagaagtggtacggggacctgcggggaaagcccttcgccatcgaagccgagaacagcatcctggacatcagcggcttcagcaagcagtacaactgtgccttcatctggcagaaggacggcgtgaagaagctgaacctgtacctgatcatcaactacttcaagggcggcaagctgcggttcaagaagatcaaacctgaagccttcgaagccaacagattctacaccgtgatcaacaaaaagagcggcgagatcgtgcccatggaggtgaacttcaacttcgacgaccccaacctgatcatcctgcctctggcctttggcaagagacagggcagagaattcatctggaacgacctgctgtccctggaaaccggcagcctgaagctggccaacggaagagtgatcgagaagacactgtacaacagaagaacccggcaggatgagcctgccctgttcgtggccctgaccttcgagcggcgggaggtcctggactcctccaatatcaaaccaatgaacctgatcggcgtggcaagaggcgaaaacatccccgccgtgatcgccctgaccgaccccgagggctgcccactgagccggtttaaggatagcctgggaaacccaacccacatcctgagaatcggcgagagctataaggagaagcagcggaccatccaggccaagaaggaggtggagcagcggagagccggcggctacagccggaagtacgccagcaaagccaagaatctggcagacgatatggtgagaaacaccgctagagatctgctgtactacgccgtgacccaggatgccatgctgatcttcgccaacctgagccggggcttcggccggcagggcaagcggaccttcatggccgagagacagtacacacggatggaggactggctgaccgccaagctggcctacgagggcctgagcaagacctacctgtccaagacactggcccagtacacctccaagacatgcagcaactgtgggtttaccatcaccagcgccgactacgacagggtgctggagaagctgaagaagacagcaacaggctggatgaccacaattaacggcaaggagctgaaggtggagggccagattacctactacaacagatacaagagacagaacgtagtcaaggacctgtccgtcgagctggatagactgagcgaagaatctgtgaacaacgacatctcctcctggacaaagggcagaagcggagaagctctgagcctcctgaagaaaagattctcccatagacccgtgcaggagaagttcgtgtgcctgaactgcggcttcgagacacacgcagccgagcaagccgccctgaacatcgccagatcctggctgttcctgcggagccaggagtacaagaaataccagacaaacaagacaaccggcaacaccgataagagagccttcgtcgagacctggcagtccttttaccggaagaagcttaaggaggtgtggaaacctgccgtgcggtctggcggatctggcggaggctcctcccaaggtgcccgtgaccttcgacgacgtggccgtgtacttcagcgagagcgagtggggcaggctggacaagtggcagaaggagctgtacaagcacgtgatgaggggcaactacgagatgctggtgagcctggactacgccatcagcaagcccgacatcctgaccaggatggagaggggcgaggagccctgccccgacggcccctggggccccgaggagggcaaggagagggaggccgccaggggatctggctccggcagcggccccaagaaaaagagaaaagtctaagctgccttctgcggggcttgccttctggccatgcccttcttctctcccttgcacctgtacctcttggtctttgaataaagcctgagtaggaaggctagcaaaaaaaaaaaaaaaaaaaaaaaaaaaaaaaaaaaaaaaaaaaaaaaaaaaaaaaaaaaaaaaaaaaaaaaaaaaaaaaa

SEQ ID NO: 16610 - RNA, 9485 nt, synthetic construct
  source 1..9485: mol_type = other RNA
aggaaataagagagaaaagaagagtaagaagaaatataagagccaccatggcccctaagaagaagcgtaaagtgagccggatggaacgcctcgtctacgaggtgcggcagaagtgcagaaacatcgaggacatctgcatctcctgcggatctctgaacgtgaccctggagcacccactgttcatcggcggcatgtgccagaactgtaaaaactgttttctggagtgtgcctatcaatacgacgatgacggctaccagagctactgcaccatctgttgcggcggaagagaggtgctgatgtgtggaaataacaactgctgccggtgcttctgcgtggaatgcgtggacctgctggtgggccccggcgccgcccaggccgctattaaggaagatccttggaactgctacatgtgcggccacaagggcacatacggcctgctgagacggagagaggactggcctagcagactgcagatgttcttcgccaataaccacgaccaggagttcgacccccctaaggtgtaccctcccgtccccgccgagaagagaaagcccatccgggtcctgagcctgttcgatggcatcgccaccggtctgctggtgctgaaggacctgggcatccaggtggataggtacattgcctccgaggtgtgcgaggactccatcaccgtgggaatggtgcgtcatcagggcaagatcatgtacgtgggcgacgtgcggagcgtgacacagaagcatatccaggagtggggccctttcgacctggtgatcggcggcagcccttgcaatgacctgagcatcgtgaacccagcccggaagggcctgtacgagggaaccggcagactgttcttcgagttttacagactgctgcacgacgcccggcctaaggaaggcgacgaccggcccttcttttggctgttcgagaatgtggtggccatgggagtcagcgacaagcgggatattagccggttcctggagagcaaccccgtgatgatcgatgccaaggaagtgagcgccgcccaccgggccagatacttctggggcaatctgcctggcatgaacagacccctggccagcaccgtgaacgacaagctggagctgcaggagtgcctggagcacggccggatcgccaagttcagcaaggtgagaaccatcaccacccgaagcaacagcatcaaacaaggcaaggaccagcactttcctgtgttcatgaacgagaaggaggacatcctgtggtgtaccgagatggagagagtgttcgggttcccagtccactacacagatgtcagcaacatgtctagactggccagacagagactgctgggaagaagctggtccgtccctgtgatcagacacctgttcgcccctctgaaggagtacttcgcctgcgtgagcagcggcaacagcaacgccaacagccggggccccagcttctctagcggcctggtgccactgtccctgagagggagccacatgggccccatggagatctacaaaaccgtgagcgcctggaagcggcagcctgtgcgcgtgctgagcctgtttcggaatatcgataaagtcctgaaaagcctgggattcctggagagcggctctggctccggcggtggcaccctgaagtacgtggaggatgtgacaaacgtggtcagacgggatgtggagaagtggggccccttcgatctggtgtacggcagcacccaacccctgggcagctcttgtgaccggtgccctggctggtacatgtttcagttccaccggatcctgcagtacgccctgccgagacaggagtcccagcggccattcttttggattttcatggacaacttgctgctgaccgaggatgaccaggaaactaccactcggttcctgcagaccgaagccgtgaccctgcaggacgtgagaggccgggactaccagaacgccatgcgggtgtggtccaacatccctggactgaaaagcaagcacgcacctctgacccctaaagaagaggagtacctgcaggcccaggtgcggagcagaagcaagctggacgcccctaaggtggatctgctggtgaagaattgcctcctgcccctgagagagtacttcaagtatttcagccagaatagtctgcccctgggaggcagcggcggcggcgccctggtgacatttgaggacgtcgccgtgcggttcacccaggaggaatgggctctgctggatccttctcagaaaatcctgtaccgggacgtgatgagagagacataccggaatctgacctccgtgggcatcaactgggaatgttgggaccttgaagcctgcttcagaagcctgggaagaaacctgagagtgcaggtggtgaagagaaagtgcgagctgaccaacagcggcccctgcgccgagggcggcccaagcagcggcgcccctcctcccagcggcggcagcccagccggctccccaacctctaccgaggagggcacctctgagtccgccacccccgagagcggccctggcacctccaccgagcccagcgagggcagcgcacccggcagccctgccggcagccccacctccacagaggagggaaccagcaccgagcccagcgaaggcagcgccccaggcaccagcaccgagcctagtgagcaggagattaaacggatcaacaagatcagaagaagacttgtgaaagacagcaacaccaagaaggccggcaagacaggccccatgaaaaccctgctggttagagtgatgacacccgatctgagagagcggctggaaaacctgagaaagaagcctgaaaatatcccccagcccatcagcaatacatctagagccaacctgaataagctgctgaccgattacaccgaaatgaagaaggcgatcctgcatgtgtactgggaagagttccagaaggaccctgtgggcctgatgagccgggtggcccagcctgccagcaagaagatcgatcagaacaagctgaaacctgagatggacgagaagggcaacctgaccaccgccggctttgcctgctctcagtgtggccagcccctgttcgtgtacaagctggagcaggtgtctgagaagggcaaggcttacaccaactacttcggacggtgcaatgtggccgagcacgaaaagctgatcctgctggcccagctgaagcccgagaaggatagcgacgaagccgtgacatatagcctgggaaagtttgggcagagggccctggatttctacagcattcatgtgaccaaggagtccacccaccccgtgaagcccctggcccagatcgccggaaacagatacgcctccggacctgtgggaaaggccctgagcgacgcatgtatgggcacaatcgcctccttcctgtctaagtaccaggacatcatcatcgaacaccagaaggtggtgaagggcaaccagaagagactggagagcctgcgggagctggccggcaaggaaaacctggaataccctagcgtgaccctgccacctcagcctcacaccaaggagggcgttgatgcctacaacgaagtgatcgcccgggtgcgaatgtgggtgaacctgaacctgtggcagaagctgaagctaagcagagatgatgccaagcctctgctgagactgaagggattcccttcctttcctctggtcgagagacaggccaacgaagtggactggtgggacatggtgtgtaacgtgaagaagctgatcaacgagaaaaaggaggatggcaaggtgttttggcagaatctggctggctacaagagacaggaagccctgagaccatacctgagcagcgaggaagatcggaagaagggaaagaaattcgctcggtaccagctgggcgacctgctgctgcacctggaaaagaagcacggcgaggactggggaaaggtgtacgacgaggcctgggagcggattgacaagaaagtggaaggcctgagcaagcacatcaagctggaagaggaacggagaagcgaggacgcccagagcaaggccgccctgaccgactggctgcgggctaaggccagcttcgtgatcgagggcctgaaggaggccgacaaggacgagttctgcagatgcgagctgaagctgcagaagtggtacggggacctgcggggaaagcccttcgccatcgaagccgagaacagcatcctggacatcagcggcttcagcaagcagtacaactgtgccttcatctggcagaaggacggcgtgaagaagctgaacctgtacctgatcatcaactacttcaagggcggcaagctgcggttcaagaagatcaaacctgaagccttcgaagccaacagattctacaccgtgatcaacaaaaagagcggcgagatcgtgcccatggaggtgaacttcaacttcgacgaccccaacctgatcatcctgcctctggcctttggcaagagacagggcagagaattcatctggaacgacctgctgtccctggaaaccggcagcctgaagctggccaacggaagagtgatcgagaagacactgtacaacagaagaacccggcaggatgagcctgccctgttcgtggccctgaccttcgagcggcgggaggtcctggactcctccaatatcaaaccaatgaacctgatcggcgtggcaagaggcgaaaacatccccgccgtgatcgccctgaccgaccccgagggctgcccactgagccggtttaaggatagcctgggaaacccaacccacatcctgagaatcggcgagagctataaggagaagcagcggaccatccaggccaagaaggaggtggagcagcggagagccggcggctacagccggaagtacgccagcaaagccaagaatctggcagacgatatggtgagaaacaccgctagagatctgctgtactacgccgtgacccaggatgccatgctgatcttcgccaacctgagccggggcttcggccggcagggcaagcggaccttcatggccgagagacagtacacacggatggaggactggctgaccgccaagctggcctacgagggcctgagcaagacctacctgtccaagacactggcccagtacacctccaagacatgcagcaactgtgggtttaccatcaccagcgccgactacgacagggtgctggagaagctgaagaagacagcaacaggctggatgaccacaattaacggcaaggagctgaaggtggagggccagattacctactacaacagatacaagagacagaacgtagtcaaggacctgtccgtcgagctggatagactgagcgaagaatctgtgaacaacgacatctcctcctggacaaagggcagaagcggagaagctctgagcctcctgaagaaaagattctcccatagacccgtgcaggagaagttcgtgtgcctgaactgcggcttcgagacacacgcagccgagcaagccgccctgaacatcgccagatcctggctgttcctgcggagccaggagtacaagaaataccagacaaacaagacaaccggcaacaccgataagagagccttcgtcgagacctggcagtccttttaccggaagaagcttaaggaggtgtggaaacctgccgtgcggtctggcggatctggcggaggctcctgcaacatgagcctgagcttcagcgacgtggccgtggacctgagccaggaggagtgggagtgcatgagccccgcccagagggccctgtacagggacgtgatgctggagaactacagcaacctggtgagcctgggctgcagcacccccaagcccgacatgatcaccctgctggagcaggagaaggagccctggatgatcctgagggagggcaccggcagctggttcaccgacctggagagcgagggcggcccaagcagcggcgcccctcctcccagcggcggcagcccagccggctccccaacctctaccgaggagggcacctctgagtccgccacccccgagagcggccctggcacctccaccgagcccagcgagggcagcgcacccggcagccctgccggcagccccacctccacagaggagggaaccagcaccgagcccagcgaaggcagcgccccaggcaccagcaccgagcctagtgagcaggagattaaacggatcaacaagatcagaagaagacttgtgaaagacagcaacaccaagaaggccggcaagacaggccccatgaaaaccctgctggttagagtgatgacacccgatctgagagagcggctggaaaacctgagaaagaagcctgaaaatatcccccagcccatcagcaatacatctagagccaacctgaataagctgctgaccgattacaccgaaatgaagaaggcgatcctgcatgtgtactgggaagagttccagaaggaccctgtgggcctgatgagccgggtggcccagcctgccagcaagaagatcgatcagaacaagctgaaacctgagatggacgagaagggcaacctgaccaccgccggctttgcctgctctcagtgtggccagcccctgttcgtgtacaagctggagcaggtgtctgagaagggcaaggcttacaccaactacttcggacggtgcaatgtggccgagcacgaaaagctgatcctgctggcccagctgaagcccgagaaggatagcgacgaagccgtgacatatagcctgggaaagtttgggcagagggccctggatttctacagcattcatgtgaccaaggagtccacccaccccgtgaagcccctggcccagatcgccggaaacagatacgcctccggacctgtgggaaaggccctgagcgacgcatgtatgggcacaatcgcctccttcctgtctaagtaccaggacatcatcatcgaacaccagaaggtggtgaagggcaaccagaagagactggagagcctgcgggagctggccggcaaggaaaacctggaataccctagcgtgaccctgccacctcagcctcacaccaaggagggcgttgatgcctacaacgaagtgatcgcccgggtgcgaatgtgggtgaacctgaacctgtggcagaagctgaagctaagcagagatgatgccaagcctctgctgagactgaagggattcccttcctttcctctggtcgagagacaggccaacgaagtggactggtgggacatggtgtgtaacgtgaagaagctgatcaacgagaaaaaggaggatggcaaggtgttttggcagaatctggctggctacaagagacaggaagccctgagaccatacctgagcagcgaggaagatcggaagaagggaaagaaattcgctcggtaccagctgggcgacctgctgctgcacctggaaaagaagcacggcgaggactggggaaaggtgtacgacgaggcctgggagcggattgacaagaaagtggaaggcctgagcaagcacatcaagctggaagaggaacggagaagcgaggacgcccagagcaaggccgccctgaccgactggctgcgggctaaggccagcttcgtgatcgagggcctgaaggaggccgacaaggacgagttctgcagatgcgagctgaagctgcagaagtggtacggggacctgcggggaaagcccttcgccatcgaagccgagaacagcatcctggacatcagcggcttcagcaagcagtacaactgtgccttcatctggcagaaggacggcgtgaagaagctgaacctgtacctgatcatcaactacttcaagggcggcaagctgcggttcaagaagatcaaacctgaagccttcgaagccaacagattctacaccgtgatcaacaaaaagagcggcgagatcgtgcccatggaggtgaacttcaacttcgacgaccccaacctgatcatcctgcctctggcctttggcaagagacagggcagagaattcatctggaacgacctgctgtccctggaaaccggcagcctgaagctggccaacggaagagtgatcgagaagacactgtacaacagaagaacccggcaggatgagcctgccctgttcgtggccctgaccttcgagcggcgggaggtcctggactcctccaatatcaaaccaatgaacctgatcggcgtggcaagaggcgaaaacatccccgccgtgatcgccctgaccgaccccgagggctgcccactgagccggtttaaggatagcctgggaaacccaacccacatcctgagaatcggcgagagctataaggagaagcagcggaccatccaggccaagaaggaggtggagcagcggagagccggcggctacagccggaagtacgccagcaaagccaagaatctggcagacgatatggtgagaaacaccgctagagatctgctgtactacgccgtgacccaggatgccatgctgatcttcgccaacctgagccggggcttcggccggcagggcaagcggaccttcatggccgagagacagtacacacggatggaggactggctgaccgccaagctggcctacgagggcctgagcaagacctacctgtccaagacactggcccagtacacctccaagacatgcagcaactgtgggtttaccatcaccagcgccgactacgacagggtgctggagaagctgaagaagacagcaacaggctggatgaccacaattaacggcaaggagctgaaggtggagggccagattacctactacaacagatacaagagacagaacgtagtcaaggacctgtccgtcgagctggatagactgagcgaagaatctgtgaacaacgacatctcctcctggacaaagggcagaagcggagaagctctgagcctcctgaagaaaagattctcccatagacccgtgcaggagaagttcgtgtgcctgaactgcggcttcgagacacacgcagccgagcaagccgccctgaacatcgccagatcctggctgttcctgcggagccaggagtacaagaaataccagacaaacaagacaaccggcaacaccgataagagagccttcgtcgagacctggcagtccttttaccggaagaagcttaaggaggtgtggaaacctgccgtgcggtctggcggatctggcggaggctccttgcaacatgagcctgagcttcagcgacgtggccgtggacctgagccaggaggagtgggagtgcatgagccccgcccagagggccctgtacagggacgtgatgctggagaactacagcaacctggtgagcctgggctgcagcacccccaagcccgacatgatcaccctgctggagcaggagaaggagccctggatgatcctgagggagggcaccggcagctggttcaccgacctggagagcgagggatctggctccggcagcggccccaagaaaaagagaaaagtctaagctgccttctgcggggcttgccttctggccatgcccttcttctctcccttgcacctgtacctcttggtctttgaataaagcctgagtaggaaggctagcaaaaaaaaaaaaaaaaaaaaaaaaaaaaaaaaaaaaaaaaaaaaaaaaaaaaaaaaaaaaaaaaaaaaaaaaaaaaaaaa

SEQ ID NO: 16611 - RNA, 9485 nt, synthetic construct
  source 1..9485: mol_type = other RNA
aggaaataagagagaaaagaagagtaagaagaaatataagagccaccatggcccctaagaagaagcgtaaagtgagccggatggaacgcctcgtctacgaggtgcggcagaagtgcagaaacatcgaggacatctgcatctcctgcggatctctgaacgtgaccctggagcacccactgttcatcggcggcatgtgccagaactgtaaaaactgttttctggagtgtgcctatcaatacgacgatgacggctaccagagctactgcaccatctgttgcggcggaagagaggtgctgatgtgtggaaataacaactgctgccggtgcttctgcgtggaatgcgtggacctgctggtgggccccggcgccgcccaggccgctattaaggaagatccttggaactgctacatgtgcggccacaagggcacatacggcctgctgagacggagagaggactggcctagcagactgcagatgttcttcgccaataaccacgaccaggagttcgacccccctaaggtgtaccctcccgtccccgccgagaagagaaagcccatccgggtcctgagcctgttcgatggcatcgccaccggtctgctggtgctgaaggacctgggcatccaggtggataggtacattgcctccgaggtgtgcgaggactccatcaccgtgggaatggtgcgtcatcagggcaagatcatgtacgtgggcgacgtgcggagcgtgacacagaagcatatccaggagtggggccctttcgacctggtgatcggcggcagcccttgcaatgacctgagcatcgtgaacccagcccggaagggcctgtacgagggaaccggcagactgttcttcgagttttacagactgctgcacgacgcccggcctaaggaaggcgacgaccggcccttcttttggctgttcgagaatgtggtggccatgggagtcagcgacaagcgggatattagccggttcctggagagcaaccccgtgatgatcgatgccaaggaagtgagcgccgcccaccgggccagatacttctggggcaatctgcctggcatgaacagacccctggccagcaccgtgaacgacaagctggagctgcaggagtgcctggagcacggccggatcgccaagttcagcaaggtgagaaccatcaccacccgaagcaacagcatcaaacaaggcaaggaccagcactttcctgtgttcatgaacgagaaggaggacatcctgtggtgtaccgagatggagagagtgttcgggttcccagtccactacacagatgtcagcaacatgtctagactggccagacagagactgctgggaagaagctggtccgtccctgtgatcagacacctgttcgcccctctgaaggagtacttcgcctgcgtgagcagcggcaacagcaacgccaacagccggggccccagcttctctagcggcctggtgccactgtccctgagagggagccacatgggccccatggagatctacaaaaccgtgagcgcctggaagcggcagcctgtgcgcgtgctgagcctgtttcggaatatcgataaagtcctgaaaagcctgggattcctggagagcggctctggctccggcggtggcaccctgaagtacgtggaggatgtgacaaacgtggtcagacgggatgtggagaagtggggccccttcgatctggtgtacggcagcacccaacccctgggcagctcttgtgaccggtgccctggctggtacatgtttcagttccaccggatcctgcagtacgccctgccgagacaggagtcccagcggccattcttttggattttcatggacaacttgctgctgaccgaggatgaccaggaaactaccactcggttcctgcagaccgaagccgtgaccctgcaggacgtgagaggccgggactaccagaacgccatgcgggtgtggtccaacatccctggactgaaaagcaagcacgcacctctgacccctaaagaagaggagtacctgcaggcccaggtgcggagcagaagcaagctggacgcccctaaggtggatctgctggtgaagaattgcctcctgcccctgagagagtacttcaagtatttcagccagaatagtctgcccctgggaggcagcggcggcggcgccctggtgacatttgaggacgtcgccgtgcggttcacccaggaggaatgggctctgctggatccttctcagaaaatcctgtaccgggacgtgatgagagagacataccggaatctgacctccgtgggcatcaactgggaatgttgggaccttgaagcctgcttcagaagcctgggaagaaacctgagagtgcaggtggtgaagagaaagtgcgagctgaccaacagcggcccctgcgccgagggcggcccaagcagcggcgcccctcctcccagcggcggcagcccagccggctccccaacctctaccgaggagggcacctctgagtccgccacccccgagagcggccctggcacctccaccgagcccagcgagggcagcgcacccggcagccctgccggcagccccacctccacagaggagggaaccagcaccgagcccagcgaaggcagcgccccaggcaccagcaccgagcctagtgagcaggagattaaacggatcaacaagatcagaagaagacttgtgaaagacagcaacaccaagaaggccggcaagacaggccccatgaaaaccctgctggttagagtgatgacacccgatctgagagagcggctggaaaacctgagaaagaagcctgaaaatatcccccagcccatcagcaatacatctagagccaacctgaataagctgctgaccgattacaccgaaatgaagaaggcgatcctgcatgtgtactgggaagagttccagaaggaccctgtgggcctgatgagccgggtggcccagcctgccagcaagaagatcgatcagaacaagctgaaacctgagatggacgagaagggcaacctgaccaccgccggctttgcctgctctcagtgtggccagcccctgttcgtgtacaagctggagcaggtgtctgagaagggcaaggcttacaccaactacttcggacggtgcaatgtggccgagcacgaaaagctgatcctgctggcccagctgaagcccgagaaggatagcgacgaagccgtgacatatagcctgggaaagtttgggcagagggccctggatttctacagcattcatgtgaccaaggagtccacccaccccgtgaagcccctggcccagatcgccggaaacagatacgcctccggacctgtgggaaaggccctgagcgacgcatgtatgggcacaatcgcctccttcctgtctaagtaccaggacatcatcatcgaacaccagaaggtggtgaagggcaaccagaagagactggagagcctgcgggagctggccggcaaggaaaacctggaataccctagcgtgaccctgccacctcagcctcacaccaaggagggcgttgatgcctacaacgaagtgatcgcccgggtgcgaatgtgggtgaacctgaacctgtggcagaagctgaagctaagcagagatgatgccaagcctctgctgagactgaagggattcccttcctttcctctggtcgagagacaggccaacgaagtggactggtgggacatggtgtgtaacgtgaagaagctgatcaacgagaaaaaggaggatggcaaggtgttttggcagaatctggctggctacaagagacaggaagccctgagaccatacctgagcagcgaggaagatcggaagaagggaaagaaattcgctcggtaccagctgggcgacctgctgctgcacctggaaaagaagcacggcgaggactggggaaaggtgtacgacgaggcctgggagcggattgacaagaaagtggaaggcctgagcaagcacatcaagctggaagaggaacggagaagcgaggacgcccagagcaaggccgccctgaccgactggctgcgggctaaggccagcttcgtgatcgagggcctgaaggaggccgacaaggacgagttctgcagatgcgagctgaagctgcagaagtggtacggggacctgcggggaaagcccttcgccatcgaagccgagaacagcatcctggacatcagcggcttcagcaagcagtacaactgtgccttcatctggcagaaggacggcgtgaagaagctgaacctgtacctgatcatcaactacttcaagggcggcaagctgcggttcaagaagatcaaacctgaagccttcgaagccaacagattctacaccgtgatcaacaaaaagagcggcgagatcgtgcccatggaggtgaacttcaacttcgacgaccccaacctgatcatcctgcctctggcctttggcaagagacagggcagagaattcatctggaacgacctgctgtccctggaaaccggcagcctgaagctggccaacggaagagtgatcgagaagacactgtacaacagaagaacccggcaggatgagcctgccctgttcgtggccctgaccttcgagcggcgggaggtcctggactcctccaatatcaaaccaatgaacctgatcggcgtggcaagaggcgaaaacatccccgccgtgatcgccctgaccgaccccgagggctgcccactgagccggtttaaggatagcctgggaaacccaacccacatcctgagaatcggcgagagctataaggagaagcagcggaccatccaggccaagaaggaggtggagcagcggagagccggcggctacagccggaagtacgccagcaaagccaagaatctggcagacgatatggtgagaaacaccgctagagatctgctgtactacgccgtgacccaggatgccatgctgatcttcgccaacctgagccggggcttcggccggcagggcaagcggaccttcatggccgagagacagtacacacggatggaggactggctgaccgccaagctggcctacgagggcctgagcaagacctacctgtccaagacactggcccagtacacctccaagacatgcagcaactgtgggtttaccatcaccagcgccgactacgacagggtgctggagaagctgaagaagacagcaacaggctggatgaccacaattaacggcaaggagctgaaggtggagggccagattacctactacaacagatacaagagacagaacgtagtcaaggacctgtccgtcgagctggatagactgagcgaagaatctgtgaacaacgacatctcctcctggacaaagggcagaagcggagaagctctgagcctcctgaagaaaagattctcccatagacccgtgcaggagaagttcgtgtgcctgaactgcggcttcgagacacacgcagccgagcaagccgccctgaacatcgccagatcctggctgttcctgcggagccaggagtacaagaaataccagacaaacaagacaaccggcaacaccgataagagagccttcgtcgagacctggcagtccttttaccggaagaagcttaaggaggtgtggaaacctgccgtgcggtctggcggatctggcggaggctccgagcccggcgccgtgagcttcgccgacgtggccgtgtacttctgcagggaggagtggggctgcctgaggcccgcccagagggccctgtacagggacgtgatgagggagacctacggccacctgagcgccctgggcatcggcggcaacaagcccgccctgatcagctgggtggaggaggaggccgagctgtggggccccgccgcccaggaccccgaggtggccaagtgccagacccagaccgacggcggcccaagcagcggcgcccctcctcccagcggcggcagcccagccggctccccaacctctaccgaggagggcacctctgagtccgccacccccgagagcggccctggcacctccaccgagcccagcgagggcagcgcacccggcagccctgccggcagccccacctccacagaggagggaaccagcaccgagcccagcgaaggcagcgccccaggcaccagcaccgagcctagtgagcaggagattaaacggatcaacaagatcagaagaagacttgtgaaagacagcaacaccaagaaggccggcaagacaggccccatgaaaaccctgctggttagagtgatgacacccgatctgagagagcggctggaaaacctgagaaagaagcctgaaaatatcccccagcccatcagcaatacatctagagccaacctgaataagctgctgaccgattacaccgaaatgaagaaggcgatcctgcatgtgtactgggaagagttccagaaggaccctgtgggcctgatgagccgggtggcccagcctgccagcaagaagatcgatcagaacaagctgaaacctgagatggacgagaagggcaacctgaccaccgccggctttgcctgctctcagtgtggccagcccctgttcgtgtacaagctggagcaggtgtctgagaagggcaaggcttacaccaactacttcggacggtgcaatgtggccgagcacgaaaagctgatcctgctggcccagctgaagcccgagaaggatagcgacgaagccgtgacatatagcctgggaaagtttgggcagagggccctggatttctacagcattcatgtgaccaaggagtccacccaccccgtgaagcccctggcccagatcgccggaaacagatacgcctccggacctgtgggaaaggccctgagcgacgcatgtatgggcacaatcgcctccttcctgtctaagtaccaggacatcatcatcgaacaccagaaggtggtgaagggcaaccagaagagactggagagcctgcgggagctggccggcaaggaaaacctggaataccctagcgtgaccctgccacctcagcctcacaccaaggagggcgttgatgcctacaacgaagtgatcgcccgggtgcgaatgtgggtgaacctgaacctgtggcagaagctgaagctaagcagagatgatgccaagcctctgctgagactgaagggattcccttcctttcctctggtcgagagacaggccaacgaagtggactggtgggacatggtgtgtaacgtgaagaagctgatcaacgagaaaaaggaggatggcaaggtgttttggcagaatctggctggctacaagagacaggaagccctgagaccatacctgagcagcgaggaagatcggaagaagggaaagaaattcgctcggtaccagctgggcgacctgctgctgcacctggaaaagaagcacggcgaggactggggaaaggtgtacgacgaggcctgggagcggattgacaagaaagtggaaggcctgagcaagcacatcaagctggaagaggaacggagaagcgaggacgcccagagcaaggccgccctgaccgactggctgcgggctaaggccagcttcgtgatcgagggcctgaaggaggccgacaaggacgagttctgcagatgcgagctgaagctgcagaagtggtacggggacctgcggggaaagcccttcgccatcgaagccgagaacagcatcctggacatcagcggcttcagcaagcagtacaactgtgccttcatctggcagaaggacggcgtgaagaagctgaacctgtacctgatcatcaactacttcaagggcggcaagctgcggttcaagaagatcaaacctgaagccttcgaagccaacagattctacaccgtgatcaacaaaaagagcggcgagatcgtgcccatggaggtgaacttcaacttcgacgaccccaacctgatcatcctgcctctggcctttggcaagagacagggcagagaattcatctggaacgacctgctgtccctggaaaccggcagcctgaagctggccaacggaagagtgatcgagaagacactgtacaacagaagaacccggcaggatgagcctgccctgttcgtggccctgaccttcgagcggcgggaggtcctggactcctccaatatcaaaccaatgaacctgatcggcgtggcaagaggcgaaaacatccccgccgtgatcgccctgaccgaccccgagggctgcccactgagccggtttaaggatagcctgggaaacccaacccacatcctgagaatcggcgagagctataaggagaagcagcggaccatccaggccaagaaggaggtggagcagcggagagccggcggctacagccggaagtacgccagcaaagccaagaatctggcagacgatatggtgagaaacaccgctagagatctgctgtactacgccgtgacccaggatgccatgctgatcttcgccaacctgagccggggcttcggccggcagggcaagcggaccttcatggccgagagacagtacacacggatggaggactggctgaccgccaagctggcctacgagggcctgagcaagacctacctgtccaagacactggcccagtacacctccaagacatgcagcaactgtgggtttaccatcaccagcgccgactacgacagggtgctggagaagctgaagaagacagcaacaggctggatgaccacaattaacggcaaggagctgaaggtggagggccagattacctactacaacagatacaagagacagaacgtagtcaaggacctgtccgtcgagctggatagactgagcgaagaatctgtgaacaacgacatctcctcctggacaaagggcagaagcggagaagctctgagcctcctgaagaaaagattctcccatagacccgtgcaggagaagttcgtgtgcctgaactgcggcttcgagacacacgcagccgagcaagccgccctgaacatcgccagatcctggctgttcctgcggagccaggagtacaagaaataccagacaaacaagacaaccggcaacaccgataagagagccttcgtcgagacctggcagtccttttaccggaagaagcttaaggaggtgtggaaacctgccgtgcggtctggcggatctggcggaggctcctgagcccggcgccgtgagcttcgccgacgtggccgtgtacttctgcagggaggagtggggctgcctgaggcccgcccagagggccctgtacagggacgtgatgagggagacctacggccacctgagcgccctgggcatcggcggcaacaagcccgccctgatcagctgggtggaggaggaggccgagctgtggggccccgccgcccaggaccccgaggtggccaagtgccagacccagaccgacggatctggctccggcagcggccccaagaaaaagagaaaagtctaagctgccttctgcggggcttgccttctggccatgcccttcttctctcccttgcacctgtacctcttggtctttgaataaagcctgagtaggaaggctagcaaaaaaaaaaaaaaaaaaaaaaaaaaaaaaaaaaaaaaaaaaaaaaaaaaaaaaaaaaaaaaaaaaaaaaaaaaaaaaaa

SEQ ID NO: 16612 - RNA, 9485 nt, synthetic construct
  source 1..9485: mol_type = other RNA
aggaaataagagagaaaagaagagtaagaagaaatataagagccaccatggcccctaagaagaagcgtaaagtgagccggatggaacgcctcgtctacgaggtgcggcagaagtgcagaaacatcgaggacatctgcatctcctgcggatctctgaacgtgaccctggagcacccactgttcatcggcggcatgtgccagaactgtaaaaactgttttctggagtgtgcctatcaatacgacgatgacggctaccagagctactgcaccatctgttgcggcggaagagaggtgctgatgtgtggaaataacaactgctgccggtgcttctgcgtggaatgcgtggacctgctggtgggccccggcgccgcccaggccgctattaaggaagatccttggaactgctacatgtgcggccacaagggcacatacggcctgctgagacggagagaggactggcctagcagactgcagatgttcttcgccaataaccacgaccaggagttcgacccccctaaggtgtaccctcccgtccccgccgagaagagaaagcccatccgggtcctgagcctgttcgatggcatcgccaccggtctgctggtgctgaaggacctgggcatccaggtggataggtacattgcctccgaggtgtgcgaggactccatcaccgtgggaatggtgcgtcatcagggcaagatcatgtacgtgggcgacgtgcggagcgtgacacagaagcatatccaggagtggggccctttcgacctggtgatcggcggcagcccttgcaatgacctgagcatcgtgaacccagcccggaagggcctgtacgagggaaccggcagactgttcttcgagttttacagactgctgcacgacgcccggcctaaggaaggcgacgaccggcccttcttttggctgttcgagaatgtggtggccatgggagtcagcgacaagcgggatattagccggttcctggagagcaaccccgtgatgatcgatgccaaggaagtgagcgccgcccaccgggccagatacttctggggcaatctgcctggcatgaacagacccctggccagcaccgtgaacgacaagctggagctgcaggagtgcctggagcacggccggatcgccaagttcagcaaggtgagaaccatcaccacccgaagcaacagcatcaaacaaggcaaggaccagcactttcctgtgttcatgaacgagaaggaggacatcctgtggtgtaccgagatggagagagtgttcgggttcccagtccactacacagatgtcagcaacatgtctagactggccagacagagactgctgggaagaagctggtccgtccctgtgatcagacacctgttcgcccctctgaaggagtacttcgcctgcgtgagcagcggcaacagcaacgccaacagccggggccccagcttctctagcggcctggtgccactgtccctgagagggagccacatgggccccatggagatctacaaaaccgtgagcgcctggaagcggcagcctgtgcgcgtgctgagcctgtttcggaatatcgataaagtcctgaaaagcctgggattcctggagagcggctctggctccggcggtggcaccctgaagtacgtggaggatgtgacaaacgtggtcagacgggatgtggagaagtggggccccttcgatctggtgtacggcagcacccaacccctgggcagctcttgtgaccggtgccctggctggtacatgtttcagttccaccggatcctgcagtacgccctgccgagacaggagtcccagcggccattcttttggattttcatggacaacttgctgctgaccgaggatgaccaggaaactaccactcggttcctgcagaccgaagccgtgaccctgcaggacgtgagaggccgggactaccagaacgccatgcgggtgtggtccaacatccctggactgaaaagcaagcacgcacctctgacccctaaagaagaggagtacctgcaggcccaggtgcggagcagaagcaagctggacgcccctaaggtggatctgctggtgaagaattgcctcctgcccctgagagagtacttcaagtatttcagccagaatagtctgcccctgggaggcagcggcggcggcgccctggtgacatttgaggacgtcgccgtgcggttcacccaggaggaatgggctctgctggatccttctcagaaaatcctgtaccgggacgtgatgagagagacataccggaatctgacctccgtgggcatcaactgggaatgttgggaccttgaagcctgcttcagaagcctgggaagaaacctgagagtgcaggtggtgaagagaaagtgcgagctgaccaacagcggcccctgcgccgagggcggcccaagcagcggcgcccctcctcccagcggcggcagcccagccggctccccaacctctaccgaggagggcacctctgagtccgccacccccgagagcggccctggcacctccaccgagcccagcgagggcagcgcacccggcagccctgccggcagccccacctccacagaggagggaaccagcaccgagcccagcgaaggcagcgccccaggcaccagcaccgagcctagtgagcaggagattaaacggatcaacaagatcagaagaagacttgtgaaagacagcaacaccaagaaggccggcaagacaggccccatgaaaaccctgctggttagagtgatgacacccgatctgagagagcggctggaaaacctgagaaagaagcctgaaaatatcccccagcccatcagcaatacatctagagccaacctgaataagctgctgaccgattacaccgaaatgaagaaggcgatcctgcatgtgtactgggaagagttccagaaggaccctgtgggcctgatgagccgggtggcccagcctgccagcaagaagatcgatcagaacaagctgaaacctgagatggacgagaagggcaacctgaccaccgccggctttgcctgctctcagtgtggccagcccctgttcgtgtacaagctggagcaggtgtctgagaagggcaaggcttacaccaactacttcggacggtgcaatgtggccgagcacgaaaagctgatcctgctggcccagctgaagcccgagaaggatagcgacgaagccgtgacatatagcctgggaaagtttgggcagagggccctggatttctacagcattcatgtgaccaaggagtccacccaccccgtgaagcccctggcccagatcgccggaaacagatacgcctccggacctgtgggaaaggccctgagcgacgcatgtatgggcacaatcgcctccttcctgtctaagtaccaggacatcatcatcgaacaccagaaggtggtgaagggcaaccagaagagactggagagcctgcgggagctggccggcaaggaaaacctggaataccctagcgtgaccctgccacctcagcctcacaccaaggagggcgttgatgcctacaacgaagtgatcgcccgggtgcgaatgtgggtgaacctgaacctgtggcagaagctgaagctaagcagagatgatgccaagcctctgctgagactgaagggattcccttcctttcctctggtcgagagacaggccaacgaagtggactggtgggacatggtgtgtaacgtgaagaagctgatcaacgagaaaaaggaggatggcaaggtgttttggcagaatctggctggctacaagagacaggaagccctgagaccatacctgagcagcgaggaagatcggaagaagggaaagaaattcgctcggtaccagctgggcgacctgctgctgcacctggaaaagaagcacggcgaggactggggaaaggtgtacgacgaggcctgggagcggattgacaagaaagtggaaggcctgagcaagcacatcaagctggaagaggaacggagaagcgaggacgcccagagcaaggccgccctgaccgactggctgcgggctaaggccagcttcgtgatcgagggcctgaaggaggccgacaaggacgagttctgcagatgcgagctgaagctgcagaagtggtacggggacctgcggggaaagcccttcgccatcgaagccgagaacagcatcctggacatcagcggcttcagcaagcagtacaactgtgccttcatctggcagaaggacggcgtgaagaagctgaacctgtacctgatcatcaactacttcaagggcggcaagctgcggttcaagaagatcaaacctgaagccttcgaagccaacagattctacaccgtgatcaacaaaaagagcggcgagatcgtgcccatggaggtgaacttcaacttcgacgaccccaacctgatcatcctgcctctggcctttggcaagagacagggcagagaattcatctggaacgacctgctgtccctggaaaccggcagcctgaagctggccaacggaagagtgatcgagaagacactgtacaacagaagaacccggcaggatgagcctgccctgttcgtggccctgaccttcgagcggcgggaggtcctggactcctccaatatcaaaccaatgaacctgatcggcgtggcaagaggcgaaaacatccccgccgtgatcgccctgaccgaccccgagggctgcccactgagccggtttaaggatagcctgggaaacccaacccacatcctgagaatcggcgagagctataaggagaagcagcggaccatccaggccaagaaggaggtggagcagcggagagccggcggctacagccggaagtacgccagcaaagccaagaatctggcagacgatatggtgagaaacaccgctagagatctgctgtactacgccgtgacccaggatgccatgctgatcttcgccaacctgagccggggcttcggccggcagggcaagcggaccttcatggccgagagacagtacacacggatggaggactggctgaccgccaagctggcctacgagggcctgagcaagacctacctgtccaagacactggcccagtacacctccaagacatgcagcaactgtgggtttaccatcaccagcgccgactacgacagggtgctggagaagctgaagaagacagcaacaggctggatgaccacaattaacggcaaggagctgaaggtggagggccagattacctactacaacagatacaagagacagaacgtagtcaaggacctgtccgtcgagctggatagactgagcgaagaatctgtgaacaacgacatctcctcctggacaaagggcagaagcggagaagctctgagcctcctgaagaaaagattctcccatagacccgtgcaggagaagttcgtgtgcctgaactgcggcttcgagacacacgcagccgagcaagccgccctgaacatcgccagatcctggctgttcctgcggagccaggagtacaagaaataccagacaaacaagacaaccggcaacaccgataagagagccttcgtcgagacctggcagtccttttaccggaagaagcttaaggaggtgtggaaacctgccgtgcggtctggcggatctggcggaggctccttcaagggccccgtgaccttcaaggacgtgaccgtggagttcaccaaggaggagtggaagctgctgacccccgcccagaggaccctgtacaaggacgtgatgctggagaactacaaccacctggtgagcgtgggctacagggtgagcaagcccaacctggtgttcaagctgaagcagggcaaggagccctgggtgctggaggtggagttccccaggaggaggtgccccgaggagctgtggaacggcggcccaagcagcggcgcccctcctcccagcggcggcagcccagccggctccccaacctctaccgaggagggcacctctgagtccgccacccccgagagcggccctggcacctccaccgagcccagcgagggcagcgcacccggcagccctgccggcagccccacctccacagaggagggaaccagcaccgagcccagcgaaggcagcgccccaggcaccagcaccgagcctagtgagcaggagattaaacggatcaacaagatcagaagaagacttgtgaaagacagcaacaccaagaaggccggcaagacaggccccatgaaaaccctgctggttagagtgatgacacccgatctgagagagcggctggaaaacctgagaaagaagcctgaaaatatcccccagcccatcagcaatacatctagagccaacctgaataagctgctgaccgattacaccgaaatgaagaaggcgatcctgcatgtgtactgggaagagttccagaaggaccctgtgggcctgatgagccgggtggcccagcctgccagcaagaagatcgatcagaacaagctgaaacctgagatggacgagaagggcaacctgaccaccgccggctttgcctgctctcagtgtggccagcccctgttcgtgtacaagctggagcaggtgtctgagaagggcaaggcttacaccaactacttcggacggtgcaatgtggccgagcacgaaaagctgatcctgctggcccagctgaagcccgagaaggatagcgacgaagccgtgacatatagcctgggaaagtttgggcagagggccctggatttctacagcattcatgtgaccaaggagtccacccaccccgtgaagcccctggcccagatcgccggaaacagatacgcctccggacctgtgggaaaggccctgagcgacgcatgtatgggcacaatcgcctccttcctgtctaagtaccaggacatcatcatcgaacaccagaaggtggtgaagggcaaccagaagagactggagagcctgcgggagctggccggcaaggaaaacctggaataccctagcgtgaccctgccacctcagcctcacaccaaggagggcgttgatgcctacaacgaagtgatcgcccgggtgcgaatgtgggtgaacctgaacctgtggcagaagctgaagctaagcagagatgatgccaagcctctgctgagactgaagggattcccttcctttcctctggtcgagagacaggccaacgaagtggactggtgggacatggtgtgtaacgtgaagaagctgatcaacgagaaaaaggaggatggcaaggtgttttggcagaatctggctggctacaagagacaggaagccctgagaccatacctgagcagcgaggaagatcggaagaagggaaagaaattcgctcggtaccagctgggcgacctgctgctgcacctggaaaagaagcacggcgaggactggggaaaggtgtacgacgaggcctgggagcggattgacaagaaagtggaaggcctgagcaagcacatcaagctggaagaggaacggagaagcgaggacgcccagagcaaggccgccctgaccgactggctgcgggctaaggccagcttcgtgatcgagggcctgaaggaggccgacaaggacgagttctgcagatgcgagctgaagctgcagaagtggtacggggacctgcggggaaagcccttcgccatcgaagccgagaacagcatcctggacatcagcggcttcagcaagcagtacaactgtgccttcatctggcagaaggacggcgtgaagaagctgaacctgtacctgatcatcaactacttcaagggcggcaagctgcggttcaagaagatcaaacctgaagccttcgaagccaacagattctacaccgtgatcaacaaaaagagcggcgagatcgtgcccatggaggtgaacttcaacttcgacgaccccaacctgatcatcctgcctctggcctttggcaagagacagggcagagaattcatctggaacgacctgctgtccctggaaaccggcagcctgaagctggccaacggaagagtgatcgagaagacactgtacaacagaagaacccggcaggatgagcctgccctgttcgtggccctgaccttcgagcggcgggaggtcctggactcctccaatatcaaaccaatgaacctgatcggcgtggcaagaggcgaaaacatccccgccgtgatcgccctgaccgaccccgagggctgcccactgagccggtttaaggatagcctgggaaacccaacccacatcctgagaatcggcgagagctataaggagaagcagcggaccatccaggccaagaaggaggtggagcagcggagagccggcggctacagccggaagtacgccagcaaagccaagaatctggcagacgatatggtgagaaacaccgctagagatctgctgtactacgccgtgacccaggatgccatgctgatcttcgccaacctgagccggggcttcggccggcagggcaagcggaccttcatggccgagagacagtacacacggatggaggactggctgaccgccaagctggcctacgagggcctgagcaagacctacctgtccaagacactggcccagtacacctccaagacatgcagcaactgtgggtttaccatcaccagcgccgactacgacagggtgctggagaagctgaagaagacagcaacaggctggatgaccacaattaacggcaaggagctgaaggtggagggccagattacctactacaacagatacaagagacagaacgtagtcaaggacctgtccgtcgagctggatagactgagcgaagaatctgtgaacaacgacatctcctcctggacaaagggcagaagcggagaagctctgagcctcctgaagaaaagattctcccatagacccgtgcaggagaagttcgtgtgcctgaactgcggcttcgagacacacgcagccgagcaagccgccctgaacatcgccagatcctggctgttcctgcggagccaggagtacaagaaataccagacaaacaagacaaccggcaacaccgataagagagccttcgtcgagacctggcagtccttttaccggaagaagcttaaggaggtgtggaaacctgccgtgcggtctggcggatctggcggaggctcctttcaagggccccgtgaccttcaaggacgtgaccgtggagttcaccaaggaggagtggaagctgctgacccccgcccagaggaccctgtacaaggacgtgatgctggagaactacaaccacctggtgagcgtgggctacagggtgagcaagcccaacctggtgttcaagctgaagcagggcaaggagccctgggtgctggaggtggagttccccaggaggaggtgccccgaggagctgtggaacggatctggctccggcagcggccccaagaaaaagagaaaagtctaagctgccttctgcggggcttgccttctggccatgcccttcttctctcccttgcacctgtacctcttggtctttgaataaagcctgagtaggaaggctagcaaaaaaaaaaaaaaaaaaaaaaaaaaaaaaaaaaaaaaaaaaaaaaaaaaaaaaaaaaaaaaaaaaaaaaaaaaaaaaaa
